United States Patent Application Publication US 2015/0376612 A1 - sequence listing, part 13

SEQ ID NO: 31966 - DNA, 1072 bp, Homo sapiens
tctctaacagagctttattaaaccaggaagggttcttttgatgcaaatgttatttggggattgatttggcactgtaatccctgttgaggggggcactgtagaccttgtgaggttagctgtaaacccatggaatggaaacttctatgctgtgtcctggctgtgtcctggcaaggtggattcctggccacatttactggttacctactgcagtgtgtgaggagctagtctaccccctattcaaccccccttttttttcttttgagaactgaattttccactgaaattttatttgtgtgccttaattattttccttttttactttgatagcagaagctgttgggatgtagtccagctctgaagaggagccattctgattctcttgaccatgacatctttcagctcatcgacccagatgagaacaaggaaaatgtgagtgtgacttcaatgtactaacctgaggcagaggtgaaacccacaggctgtcagtggcttagaagtggctgggctgctttctgggagactaaacttggccattatgtgcggtctttggagtcagagaattctgggtttggatcctgcttactagctgtgtgatgttggcaaattcttctctttttaatctttgctcttttgtaaaataggagtagtaataccttttagggatgttgtggcaataagtaagattatgtatgaagtattgaaaatggtgcctgacaggcgggagttgctcagattgtagctcacaggagtaattacatgtacaaatagtgtttgtctggaaggctctgcccaggctgtccttgcctctttgctctgaccctgaaatgaattgtaagcttaggaaaaggctctttggcagtatttgtaagaacggggtcaacaagttctagggaatctcagagtaactgaaatggtggcttggaaggtgaatttctggttatctaccctgaatgagcctggcttttttgttcttttagacattgcacagagtaggcatccaaaacagttgtaattttttcagccttctctctactgtatttctatatatttactttctccccttttccattcc

SEQ ID NO: 31967 - DNA, 1050 bp, Homo sapiens
gagtggccagaccctccctagccagctgtggtgggagtgcacctccagggacacctggtggagactgcagtcagcgcttgagggaagccagttggggcctgagtggtccaagttttccctgcctgcgcccctgcattcattcccacctcccctcccaggctgccggagcagcagtcagaacaactgcggtgtgagaccagcccacgccccacgcctgccacgctccctgtggctgtgtggtttggggccacggagcggaggcttcaacgcggacagttcaagtataccttggaccccaacatcacctctgctggccccaccaagagcttcctcaggtgttgggccaggggtgtggctgcatggcaggtggcagggaggtctttgcagctccactatgtgggggtttgtagggctttatgttgaggcactgagaatcccatgctgctagtaggggcaaggggtcgtgtggtttggggctggggctgagctgacctagccgggactgggctgtgctttaggtccaggtaacataagccatcttacgttacgtaagctcacggtctgtttcagtggaggacgtgagatatgcgtccgtggccagaatctggacgtggtacagacgccaagaatccgggtgaccgtggtctcgagaatgctgcagcccagccaggggcttggacggaggcgtcgcgtggtcccggagacggcatgttcccttggaccctcctgcagtagccagcaagtaggacacccttgggtacccccacactctccccttgccccataccacaccctggggacagccagagcaggtgccagaggaggctcttcccatctttgcttggcccctcgtcaacctgcctgtcttccttccagtttgaggagccgtgccatgtcaactcctcccagctcatcacgtgccgcacacctgccctcccaggcctgcctgaggacccctgggtccgggtggaatttatccttgacaacctggtctttgactttgcaacactgaaccccacacctttctcctatgaggccgaccccaccctg

SEQ ID NO: 31968 - DNA, 1038 bp, Homo sapiens
cactttccagagccacgctctgaccgtgtcgccctgagggagtctccacacccatttctgacctctgaccatgtgccccgtggagtccttgcatcccagctctgaactctaacttgagaccccatggggtccccatactccatttctggctctgccctccaacttgtggccccatggggtccctctgaccctatgctcctaactggtcgttttagtcctttctctgactaacccctccccaggcctgacacttcccccagtgcttgactctgaacccactcccatttctccagctcagctatgaggctctgcagccggagctccgtgtggggctgtttctgcgtcgggccggccgtctgcgtgtggacagtgctgaggggctgcatggtgagccacctgcgggctgctgggctggcggtggtagcagggctctcccaggcctgcctctcacgtgtgtctctgccacccccagtggtactgtatgactgttccgtgggacatggagactgcagccgctgccaaactgccatgccccagtatggctgtgtgtggtgtgagggggagcgtccacgttgtgtgacccgggaggcctgtggtgaggctgaggctgtggccacccagtgcccagcgcccctcatccactcggtttgttgaaaggctggccatcccttcctcagtgctgcccttagagggagggtgtgggggcccaaaggtgggaggttggggctgcctttccagttgagtagaggtgagcagtccttgtcctggaacaggtggagccactgactgggcctgtagacggaggcacccgtgtcaccatcaggggctccaacctgggccagcatgtgcaggatgtgctgggcatggtcacggtggctggagtgccctgtgctgtggatgcccaggagtacgaggtctccagcaggtaagctggctgcacccagcaggagcacggcgcagcctggggcctccgcggttggcgttgctgcttggggcctcccacccaccgctcatctgcccccctctctccctgttcct

SEQ ID NO: 31969 - DNA, 1088 bp, Homo sapiens
ccgagatggagtcttgctcttgtctctcaggctggagtgcaatggcacgatcttggctcactgcaacctctgcttcctgggttcaagcgattctcatgcctcagcctccccagtagctgggattacaagtgcccgccaccatgtccggaaaatttttgtatttttagtagagacggggtttcgccatgttggccaggctggtctcgaactcctgacctcgtgatccccccgcctcagcctcccaaagtgttgggattacaggcgtgagccaccgcacccagccaaagttgttatttttttaaataacagtgctgagcgctgggatgctacagtgtccagagattaggcagatgagtacattttttgctgggtacgtactatatgtaggtaccaagctgaaattctagtgagtgagacagactataaccaaagcaaataaatgggatacatgttgcaggtcatgtgatatatgcatggaaaaaataaagcagagaaagtgggtcaggagtgctagggtgggagtgggatggccatatctgatagggtgcatggggaagacctcccaaggggctactatttgagcaggacttgaagaaggtgagggagcgagcagcacagatagcagctgtcgtgaaggccctgagctggggacaacttggtgcgttccagcaacttcaagaaggtccatgtgcttggagtggagtgaggaaagggagactagtgggagatgaggtcagagaggaatgagagccagtgggtaggttccctgtaggccatggaaaagacaggcttttaccttgagagaagtggggaaccattgtagaggttgagcagagagacaatggttccacctgtgtttggaaaggaacactgactgctcgactgacaataaattgtaggggctggaatagaagcagggtgacatctgtcaggaggctcttgggataatccaggctagagatgtgatgtgggtcactgggaccatttggtagcagtggcagaggtgagaggaggagggatcctggatttggaaagccaggggcatttgctgatagatggatgtgaggtgggagagaaatgaggaatca

SEQ ID NO: 31970 - DNA, 1045 bp, Homo sapiens
tgcagagatccggggtctcgaaggtggagtcagctactcagtgcgagtgactgcacttgtcggggaccgcgagggcacacctgtctccattgttgtcactacgcgtaggcagagcatgcgctggagagcttcggatgggtggtgtggatggtttggggatccgggcttgtgctctggattggagaaaggaccaggattggtagtgagcctttgggggcagggtctgagaggagggagaggggtctgagaggctgggcggggtgcgtgtgccagggtgggcctgggattggtgcaggggccatgggggcagagcctccctgattcctgagctttctctccagcgcctgaggctccgccagccctggggacgcttcacgtggtgcagcgcggggagcactcgctgaggctgcgctgggagccggtgcccagagcgcagggcttccttctgcactggcaacctgagggtgagaggtgtccccaggaggaagttagggaccattgggggcagggctgtggcagactccgcaaggtaggcgaggacagtgatggtgggcggggtctgtcactgggggtctgcgggatccgtgacagtaggtaagatcaatcaatgaagtgggtgggatcaatgagttcatggagggtcagtctggcagggtccgtaaagtgggcagggtcagtgaggatgaggaagatcagtcaggagggtgaacccagttaacagagccagtgaagtgggcaggccctttaatgcccccaggtgtcactatcccacatgctcttggcccccaccctcacgcctgccccaggtggccaggaacagtcccgggtcctggggcccgagctcagcagctatcacctggacgggctggagccagcgacacagtaccgcgtgaggctgagtgtcctagggccagctggagaagggccctctgcagaggtgactgcgcgcactggtaagcctgcctcaccttggcgtgctcctcccctgctgatgacccaccctgacttcctgcaccccgactctgagtgactcctcctgtacccc

SEQ ID NO: 31971 - DNA, 1407 bp, Homo sapiens
aattaacgtgtgtgtgcacaccaagagatagcaccactgttctccacacacaggactaggattgggtcccacagaggccactagcatgtattcacaaacatacagtcatgggaatggcatgggaggagtgggttctatcacttgaacacaggtgtgggcttacctgaccatggctgtcaataaggaggggggaggtgtactggtaatgatccccacagcttgttggtaagctgttacaggagctttaggcaacacttgctctggccatgcccttcagtcctggccctggctatctctgttctgttggcgcatgatgccatggttttggtcacctcaaggcctgcttagtgcttggtaaacagactctgggatctgtgtccccagagtctatgctgagggaggtacctgtggaccagtggtcctgctgggtgtttagcctctgaggacagggttcttgggttcctgtgtagctcctgattgttctggttgatatctggttccagggaacaaagaatcggcctggcagtgccctggagaaggaggtggagagcatgggggcccatcttaatgcctacagcacccgggagcacacagcttactacatcaaggcgctgtccaaggatctgccgaaaggtaacacctggaggaagaggcggggacagagggcagggaagcagaggacagctacctaggagcccctggctgaccacagaatcatattacccttagcgtatggctttgcagctgggcaactaggggtgggcagcaggagatgccaggcctggggattttgtgctgtcgttggtctgcagtggtccacctggcacctaaacatgtcctccttgcatctagctgtggagctcctgggtgacattgtgcagaactgtagtctggaagactcacagattgagaaggaacgtgatgtgatcctgcgggagatgcaggagaatgatgcatctatgcgagatgtggtctttaactacctgcatgccacagcattccagggcacacctctagcccaggctgtggaggggcccagtgagaatgtcaggtgagagttggctggccttgtggggggatgcttgctccattctggcctggccagaccctttccaggtcacatttttagttggctagctgtcggggttattttcctgagttatgcaactggagacagtttctgtatccatgtggtccagtgagtcttttttaatggctttgtgggcttcacttgaattttgggctttgttttaaggtatgttttggtgcatgtcctgacagtccaagggcgaagtgtctgggtgtcccctccatgtggtctcttgtctcctttgtggatggctccgggagctttgatgctgcccttttgagagtcccacagtgttggctcacgccttctcagagaag

SEQ ID NO: 31972 - DNA, 1035 bp, Homo sapiens
cactgtccccaccccaggcggtcctggcagccatcatcattgtgaacctgaagggcatgctgaggcagctcagcgacatgcgctccctctggaaggccaatcgggcggatctggtgagtgcactgggagcccagggcagggactgggcagccccatggctcctcgccgccctccaaccgctgccctctgttctcagcttatctggctggtgaccttcacggccaccatcttgctgaacctggaccttggcttggtggttgcggtcatcttctccctgctgctcgtggtggtccggacacagatgtgagtccgccatgttggtcccctcattccagctagtgagagagtaccacagggctccccgcagctttccccacatctctggggacttcaggctccttcggacccctctgttatcccctttttctgccccctcttcgtgcattctctctctccttcacaggccccactactctgtcctggggcaggtgccagacacggatatttacagagatgtggcagagtactcagaggtgagtgtcaggggctgagtgagatggtgtggatggggagacggaggaagaatgagcctttgtggattcgttccacacttggccagggaactgggggctgaggatactttggctttggtctttgggatttcaagggaggagtttaggtctatgaccccctctagaggtatgaagggacagagggagagtggacagagatgggtctggggctggggaggggtctgtcgtggagtcaacagcacaagctccacctgcagagcagccgtgggtcagagagccggaatggcagctccctggggcgccaggttggaagggaggcatttcctgatctgatcagtggggttactaagtcctcagtcatccatttatctcctgagaggtcttgggccaagtgctaggaacataggtggggggctctggaataaaacaaggctgttgcctgcaacatgggcacagtgcaattaggcagtgcggggaggaattaaggggtctgagacatggg

SEQ ID NO: 31973 - DNA, 1034 bp, Homo sapiens
ctgcacctcccaggttcacgccattctgctacctcagcctcccgagtagctgggactacgggcgcccgccatcaggcccggctaatttttttttgtatttttagtagagacagggtttcaccgtgttagccaggatggtctcgatctcctgacctcatgatccgcccgcctcagcctcccaaagtgctgggattacaggtgtgagccactgcacctggccaagctaatttttttgtatttttagtagagatgaggtttcaccatgttggccggactgatctctaactcctgacctcaaatgatccacccaccttggccctccaaagtgctgagatttcaggcatgagccaccaatgccaggcctatgtctttatttccctcaataatgttttatagtttttttgtatgtgtgtatgtagtctttgcacatctttcattaggtttattcctcagcatttgatattacttgatgctattgtaaacatcattgtttttaagaaaaaaaatttttttttctcgttcactgcaacctctgcctcccaggttcaagtgattctcctgcctcagcctcctcagtagctgggactacaggtgcccaccaccacgcccggctaatttctgtatttttagtagagacgggatttcaccatgttggccaaactggtctcaaactcctgacctcaggtgatctgcccgccttggccacccaaagtgctgggattacaggcttgagccaacatgcccaggcaagaaatttattttctaactgttggtgacatatagaaattgcaactgatttttatatattgatcttgtgtccaacaactttgctgaactcattctaacaacttacctataggttcctttgaaatttttacatatacaatcctactgcttgtgaattagttttttttcccttccaatcttcataacttattatttttcttgccctactgcactggataggccctccgatataatactgaggcttgtggtcatgaatataaaatgagaccaattagcacggttgtttg

SEQ ID NO: 31974 - DNA, 1091 bp, Homo sapiens
gttcctattttcccagttgccagcttttggagtcaggggaacctggttgtactggaggctaggtggtaccactgcctagaagagggcagtgaaggctctccacatacagggctggggagcaggggctgatcttggatcttaggttctttttgctgtagaaaatagtggttgactggtcccttaattttattttctaaaatcaactttcttgaggtatacatgtggtaaaatgcacccatttggagtgttcagagagttttggcagatgtttacacggtaagccaccaccacatcaagaagtcacttttcattactgtagaaagtttctggccgggtgcggtggctcatgcctgtaatcccagcacttcaggacgccagggcgggcggatcacctgaggtcaggagttcgagaccagcctgaccaatatgatgaaaccctgtctctcctaaaaatacaaaaattagcccggtgtggtggcatgcgcctgtagtcccagctgagacaggagaatctctagaaccgggaggcgtaggttgcagtgagctgagatcgcaccattgcacctgggcaataagagcgaaactccatctcaaaaaaagaaaaaaaagaaagtttctggattttatttatttatttatttatttatttatttattttttgagtctttcttgttctgttgcccaggctctggagtgcagtggcacgatcttctaggctcactgcaacctctgcctcccaggttcaagtgattctcctgcctcagcctcccgagcacaccaccacgcctggctaatttttgtatttttagtagagacagggtttcaccctgttggccaggctggtctccaactcctgatctcaagtgatctgcccatctcggcctcccaaagtgctgggattacaggcatgagccaccatgcccggccttctgaattctgataagacatactgatttattggtccttatctctttatagccataagttagaagaagaatttgagtggctaaagaaatctgaagtcttgtactacactgtagagaagaaggggaatataagttcccagcttaaacactataacccttggagca

SEQ ID NO: 31975 - DNA, 1051 bp, Homo sapiens
cttagttaaacacctaggagtgggattgctatgtatataataagtatatgtttaactttataagaaactgccagactgttttccaaagtggctttgcattgctaccagcaatgtatgaggcattgcataattaaccctggcttgtatatgaatgtgtaccaggcagatgctgggtggtggctctggaacacacaggaggtatgggtggtaagggttgtttttccaccatcagtatagtgtgccttatgccacccctctgtgactgcctgaccctggggcttttcttaagccagagtaagtagccccagtggatcccattttgtagcctctttaactaaattctggatgagtgaactaaggacccaggggctttcatgagtcatagccattttatttgcattactttaaaagttaagaatattaaggcattgtttccaacagatccttaaaccaatttgatagatttgggggagggactgagtgggaaaactgtatgctgtgctaggatggatgttctgtgtttcttacctgttcatagtttcatggacaaatgtgaggcaatgtggaaagctaaaatagatgctaaatctgaagccagtattttgcagttatttcctgtctttctaggtactgggcccacacattgcatgggctttatcgtaaccattaattttccagccttccagggaaacagctttagaccttagagatcacactgctcaaaaagagagagagagaaacaggtgacatggagattggtgctttggggcttttctttcttctggtgtagttgaggctcctagggaggaagctgatttgctttgtaatctttggaaaattgatccttcatttccttgcagagataggggctgtgagggaccctagaacagaagtgccacttctttgcaactccaaatgtgagaagtatgttttacagtaaaaccatacttatgttcatattgagagattgaacataattaaaacaaaaggatcaaaaagcaagacttactatgtgcaatgcattgatattttgtttattattattttatag

SEQ ID NO: 31976 - DNA, 1049 bp, Homo sapiens
aaaaatatataaaaattagccgggcgtggtggcgcatgcctgtaatcccagctacttggaagtctgaggcaggagaatcccttgaacctgggaggcagaggttgtggtgagccgagatcaggccattgcactccagcctgggcaacaagagcgaaactccatctcaaaagataaaataaaaccagaatgagatgctattgagggctctgaccttctagcaccttgtatacatcttaaggacagtgcgtgttgtggtgttgtggttgttattctcacttggagtgaagctctgagtacgaagggtgggccggatcagtgtttgtttctaggtggatttaaaaccatcaagagccaggcagccatctgtgttttcctgtttcaatcttgaatcctcctcttcccccagtattttctctctcagttataaaggtaatgtgtgctcagagttggaggatattataagtttgaaacattcagaaaactgaaaagcgggcaatcatgatcttaccacctagtatagggcaggttttgtggtgtctgaagcttatataaaataatataaatatatgtaacataaatacataatttgtaattatacatgtaattataaatgccatctttaaacaaaataatgtacaattatgataacaaaattaggtaagaaagtgaatgtttgtttagattgaaaaaaatcacaaaaagttacacatttaaaaatgcagaagaaagttctatagtacttacctccctacattttggggcagcattttgaccaccgctttctttcttttttatttttttggggacagggtctcattttgtcacccaggttcactgcagcctcagcctcccaggttcaagctattctcctgcttcagccccccaagtagctgggactatgggcccgtgccactacgcccagctagtttttgtatttttagtggagatggggttttgccatgttgctcaggctggtcttgaactcttgagcttaagtgatctgcctcccaaagtgctacttttacaagcctgagccaccgcacctggcc

SEQ ID NO: 31977 - DNA, 1063 bp, Homo sapiens
ttgagcagtttaatgagtgaattcagcagcaaagtcgcaagaaatggttctccagccaggagaggttatgtttatcctctgattgcccgttttctctgcacacagtgatatcgtattcagtgagaggtgctgttggcacccagcagcaccctgggcacacagcatttcatgtcatgtcacagtgtacaagctaccctctaattcagaaagaagagcattttgcacagagaaaaataaaaagatccatgaatgtcatcttttatcttttattttcagttggctgatgttggaatttttgttcttgtcatgaacttgtaaaccaatcttgccaagatacaagttgttttggtttttcactacaatgacctcttgttcctcctgtcttgactgctgacgttcctcaatgattctattgtctattttatgggaagcagccttcccataggtttccttttacacactgcagggctatctttatactttaaaaaaaaaaaaaaaaaaaaaaaaaaggacaagaactgtcactaacctcatggaggggtttgcgtaaaaccatttagcccaccttgagcaaagggtagattccgtgttgtttttttaagctcactgtaataaaataaatctaattcagcattattgtgctacctcaaaggtaaaaaatgttttaaggtcttcttttggtcctgagttctatatacagtgtttgaaatgtccttcatttggaattattttttaaattcttggagtgaattttattttaatctgttttaatcttgtattttaatctcagaagaataagtgattgaaacgtgatcaattcttgctctgtggtgttaaacatataatgaacagtcattaagaattaagtcactgtttgccataaacaaggttgatgttctttttgttgttgttaaggaaaccctagggctcggctttactcttgattaataaaggctgacaaatcatgtctgactttctggtgcagtcttatgttacgtgtttgccattttgcttcagggctccaggccgtcatagcactcctttggcagattcattcttctgg

SEQ ID NO: 31978 - DNA, 1079 bp, Homo sapiens
ttcattctctccctcacctctttttaacaatgcagttatggatgtacaagcattcgagaggcttctggggccctgcatggacatcatgaagaggaacatctcacactatgaggaacagctggtgaagatgtttggctccagcgtggatctgggcaacctcgggcagtaggtgtgccacaccccagagccttcttagtgtgacaccaaaaccttctggtcagccacagaacacatacagaaaacagacatgacagaactgttcctgccgttgccgccactgctgccattgctgtggttatgggcatttagaaaacttgaaagtcagcactaaaggatgggcagaggttcaacccacacctccactttgcttctgaaggcccattcattagaccacttgtaaagattactccaacccagtttttatatctttggttcaaaacggcatgtctctccaacaatttaagtgcctgatacaaagtccaaagtataaacatgctcctttcctctcttgctgctactcttgcttttggaagttaccacagggtctgcagaaacctgttgtataactgtagacactctctaatggttctcaaaggaggaaatgtagccttcagtctcctcatttgtcctttgaggaagtccacatttgttcacagttgcagcctttggttttacagtgggaaatggtggtggatgatatggacatatgtagcccagtggcattgtactttctgctgacagctgcacacattacagctgtctccaaacccacagtgatgcttagggaaagaccctgctcaggacccagcaggtcagcaccccagagcagactgataggtccgtgggacccatgttagagcagaaaatttgggctcagcacattttactgttagtagagagccaggaaacgttttctgggttggggattttgtgggattttttaatttttttagtaggttttgtttaacctctgtgcagtttgtatgaatgaattgctatacatttataaggagccagggtctggagggttgctatcactttgtccagcccaaataccttcctgggcaactcctaccatt

SEQ ID NO: 31979 - DNA, 1011 bp, Homo sapiens
tgaacctgggaggcagagcttgaagtgagcggatattgcgccactgcactccagcctgggcgacagagcgagactccatctcaaaaaaaaaaaaaaaaaaaaaaaaaaaaaaaaaaggaggagggaaccactaacttaaggtacaaatagtacttaaaaagaaatttgttggccaggagcagtgaatcactcctgtaatccgagcactttgggaggccaagatgggaggattgcttgaggccaacagttgaaggctgcatgagctgtgatcattcctctgaactccagccttggtgacagagtgagaccctgtctcttaaaaaaaaatgtggggggcatgggggattttgtcactgtaaaatgttgttcaaggcgcagtctcaaatcagagaaatagcccaagtttgtggctcattacctaagagaagcattgtccttatttagacaagattgggcatgttcagaatggtatggctgtagattaccttgaaaatgttaggactccgagctctaggtaaaaagcagacttttctgatcaaaccagaccactgagattagtccatggagtttacatggtacagttagtgaattttctgcaaagtgaattcctcagtaattgtgtagagtatgctgagaacagtgtatgtgtgtgcaactggacatgcccagctgtgatcctggagtcagcctaggtcatgttctttgcctgctgtagactaaatcaaacaaggatggtgggaaccaggaggtcgagattgcccgctgccataaggggcagtactttggagagcttgccctggtcaccaacaaacccagagctgcctcagcttatgcagttggagatgtcaaatgcttaggtaagaaaagttctttatgcattaatattctttttctaacatgtaatatttttttcccatcagcaagccttgacatattctgccatcttttactgctgtctaggcctaggcagtttatgtgaccaaccagagatggatgaatggatgctttcag

SEQ ID NO: 31980 - DNA, 1051 bp, Homo sapiens
aaaaaaaaggaaagaaaatagggaaattatataataaaaagagattggaagggatgaacatgaagaaagcttccttgttagagcactgttagaagaggtctctaggataactgtggtcatttaatggatggtgtgacctagaaaactgaggagctgtaagtaggaggaatgactgttactggtaaatctgtcatcaccagatttttcggtttcttttttttcttttttgagaatacagagtgtgttaaaacagttatatataatactaagtcgagttaatatgaaaactttagcaaaatatattgagtaaaagttaataagtagccgggcacggtggctcacacctgtaatcccagcactttaggaggctgaggcgggcagatcacgaggtcaggagattgagaccatcctggctaacacagtgaaaccctgtctctaataaaaatacaaaaaattagccaggcatggtggcgggcgcctgtagtcccagctactcgggaggctaaggcaggagaatggcgtgaacccgggaggcagagcttgcgtgagctgagatcacaccactgtactccagcctgggcaacagagcaagactctgtctcaaaaaaaaaaaaaaaaaaagttaataagtatggaaaaagaagaatattactgtctgtaagatagctggatttgttttctctctctctctttttttttttttgagtgagtcttgctctgttgcccaggctggaatgcagtggtgcaatctcaactcactgcaacctccaaccccctagtttcaatcgattctcgtgcctcaccctactgagtagctgaaggtagcttgattcttttttattttaagctagagtgtcgctcttgttgcccaggctggagtgcagtggcgtgatctcagcttactgcaacctccgtccctgggttcaagcgattctcctgcctcagcctcgcaagtagctgggactataggctcccaccaccaagcccagctaattttttgtacttttagtagggacagggtttccccatgttggccaggctggtctggaac

SEQ ID NO: 31981 - DNA, 1022 bp, Homo sapiens
ttgttaggaatgcaagttctggagccccccaccagacctgctgaatcagaaactacattttatgttgtttcatttgttttgatcagctttgttacagtgtattttacatacaataaaattactaagtttaagtgtacaaatcggaagagttttgtaaccatccccaagtggtatttccatcacccatacagttccttgttttgtatttgcagtcagtaccctcccccacactcacattcctggaaaccattgatgttttctgtcactgtagaaattcctttctacaatttagtataaatgaaatcatgtaatgtatagtctctgtgtctggcttctttctcttagcataatatttttgagatttattcgtgttgtatgtatcagtagatcgttcctttttattgctaataatatttcattgtacaaatgtaatttttttttctttttgagacggagttttcctcttgttgcccaggctggagtgcaatggcgcaatctcagctcaccataacctccacctcccaggttcaagctattctcttgcctcagcctcccattactttttctttttaatgagatacagtcttgccctgttgcccaagctggagtacagtggcataatctcagctcactgcaacctctgcctcccaggttcaagcgattcttgtgcctcagcctcccgagtagctgggaccagaggcacgtgtcactctgcccagctaattttgtgcatgtgtgtgtttttttagtagaaatgggatttcaccatgttggccaggctggcctccttagtaaatacttaagagtgcaattgctaaattatattttaacttcataacaaactgtttcttaaaatggctgtactgtcttgtattcctaccagccatgtatgaaaattccagtttctctgcattctcaccaataaatagtatttacagccttttttaaaaaaattacagtcagggtcttgctatattgcccagcctggtctcgaactcctgagctcaagccatctgcccgcc

SEQ ID NO: 31982 - DNA, 1042 bp, Homo sapiens
tccatccctactccttaagagtccttagtgtgatgcagtagacatgtggatcgtgtctgtgaatagccactgcactccagcctgagcaacctagcaagactgtttcttagaaaaagaaaatcaggccgggtgtggtggcctcatgcctctaatcccaaggaggccaaggcgggcagactcctaaggttgggagtttgagaccagcctgaccaacatggagaaacccaaattagttgggtgtggcagtgtatgcctgtaatcccagctacttgggaggctgaggcaggaggcatcgcttgaacctgggaggcagaggttacggtgagccgagattgcgccattgcactccagcctgggcaacaagagtgaaactctgtctccaaaaaaaaaaaaaaaaaaaaaagaaaagaaaatcagtataaattcaagaacttaaccatatttgatatgtttgagttcattgccttttttttctttttcttttttgagacggaatttcactctgtcgcccaggctgtagtgcagtggtacgatctcggctcactgcaacctccgcctcccgggttcaagtgattctcctacctcagcctcctgagtacctgggattacaggtgtgtgccatgatgcctgactaatttttgtgtttttagtagagacagggtttcacatgttggccaggctggtctcaaactcctgacctcaagtgatcctcccgcctcgccctcccaaagtgttaggattacatgggcgtgagccatcatgcttgtcctcatagccattcttattcaacttttattttaggttcaggaggtacatgtgcagggttctttctttctttctttctttctttctttctttctttctttctttctttctttctttctttcttatgattttggaatgtacaggtttgttacatgtgtaaatttcatgtcacctgaggtttgggatatgaatgatcttatcacccaagtaatgaacatggtacctggataggtagttttttcaacctttacccttctccccttttttttttggagac

SEQ ID NO: 31983 - DNA, 1049 bp, Homo sapiens
ccctctagactccgtttcacaacctactcccgggtcttcctcctgggactggggatgggcgggttctgatgtggccccagggcgagtgacctgggggcaggagctcccccgccccccgccaacggctggacagcgggcaacggaatcccaaaagcagctgttgtctccagagcattccagctgcgcttggatttcgtcccctgctctcctgcctgagcagcgccctggcccagatggggtgcccctgacccccagacatactttactgagctgcttgggtctcagttcctctcagttgcgccctcaggctggaggtgatgggtgtagacgtgggagagccgaggctggtggccatctctggaaccctggggaggattggcgagggagggtggacccaggacctctgggtagggctgcaatggtagtgactcccccagggctgcctcagcccgcatctcgctaaagatagccctcttacttcctggggaaaaaccaccccaaccgtcttcgtggatgagagtatctgaagtcctcagtttgactgagggttcccaaccctgctaagcagttgtctccaggtcatgcaccttcagaatggaaagcgctttggaatgacacgatcactcccgttgagtgggcacccgagaagccatcgggaatgtcgtgtccgcccagtgctctttcggcgcctcccagcagggcctcagccctggcccagaaaggggccttgccaagcttttcctgcccctgggtttccctgctctccggatttcccaactctctctactgagttagcttctctattaaaaggaatgggggtggggtggggggtgagtaagttacagtgaaatgaagacatttgggaacctttgtgggagaaagaaaaagacctttcctattggtagaggagcaagatactccaactgaggcctattttctattatggtcgcattatttggttggcccgtaaatggctgttgcctaaaacaggaagctttaaggatcgttgttaaagcacaccaggttaaaggagtcacattaaaagctgg

SEQ ID NO: 31984 - DNA, 1100 bp, Homo sapiens
tgatttttgccacactttagggagagtcccctgatgaaatttatactcctgtgtggtccttatgcttcacacatcccatattgtacctttgagagaccacctgccatcctcttgttgtgacagtactctattcctcctaggctatgtcttgcccagccacgtgactgaggagatgctatgggagtgcaagcagcttggggctcactccccctccaccttgctgaccaccctcatgttctttaataccaagtaagtgttctagaggctccactgctggcatctgtccagtgaagagtgtggaagctatccaagaggccttctgaattcctctgacatatatttgagaaactgggctactgaaagccctaaccccacttggctgcattttatttggtaaccagtgaggcaaacacccttgccagacccctaccatccatcttgatgtggttcctgcactggacactgcttgggtacgggcctgcccagatcttgggaatgtgggcagtggctcctctgaagcaccagtgggcagaggatgagtcatggtatcctcccggcacccctccctctgccttgcattttacttgtgatccaggtacttcctattgaagacagtggaccagcacatgaagctggccttctccaaggtcttgcgacagacaaagaagaacccctctaatcccaaggataaaagcacgagtatccggtacttgaaggcccttggaatacaccagactggccagaaaggtagggaaaggaggcagggatggcaaaaacaggtgctacttgtcctgccctgtcctgcccttgtgcctgtgaggctagtgataagtgtaaaggttgggatttgctggataaaattctccactcccttctccccagccaaaaattccaaactttcctcctagaagcagagaagccccagacagaatagctgcctcttcccttagtagtcactgcccatgcctcataccttccctcccccgaccctgtatttcctagttgggctggctgaaagcctaagtttcctgatctgggcctgaggtaaggcagtctgatgccaggtctgtggtggtggggatgtgtgttttatagttaca

SEQ ID NO: 31985 - DNA, 1045 bp, Homo sapiens
tcctaccttggcttcccaatgtgctgagattatagacatgagtaaccacacccagccaagtttattacaaattgtagagaagagaataaaattagggaagtgacatcagagggagcaagtgacagagcgaacccagagaagtggaacatgccaaagtatggcaataattgttcccaggagaaaaattatttttttaagaaaaggaaggccaggcatggtggctcccgcctgtaatcccagaactttggtaggccgaggtaggagaattgcttcagcccaagatttgaagaccagcctgggcaacatagcaagacctcatctccactaaaaatcaaaaaaaataatcgagtgtgatggtgcacacctgtgatcccagctactagggaggctgaggtgagaggattccttgaatccttctttgctgagaagggctgttttctgctcatcctggatcttgggggcttcagatatgtctaagagcagaaaagcttttcccattgccactgggtcacaaaatagccgaaaagtagacaaaaaatagagtcagaactgccttaaagagatggaaatgcactattagagagccagctttgttttggcaagagcatagaacacagaagaggagtgtatcgggcagaatgttcttttttctgcttccaggaagtgtcacacactgtgcttgcttggagaatcccgaaaccctgcaggagaatactgttgcctgctcctatctcattatgcacccagtgcacaaacatgtgcatactgactgacttcagcacatgaaggggcttggtagtcattcaaatgtcatctttctttggtgcagacctggctgaccagggctcttattcaaattattgacctttgcctgtacctagctctgggctcacttatgaaccagggtcttacagtaacaccagccctgtgggggggatcttgtaatagttcaaatactggcatattggctaggcgtggtggttcacgcctgtatttctaactgctcaggaaactggcaggaggagtctttgagtccaagagctca

SEQ ID NO: 31986 - DNA, 1027 bp, Homo sapiens
taaggcagaataattatgacatatacacaaagacaaactgggaatttagaaattctaggttaagaagtcaacagaggtctttgtggacaaaatgacgtttgaactgtagtttatttatttttgagacaggttgttgctttgtttcccaggtaggagtatggtagtgatcataattcactgtagcctctaactcctgggctcataaaatcctcccgcctcagcctcccaagtagctgggactataggcacagactaccacactcggcatatatatatatttgtagagacagggtctcactgtgttgcccaggctgctcttgaactcctggcctcaagtgatcctcccaccttggcctcccagaatgttgggattacaggcatgagccactgcaccctgccttgaactgttgaactgtagtttatagtttagataaacaaaagaatggaacagcataaatacagagccaaggatggacagaagggacatgccctaatgcaacttgagaagggaactgtgagaatggagttagtattgaggggtgggggtggggttgttgccttcccaaagtagaactgagtttgatctaatctgtggtaggaaatcaggaatttcctagatttgtggtaacaggaggaatcaagtagatgtgtgtagaattgactgcatataggagaaactagccagtagatttgtaacaggtctctatgctcagcttttgttcacagagatggagcccattaggcctcccctagctctcctgggcctgatggtccaattgcaggtcagtgcctcatttggtacttagtggtctctgtttataatttccatgtctgggtcttcagcaggagaagatcctttctggagttcattttagtgggccagtgttcttcagaggctgtatctgatttgggaaagtcttagagtgatttacatgaagttattattaccagaaatagaaaaattgtgaagaatcccgattttccatcccaagggaaagatgccaagggaaagatgagtttgtctata

SEQ ID NO: 31987 - DNA, 1080 bp, Homo sapiens
acagacaaaagcctggtgcagtggctcaggcatgtaatcccagcactttgggaggtcgaggggggccgtggaaatgaactcctcacctgaggtcaggagttcgagaacagcctggccaatatggtgaaaccccgattctactaaaaatacaaaaaaattagctgggctgggtggcgtgcgcctgtagttcaagctactagggaggcttgaggcaggagaaccacttgaacctgggaaacggaggttgcattgagccgagatgatgccattgcactccatcctgggtgagaaaacgagacttcgtctcaaaaaaataaaaatacaaagaaacaaaacccaggcaaaagaatagaaatacgtcaattctggtcgggcacggtggctcacgcctgtaatcccaccactttgggaggccgaggcgggcagatcatgaggtcaggagatcgagagcatcctggctagcacggtgaaactttctctctactaaaaaatacaaaaaaattagctggatgtggtggcgggcgcctgtggtcccagctacttgggaggctgaggcaggagactggcgtgaacccgggagacagagcttgcagtgagccgagattgtgccactgcattccagcctgggtgacagagtgagactctgtctcaaaaaaaaaaaaataaatgaaataaaatgaatatattcacatggaaaaaaaatcaatttccattttaaggagtcatgtctgtcttataaacatatggagttatttcaaagaagcatagaagacattgttctttttttttttttttttttttgagatgaacctccgcctcctgagttcaagcaattcttctgcctcagcctcccgagtagctgggactacaggcgcatggtaccccgcctggctaatttttgtatttttagtagagatggggtttcaccatgttggccaggctggtcttgaactcctgacctcgtgatatgcccgactcggccttccagcgtgctaggattacaggcatgagccactgcacctggcctatttttttatttttattttttttaaatttatttttcttattattttttgagat

SEQ ID NO: 31988 - DNA, 1023 bp, Homo sapiens
atttttagtagagacggggttttgccatgttggccaggctggtcttgaactcctgacctcagattatctgcctgtctcagcctcccaaagtgctgagattacaggcgtgagccactgcaccagcccaccctgtctttcttactccttaaagtagggggcaaacatggtggttgttataatccatataaaactataccctggacccccacggtggttgttatggtccatataatactatagcctagagccccattcagtcccttacccaaagtcacaaagttattgaggacccgggcctcctgacccttagtccctcggcttctttggcttaagaaggatgttagggggaggtgtctgtggtgaaacctgcccaggcctccctggccttgttctgggttggtggtcatccttttccctctgccctccagcttgtctttaaccgaactgtcacactgaaggaagacccaggaaaggtgtgagctggaagcactgaacctacctcatcctcctggagggtgtggctaccctcgccaccccaaattccatgtcaataaagaacagctaaattctcctagagtctgtgtgttatctctgcacttctagcatctgaaggccctgaagacatgctggtggtggtggtatgattgggggatggagatgtgccttttgcacattttgtctgtgagaatggactttcccagaacagagtggtactgacagctttgaaagcaccggtgcactttttggtgcttaaaggcaggggcctgggtaggattcataccctccgcacctggtctgagagaatggagggccctggggtgtttgtccatggttaggacccctgtgccagagggatctaaaaggtttgtttctgctggtgtggagaggcctagctcccagtctgatcattcagcatataattttttttttttttttttgatacggagttccactctagcccaggctggagtgcagtggctcaatcttggctcactgcaacctctgcctcccgggttcaagcga

SEQ ID NO: 31989 - DNA, 1022 bp, Homo sapiens
aggagttcaggaccagcctgggcaacatagtgagaccctgtctttaccaaaaatataaaaattagctggctcttatggtatgcacttgtagtcccaaatatttcagaggctgagatgggaggatcgtttgagcccaggaggttgctggaccctacctctgtccattccacgactgggccttgctggctgctgcctggtttttccacttggtcatctttgtcttgacttttcctggaagcagtgccaggggcttatgcaggcaagctaacctccagactgggcccatacaatttaacatttctgctttgtgcaagtcgtagacatctagggcactagctggatatcgactggtatgctaccacttgtggcattcttggtgacactggtggggctactgcctcattctatgacttgtagccatggcgtccacagtgtaccatgaagtaaccagggaagggagtgcagatcttgatctcattgagggagccatcactagacctgtaggacttggtgatggtgctacagtgaatctattggcagcatcaggtactgaggaaatagtggcagtggcaggcactctgcatggctttgctcaccatgggcacctttatggtgggctgggtacttgcagcttcaaatttggtgcacggctggtgtggctatggctctgcttcttggtacctgtccttagcaccactggtctgcatcccctgcttaattcctgcacctggcctttctcatgcagtacactgcagggctaggcatctggctggggccacggggccatggagatgtgggaagccccaggacagcattggacctggatagcgatacagcatgtggccctggtctgcacctggcatgtgatcattaggtggtatccagatgtaggcccagacttggaggttggtcattaataatgggatgtgggcacaaaagacacagaatatagataaagactagtcaggatcctgcctattccttgaaggtccagaagtatgagcatcaccaattcctgcaag

SEQ ID NO: 31990 - DNA, 1060 bp, Homo sapiens
ggaggctgcccttgagcctgagcagaagcagctacaatggccgtcaggggccacatttctcaaaaggttggcagaacctgaattaccagaccctttttaaatcccagttgtgtccctttttaagctgtgagaccagttttttgaattccattgctttgaaatgtttcctattactgatttttttttttaactttccttgacatcttgaatgtgtttttttgattgatgttcaatatacccagtacccatggtaggtgtgggtcatgggcctctgctgtgtctcttagtgttcttttccacgggcccctaaaaaagtacaggagtggccaggcacagtggctcacgtctgtaatcccagcactttgggaggccaaggcgagtggatcacttgaggttaggagtttgagaccagcctggccaacatggcgaaaccccatctccactaaaaatacaaaaattagccaggagtggtggtgtgcacctgtagtcccagctactttggaggctgaggtaggagaattgcttgaacctggaggcggaggttgcaatgagccgagatggcaccgctcccctccatcctgagtgacagagcaagactctgtctcaaaaaaataataatttagctggtcatggtggttcgtgcctgtagttccagctacttgggtagggactgaggcgaaaggatcacttgaggccaggaggcagagattgcagtgagctgagatcacgccactgcactccagcatgagtgacagagtgagaccctgtctcaaaaaaaaaaagaaaaaaaaagggaagaaaggaaactgaatctcagggaagtgcccacctcctgagctaataagaggaaggaatatgggggtgaggcagagctggcaaaaggctgttttttgttttgattgtttttaaagaccaagtgaagtatagtataagaagtggggaaggagtggaacaaggagttagatctgtaactgtgagtagtcaattgagataactcaatacctttggacctgattgtttttaaagactgagggtagtataagaagaggggaaggagtag

SEQ ID NO: 31991 - DNA, 1662 bp, Homo sapiens
gatgtatcacttggtgcaaatttcttgattttatacactcaggggttttgtttttttgtttttttaatagacggagtcttgatctgtagcccaggctggagtccagtggcatgatctcggttcactgtaacctctgcctcctgggttcaagcaattctgtgcctcagcctcctgagtagctgggattacaggtgcatgccacccatgcacagccaatttttgtatttttagtagagacggggtttcaccatgttggccaggctggtctcgaacttctagcctcaagtgatccgcctgcctcggcctcccaaaatgctgggattacaggcataagccacggcgcccggccaaaaaaaatcaataataggccaggtgcggtggctggccaacatgctgaaaccccatctcttaaaaaatagaagaaaattagcccggtgcagtggcacatgcctgtaatcgtagctactggggaggctgaggcatgagaatggtggtggggattgcagtgagcctagatcgtgccactgcactccagcttgggcgatacagtgagactctgtctcaggagaaaaaaaaaaaaaaggtacaataataatcaaggtttaagaaagcaactagtatctataatattccagagataaattctgggtaattccaacataggtgaggaattagtatagagcagagagagatgagaatgtccagaactactattcttgaggatgagaaaggtgaacaattgtaagtttatgtaatttatggggaaaaataaaaatagagatcctaataagttaatggaacaactaacagaaacggaaaattgaatgtataactttgaaacatactacgtcagttaggaaaggcttgctggcaggtaagaaaaatctgcaaattagcgtattaagcaagatggaggcttacatctttctgaaaagaatttctgacgtaggcagtcaatccattgctgacgtagcagctccatggcaatattaaacccagctgacctaccccttcctttttaggacatttctcagatatcatacatcaaacctcctttgtatctcattggctaatcatatgacaatacctggctttcaggaaggctgggatgtactgtatagcaggactgcatcatgtccagctaaaaactggggttctcaaactaaggaaggaggggaaaatagctagcaggaggcgactagcaaactgccacacctgcaaaaggaaaattaatggaaggcaaaaatgaaggggggaaaaaataagaagtatggtaattagaaagcatgttagaacatgtggaaaaagggggaaaaaaaagaaacctgaaataaggaggctgaattaaattcagtgaagtctaataacagcattagaatcactgtagatgagttaaatttaccaaactaaagacaaactctcagatcagactttaaaagacaaaccacaccagggatacagtggtatgtgcctatagtcctagctactcagaaggctgagggaggaagcttgcttgagcccaggagttcgaagttaccgtgagccacgattgcatcattgcactccagcctggacgacagagtgagatgctgtctctttttctttttcttttttgtttgagatggagtttcactcttgttgcccaggttggagtgtaatggc

SEQ ID NO: 31992 - DNA, 1069 bp, Homo sapiens
tgcagtcagctgagatcatgccattgccctccagcctgggcgaccgacgagcaaaactgtctcaaaaaaagaaaaaaaaatcttttagatgaatttgaatactttttacttactatatgtatgccacactattagctaaaaggactatttttttttctttgctaggagccggtgaaacctgaagaaggcagagatatggcaaacaggattggcgcttttgggtacatggagtgttcagcaaagaccaaagatggagtgagagaggtttttgaaatggctacgagagctgctctgcaagctagacgtgggaagaaaaaatctgggtgccttgtcttgtgaaaccttgctgcaagcacagcccttatgcggttaattttgaagtgctgtttattaatcttagtgtatgattactggcctttttcatttatctataatttacctaagattacaaatcagaagtcatcttgctaccagtatttagaagccaactatgattattaacgatgtccaacccgtctggcccaccagggtccttttgacactgctctaacagccctcctctgcactcccacctgacacaccaggcgctaattcaaggaatttcttaacttcttgcttctttctagaaagagaaacagttggtaacttttgtgaattaggctgtaactactttataactaacatgtcctgcctattatctgtcagctgcaaggtactctggtgagtcaccacttcagggctttactccgtaacagattttgttggcatagctctggggtgggcagttttttgaaaatgggctcaaccagaaaagcccaagttcatgcagctgtggcagagttacagttctgtggtttcatgttagttaccttatagttactgtgtaattagtgccacttaatgtatgttaccaaaaataaatatatctaccccagactagatgtagtattttttgtataattggatttcctaatactgtcatcctcaaagaaagtgtattggttttttaaaaaagaaagtgtatttggaaataaagtcagatggaaaattcattttttaaattcccgtt

SEQ ID NO: 31993 - DNA, 1050 bp, Homo sapiens
aagaacatgtggaccctgggtcagctgctgccctagaatggggaccccttctgtaagctatgtcagaatcatctaccagcagtgacagatgtcctgtaaagtgcctgcctttgtggggcaggaagtgccccccgtgaaactaccttgtgttgtggatcttttgctcctccagagcccttactcgggccccacctacagagatgctcagcaccactcttggctggactgagaaaaagctgttggttctctgtttaaaggaaagggattatatttcctttttatggttttgaaactagtgagtttcattaaatgtctagcatttttctgaagccacaaagaaagtgtctctgcaatttcactgaggttcttggaaagtcttcaagatagaattgtatgtatccccaaattctctacatttttctttcagaaaacatcccagaaaagtggaccccagaagtcaagcatttctgtcccaacgtgcccatcatcctggttgggaataagaaggatcttcggaatgatgagcacacaaggcgggagctagccaagatgaagcaggcatgatctggggcaggactgtcttgtagtattcttgaactagggccccaagtttggaggtttggggagcccagcaggaaccttcacaggccaggttgttttagaggctcagaagcccctctgtggccctctgaccctcattaattgggatcttcacagaagatccctaagatagttcaccagtcctgtgagatggaatgtttttttatgaggtagtgctatgcccataaggactgctggcctgagaatgaaccatttcattagtagctagtaatcagtggctctagatgtaggaactttcttttttttgatatggagtctcattctgtcacccaggctggagtgcagtggcgcaatctcagctcactgcaacctccgcctccggggttcaagcgattcttctgcctcagactcccgagtagctgggactacaggcaccctccaccatgaccggctaattttttttttttttaatagatggggtttcaccct

SEQ ID NO: 31994 - DNA, 1068 bp, Homo sapiens
gagactgggattcactgtgttaggatggtgtcaatatcctgacctcgtgatccgcctgcctcggcctcccaaagtgctgggattacaggcgtaagccaccgcgcccggcttctgtaacttttatttattgtaagttgttagctattggaattctggacagaacagagctcctgagtctgttcactgctgtaagaagtaagaagtgtcatgactctttttcagcagaggaattagtctattaatgacatgtggctggaaatagacctgccgctcagaacctgttctggagttaagtccttccaagatgggcctagggaatctgagaagcacagcaggttcctctcagcaagtgctgctgaaccccaaactaagctcacacattcttcttgggttctgcctggagagtccctattagcctcatccctaagcaaccactatgctcctttttttttttggagatggagtctcgctttgtcgcccaggctggagcgcaatgtcacaatcttcactcactgcaagctcagccccccgagtagctgggattacaggtggacgccaccaggcctggctgatttttttttttgtatttttgtagagatggggtttcaccaggttggccaggttggtcttgaactcctgacttcaggtgttccacccgcctcggcctcccaaagtgctgggattacaggcgtgagctaccacgcccagcagctgctttctgtctctgtagatttacctattctggatatttcatacaaatatggtatgaaacatgtggttctttgtgactggtttcttttactgagcatagtattttcaagattcatccatgttgtagcatgtttcagtacagtactgtacttcgttccttattgttgctgagtagtactccactgtatggctataacacatggttagatatgtagcttagataggattgttttgttaattaaaagctaatgaacaaagatttcaaagtgtgagatattagtcattagtaggctggccattgaacagctccacatttcaaaatgtgagatactaaattagttattagtgggctggccc

SEQ ID NO: 31995 - DNA, 1066 bp, Homo sapiens
gcgtgatctcggctcactgcaaactctgcctcccgggttcatgcggttctcctgccttagcctcccaggtaaactgggactacaggtgcatgctgccacgcctggctaatttttttttttttttgtattttagtagagacggggtttaaccatgttgcccaggctggtctccatctcctgagctcaggcaatctgcctgccttggcctcccaaagtgctaggattacagccgtgagccaccgtgcctggccttctggcctttttttttttttttttttttttttttgagacggagtcttgctctgttgtctaagctggagtgtagtggcacaatctcggctcactgcaatctctgcctaccagggtgcaagcgattctcctgcctcagcctcccaagtagctgggactacaggtgcgtgccaccatgcccggctaattttgtgtgtgtgtgtgtgtgtgtgtgttttactagagacggggttttactttgttggccaggctggtcttgaactcctgaccttgtgatccacctgccttggcttcccaaagtactgggattacgggtgtgagccactgcgcctggcttttttttggagagataaggtcttgttttgtcatctaggctggagtgcagtggcacagtcatagctcatggtggcctccaacttttggtgtcaaggtatccttacgcctcgtcctccctagtagctgggactacaggtgtatgtgccactgcgcccagctaatatttttacattttgtagagatggagtcttgctgtcttgcccaggttgggtctcagactcctgggctcaaacagtcctcccacctcagactcccaaagtgctgcaagtacgggcatgagccactgagtccagctatcttcaactttcactattcaggttacagtttgtagtaccttttttcgggggtggtgggagggtagtgggagtagcaccctaagatttcttggaataaaacagggcttactacttggttcctggtacttaagaacagtggttcctagactccactgttcccaaacttggaatccagttccccaaat

SEQ ID NO: 31996 - DNA, 1062 bp, Homo sapiens
tatacgtatatatatgtgtacatatacgtgtgtgtatgtgtgtgtgtatatatatatatttttttttttttctcttttgagactgagtctcactctgtcgtccgggccagagtgcagtagcgccatctcggctcactgcaaccgccgcctcctagttcaagtgattcttgtgcctcggcctctggagtagttgggagtaccagcatgcgccactgtgctcagctaatttttgtatttttagtagagacggggtttcaccatgttggtcaggctgttctcgaactcctggccttgtgatctgccccccttggcctctgaaagtgttgagattgcaggtgagagccactatgtctggccatatttaagcatatttatgatagtatcttaaatttaagtgaagggaaagaggaaaacatacacagccaatgaagtaagtttgaagtggagtgaaaggaaaagttggaggtaaaaagaggttagagaggtgggcaggggccaaatcatatagggcctttaggacatgggaaattctttggatttgttctgagattagaagtcatttagatattctttagaaagggaatgacatgatctgatattaaaaaaaaaactagaatcactgtgagtaggagtagatctaattccattctgactaaatagtaaactaatatgataatttggacaaatataaaaaggaattcctggctgggagcagtggctgatgcctgtaatcccagcactttggaagtgctgggcaggtggatcacttgaggtcaggagtttgagaccagcctggccacatggtgaaaccctgtctctactaaaaatacaaaacattagctgggcgtggcagcaggcgcctataatcccggctattcaggaggctgagataggagaatcactttaacctgggaggcggaggttgctgtgagcagagatcgagccattgcactccagcctgggagacggtgcaagactcaaaaaaaaaaaaaaaaaaaaaaaaacggaaaggatttcataatattaatttccttgacttagtgacttctgcctattttattt

SEQ ID NO: 31997 - DNA, 1059 bp, Homo sapiens
accgtagtccccaccacgcacgcgtgtggtcttccgggaccaggcccgttagtgcgcacgcgtaaacccagccagggtggggcctacttcgcgtgcgtgaagagttggcagttcggggaggagtattaaaaccgcgcacgcgcacctaaccccaccctgcttgcttaagggatgagtgactccgggagtacaaaatagcaaccaggtcttttatagccccggagttcccgtgatgccccacgcggctgcaatgattggttaagggttttgcttttagggcgtggacgggctcctgagcaatagtggatgagctgtgagtgcgcgcgcgtgcgcggggccgcgacctgtgccggctcgagcccgctgggcactcggaggcgcgcacgtcgttccccgccctcccgccgccgcccgccctcgctctctcgcgctaccctcccgccgcccgcggtcctccgtcggttctctcgttagtccacggtctggtcttcagctacccgccttcgtctccgagtttgcgactcgcggaccggcgtccccggcgcgaagaggctggactcggattcgttgcctgaggtgagcggaagggttccctccaggcgccgcggggccccaggcccgccagcccggtactcttccggccggcaggccgccgcaccgccgcggccgcgccccaccggctgctcgtggccgagccgcccctggcccctgacccttgacctgactcccagcccgggccccgcgccccaagcggcgaccccgcccgcgcagtccccggaagcgcgcccggtagtctcctgtgccccttcccccgcccggccgggcctggtggagcccaggctgcccgcctgcccgccctcggtccccggagcttcctctcccagcggcgccgggcagggcgggggctttgggccgggccccgcgaccgcgcagtgtagccggccgctgaaagcgcgcgtggctgtcggagttgaaatgggaaagaaactctttacaactccattttgctttttacgtttaacgagaaacgacaatcactgtttcatattgattaaagtc

SEQ ID NO: 31998 - DNA, 1058 bp, Homo sapiens
ttttccttagcatcagaaggactccatgagctgacagggcctatagttttatttctggctttggcatatttatggcagaatgtttggccttcagtgttttgaatgtggatggataggtggctgaagctacatttataaagtgtttgggactgttaaagtttcctagccacttggagaaagcagtgtgtttatttctggctttgttcttatttagcagccttagaatatttatttttccaaatttagtattcttctgattatgttttgaaagcaataaaaatcacccagtttcaaaactgcacaaagggcttgaatagagatttttccagagaggacatacagatggccagtagcacatcaacatgattagtcattaagaaatgcaaatcaaaaccaaaataagataccacttcataccaggtatcttattttacctagtatggctataatagtttaaagaaaaaagggaaataactgttggcaaggatgtggagaaatgggaacattgctgatgaaaatgtaaagtggtgtagccactgtggaaaagagtttggcagttcctcccaaaggtgaacacagaaaccatatgatccagcaattccactcctacatatatatccaaaacaattgaaaacagggactgtggccaggtgcagtggctcatgcctgtaatcctagtactttgggaggcgggcagatcacctgaggtcagtagttcaagaccagcctggctaacatggcaaaaccctgtctctgctaaaaaatacaaaaagtagccgagcgtggtggcaggcacctgtaatccccgctcctcaggaggctgaggcaggagaatcacctcgggaggcggagattgcagtgagctgaggttgcaccactgcactccagcctgggcgacagagcaagattccatctcaaaaaaaaaaaaaaagaaaaaagaaaaaacagggattcaaatggattgttgtaagccagtgttcacaacagcatcattcataatagctaaaaggtggaaacaacccaagtgtccatcaatatagataatacataacagatgt

SEQ ID NO: 31999 - DNA, 2250 bp, Homo sapiens
agtcccgctctgtcgcccaggctggagtgcagtggcgcaatctcggctcactgaaacctctgccttctgggttcaagtgattcttgtgcctcagcttcccaagtagctgagattacaggcatgtgccaccatgcccagctacctttttttttgtatttttagaagagacggggtttcgccatgttggccaggctggtcttgaactcctgacctcaggtgatccgtccgcctcggcctcccaaagtgctgggattataggcgtgaaccactgcacccggcctatttccttgactctcctcctgcaccattcttctgggtcacctggcactgtgacccctatcttttcccagccacccaatgactcaggctagaaaatttagcactctccttgtgtccatagtcagaagcattcccagggagaagcacagccagagataggcctccttcagcctgaccggggccagggcagaagccaatctacagtactgaacaggatccacagctgcaatgaccacctccagagaccctgacctgccctccacaatccagcaactctatttttaagtatttactacgtggtggaaactgccttggacttttgctgtggaaataagagacaatggtttggtggtgatgacagtgagttaatagatgacagcacagtggtatattgatatggtagagctggcatagggtaccttaggagtcatagatgtgtgcactatactcaggtttggagagaatggagtctaggaatactacctggggcagagttgccttgacctgaaggcagtattgccttgtcccaggtagtattcctagacttcattcaggataactaggcaaaaaaaaaaaaaaaaaagaagtgtatgtgcattaaaatagtgcaatctggggactgggagtacagaataattgattttggtgatagcagtgaaataaaacatagctagctgcctgggcagctttgggttaagattttgcagttttgcagtagttttttctttctttttgtcttttttgagacagggtcttgctctgtcacccaggctggagtgcagtagtgccatcacagctcagcagtggtattttgtaccccattttgtccataattacaagatccaggaaaaacaacaacaacaaaaaacccgatggtttgtctcttacatatgggaccatattcctgctctactaatactttttcttttttggtcttaatctttctgatgtattcttgctgactacattcctaatttaaaaatacactcagtgttaagaaatttgccaactactttaaatattttgagagaaaattgacattataaagagggagtttgagtacaaggagcttttccttgtcccactggttggtatagagtcagacagaaagggaatggtcataaattgacaaccatagatttaaagtagaagaaatctgaagcctgaattcctttgggaaaagcaaaaccttaatgatcctatagcaggggtccctgggtactggtccatgacctgttaggaactgggcctcacagcaggaggtgagtggtaggcgagcaagcaagcaaagcttcatctgtatttacagctgctccccttgcttgcattaccgccggagctctgcctcctgtcagaccagcggtggcattagattctcataggagcatgaaccctattgtgaactgcacatgtgagggatctaggttgagtgctccttatgagaaactaatgcctgatgatctgtcactgtcttccatcaccccaagatgggaccgtctagttgcaggaaaacaatcttagagctcccaaggattctacattatggtgagttgtataattattttattgtatattacaatgtagtaatagaaatacaatgtacaataaatgtacagcctcaatcatgctgaaaccatcgcccccacacccgttctgtggaaaagttgtcttccatgaaactggttcctgctgccaaaaaatttggggaccactgtcctacagctcagcaatgaatggcctgcctggtccttggcaccttcagtggagaatttgggaatctcatgtgacctaattcctcagacagaaacccttcctctgagtgaaggagagacccttaccagtactggatatcctaaggagtctgaacagaacaaattcccattgccttctgtttttttctgatctcatctttgggtgtgaagtaaaccgggataggtgctttcctgatggttgtaatgtgctgtagctcta

SEQ ID NO: 32000 - DNA, 1024 bp, Homo sapiens
cctgggtgacagagcgagactccgtctcaaaaaaaaaaaaaaaaagaaataattgaccttggccaggcatggtggctcacgcctataatcccagcactttgagaggctgaggcaggtggatcacttgaggcaggtggatcacttgaggtcaggagtttgagaccagcctggccaacgtggtgaaaccccgtctctactaaaaatacacaaattagctgggcgtggttgtgcgctcctataatcccagctactcaggaggctgaggcaggagaatcacttgaacctgggagacagaggttgccatgagctgggattgtgccatgcactccagcctgggtcacagagtaagattatgtctgaaaaaaaaaaagcaataattgacctcgtaaaacaagttgggaactactctctttctctctctttctgttttctgaaaaaaaattatgtaagattgatatttctttcttaaaagtttgatagaattcactagtgaaacctagtctggagttttcttcgtggaaagatttttgatcgcagactcagttttcttaatagatataggagtgttcagattattattattattattattattattttgagacagagtctcgctctgttgcccaggtttgagtgcagtggcacgatcctggctcactgtaacctctgcctcccgggttcaagtgattcttctgcctcaacctcccaagtagggcaagtagctatgattacaggcgcccgccaccttgccagctaatttttgtatttttagtagagacggggtttcaccatgttggccaggttggtctcagtctcctgacctcatggtccgcctgcctcagcctcccaaagtaccgggattgcaggtgtgagccaccacacccggcctgttctttcttaaagatgcttgtggctcttgcctgtaatcccagcactttgggaggctgaggtgggtgaatcacttgagtacaggagtttgagaccagtctgggccacatgatgaaatcctgtctttacaaaaaat

SEQ ID NO: 32001 - DNA, 1032 bp, Homo sapiens
aaaaggttttatattgtatgtatgtagatctggaaggttgtatattaattggttaatgaaaatatgactagatcatcttctactggctgagagtttattaaacaaaaaaaaaaagaaattatgaccagaggcctacaggaacttaaccatttattttgtctaggtgcagtgactcagtattcaataactcagtgtacacaatgactttataaaacataattaccatcaataatgagaattgactgtatagtttcttgtgtcagagccctagctaagtgttctagactttaatgtctgggagccacagacagtgcttttgttgataagtattcatcccttaaattccctctcccattaaaagtcatttccacaggtcacctattatgcatagctgaatttgtaatatttcattgttttaccattaacttcttgggccatactgactttcagttctctgaaggcaggaattatttttgtcttgttagtaataatatactacatggtcttactctgtagatactcaatatgtatttgatcatgtaagtacttaaattttttttttcttttttttttttttttttttttgagatggagtctagctctttcgcccaggctggactgcagtggcactatctcagctcactgcaagctccacctcctgggttcacgccattctcctgcctcagcttctcgagtagctgggactacaggcacccgccaccgcacccggctaattttttttgtatttttagtagagatggggtttcaccatgttagccaggatgttctcgatcctcctaacctcatgatccgcctgccttggcctcccaaagtgctgggattacaggcatgagccactgtgcccggcctgcaaatttaaatttaatggtccctgactaatttggagactttatagttgcaattcggacaaaaaattggtttggtggtgagtattctggttttatgtgtgtgttgtgtgtgtgtgtgtgtgtgtgtgtgtgtgtgtgtgtgttttagagagagtcttgctaa

SEQ ID NO: 32002 - DNA, 1043 bp, Homo sapiens
tggcagcattattcataatagccaaaaggagaagcaacccaaatgtccatcaactgacagataaaatgtggtgtatacatacaagggaacattactctgcaataaaaaggaacgaagtgtgatacatgttacaacatggatgaaccttgaaaacatgttaaagtgaaagaagtcagatacaaaagttcacatttacatgattccatttatgtgaaatatccagaataggcaattctatagaaacagaaagtacattagtgattgcttagggcttggaggtggttgtaggggatagggaaaaagatagcttaagagtatggaatctctttttgagatgattaaaacattctaaaattgtgatggttgctcctatttctgaatattttatactttttttaaattttatacttaaaatcattgaattgtacaccttaatgggtgaaccgtatgatgtgtgaataatatatcaataaagctgttaattaaaaacgtattggctggacatggtggctcatccccgtaatcctagcactttggaggctgaggcagtaggatcacttgagcccaggggttcgagaccagctctggaaacatagcgagaccccatcgatacaaaaaataaaaaaattagccaggcgtggtggtgcgtgactgtaactccagctactggggagtctaagatgggaggatcgcttgtgtctgggattttgaggctgcagtgagctgtggttgggccactgcactccagcctgggtgacagagtgggaccctatcttttttttttcttgagatgaagtctcgctttgtcgcccaggctggattgcagaggcacgatctcggctcactacaacctctgcctcccaggttcaactgattttcctgcctcagcctcctgagtagctgggattacaggcacctaccaccatgcccagctaatttttgtatttttagtagagacgaagtttcaccgtgttggccaggctagtcttgacctcctgacctcaagccatccacctgccttggcctcccaaaatgccgggatt

SEQ ID NO: 32003 - DNA, 1050 bp, Homo sapiens
taatgtggcatttaaggtgatatagtccagctggctccaggctacctcctcagggtttatcctaatccccactaaccaaatggtttgctaaacattccatacatactctttctctgcacaaatcctctcatggctgaatccagtgacctatggcctgtggagatgaccttttgcttcagcttttcccttgtccatagtccagctccatttctacctaccttctttataaaacgtccccaaaacatttctgctcctggggatatatttcataccctttgaactgcagttacattattgctctgaaacaaacatcaaaatagtatttgctcttttaagaataattttttaggccggcacagtgggtcacgcctgtaatcccagcactttgggaggccacagcgggtggatcacctgaggtcaggagttcgagaccagcctagccaacatggtgaaactctgtctctactaaaaatacaaaaaattagtcaggcgtggtggcgggtgcttgtaatcccagctacttggaagattgaagcagtagaatcacttgaacctggaaggcagaggttgcagtgagctgagattgcgccactgcactctagcctgggcagcaagagtgaaactctgtctcaaaaaaaaaaaaatcttttttgtttcctctggtagggcctaataatccttttctgacagggactgtattttacactttttgtgtctttttgcgcctgtacgtagtagatgaggaccaaatatttataaagatgtactagatttgtctgagttggaaacaccttttgtaattaaacagggaaatagaagggagtgggcaagtagaagtggggatttggtggctatgaatttctgcctccaccctgccttgccttgaagtgcttgcatatgttaactctagtgctttatagaggcaggcccatcccttagtgctgcagaacagagacagaacttgctcaaagggcagaactaaggcctggaaagagcccttcctggttaaagtgccacttttctaggaaaacatttctgtgagcatggcac

SEQ ID NO: 32004 - DNA, 1034 bp, Homo sapiens
ttaccttagcaacggcagcaaaggaaggcagagcggcactgggtacctacccatcagcctccagattgcaaatgccgtgggctgggtgtatttttcaggattgagcttctactccagagccagcgccctgaggtggaggagatgatccgagacatgggtgtgggacagtcagcggtggaacagctggctgtgtactgtgtgtctctcaagaagtgcgtactgtggcccctctcagcaaacacaggagataggccatggggccccagccgtgtcattgctccccatctcttgtaaagcagatggaactaaggggcaaactctggagccatgctgcctttgtttgaaccctgattccacctttcagcaactatgtggcctgctgccagtttcttggcctctttgaccctcaacttcctgaatggaaatagtagtagacctgcctcataggattgttgaggatttagtgtgaatcttaagtgctgtttctaagggagttgacctagctctctgggctataagccccattgtgattgatatgtagagcctgttccccattagcactatgatcctgcctggctgggatcaaactctactcatattcttcactctggtgggtgtaaggttggcaggaagggtggagggccacttagctgagaggcatagagggtccaagatgcctcctttaagaccaggtggtttagggagccccctagtgagactggggctttctgcatgccctctcaagtcaccagtgcctgcaggacaggcaggaggaaatagtcacttccttgcattctctgcaggaccctccacagtgccacctggtacttgttgggctcaggtgtcaaagtaggaatgagagtgagttgaggggttgggcagtgctttgtgttagattagtgctgtggctcagtctgacctgcaggtgttcttttctggcatctctttccatggccacattgcagagagtacgagaatctaaaagaggcacggaaggcctcaggggaggtggctgacaagctgaggaaggattt

SEQ ID NO: 32005 - DNA, 1941 bp, Homo sapiens
tgccttgctttccattcctactagcaccctatgcgtccataccgctcaggtagacagccaggagtgcgagcactaggcaagtgagcaccagcagcgcgagcagcagcaggaaccctcctcgtctgtacacagggctgcagccagcctgggcacacagtgacggcggcaaaacgcccagcagctcatcccacggtcgtgcctcttcagttagataggggcgcagtgtgcctgctgggtggatgggacattgggagggtggtgggtgcacctgctttcgtcccctcccccagcacatcatccaccccactgtccccactcacctccactatgtaggtcgctgatggactccacctggtgcaggcatacctcatgcacgtggttgggggccaatggccccctgctcctctggctgggcatcattggcgccacggagtctgcaggggcagcgcaggctgatttagccagtggtgggtcaacccccttccttctaccaggtggcttcaggcagcaaggacttgcggatgatagggatagtgggacatttggttccaaatcccctaaaactgactcaggaattacccttgatttggatccaggatgatcccagacccttacaggcttattctgtatacaggagcaacaggtacatttgatttgtttccttccaagcaccccagggactcactcaggcattcctctgcctgcttatttctagcagtttatcagccttgaatgctaaacctgcagcaaatggaattcagtcctgcctcttttgtcagttctccctgcagacccaatgcctggcatcttctggtcagaaagccctattgtagccactctggtgcctttccctcctggccttggttctgtgtttgttaacatactcagtgtgactctgctgtacatgtgtgaaccctgctgttttcattcaacatttactgttggggagacccttctttgttatactgttgcacatgcctctgaggtctctcccttcacacatctccctgaggctgcctgggcatctaggttgtttgcagtccccgccccccttttttttttgagacggagtttcgctcttgttgcccaggctggagcgcaatggcgcgatcttggctcaccgctgcagttcccttttgaaattaacccccaggacatccaccgttgaatatgaaggttttttcccaatttcctgatagtttaattcccagaagtggaattactggatccaagagcagggatttttgtttgtttgtttgttttttgagatggagtctccctgtattgcccaggctggagtgctatgtcgtgatctcgcctcactgcaccttccacctcctgggttcaagcgattctcctgcatcagcctcctgagtagctgggattacaggcgtgtgccaccacgcccagctaatttttgtatttttggtagagatgaggattcaccatgttggccaggctggtctggaactcctgacctcaagtgatctgcccgcctcggccttccaaagtcctggcatttacaggcatgagccactgcatttggtcgttttttgttttggtttggtttttttaagatggagtctccctctgtcgcccaggctggagtgcaatggcaagatctcggctcactgcaacctctgcctcccgggttcaatcagttctctgcctcagcctcctgagtagctgggattacaggcgccttccaccacacccagctactttttatatttttagtggagatggggtttcaccatcttggccaggctagtcttgaacccctgaccttgtgatccacccacctcggcctcccaaagtgctgggatttacaggcgtgagccaccgtgcccggcctgtttttttgtttttgagacagagtcttgctctgttgcccaggctggagtgcagtggcgcaatcttggctcattgcaacctccacct

SEQ ID NO: 32006 - DNA, 1075 bp, Homo sapiens
ggggttggtgggagggttggcacctgcacactccatctcctgctcaccacctgcctctaatctgagctgcagcctggctggtcctcccatttctaaagctgaatgtcaaacagtgccaaatgctggggcagggggtgaagaaccctctgtcccacccctagccaccagtgtcctccaagtgccccctcacctctccaggtgctcattgtaaccatttctcactagtgtcaggcccccagtgggaccacatgccactgcctgcacctttcggcagaggaacccccaccagacatcaccctttgccttagcaggggtgactttgtctctcctggctgggccatccttccgccaatctggcccttacacactcaggcctgtgcccactccctatctccttcccacccctacacacacactccctgcttgcaggaggccaaactgtccctcccttgctgaacacacacacacacacacacacacaggtggggactgggcacagctcttcacaccattcattctggtcatttcccccaaaggcatcccagcctgggggccagtggggaactgagggcaaggggatatagtgatggggctcagatggactgggaggagggggagggtgatgcattaattaatggcttcgttaattaatgtcatgttgcttgtcgctttctcagtgtgtgtgtgtggtccatgcccactgctggtgccagggtgggtgtccatgtgcacccggcctggatgccagctgtgtccttcgggggcgtgcgtgtaactgtagtgtagtcaggtgctcaatggagaatataaacatatacagaaaaatatatattttaagtttaaaaaacagaaaaacagacaaaacaatccccatcaggtagctgtctaacccccagctgggtctaatccttctcattacccacccgacctggctgcccctcaccttgggctgggggactggggggccatttccttttctctgccctttttttgttgttctattttgtacagacaagttggaaaaacaacagcgacaaaaaagtcaagaaactttgtaaaatatcgtgtgtgtgat

SEQ ID NO: 32007 - DNA, 1035 bp, Homo sapiens
taaatcatgctttctacctttgtctgcctgctgcaggtggtctctggtgctcacttgaggtagatttttgatggggatccctgtacggggtgacggtggctgggctccacatgggaagaaagagggtgggggtccctgaaggaggaaggaggcacagaggcctggcagaagcagctgtgtcccactcctgccgttttgtcctagtgtccagggacagggtcactgcacacatgagaacatgtgtcacacacacacatcaggccgccccgagttgggggtcgagggtactgctcaaaccatcctggatctctgcccaggttgaagggtccgcaggattggagtccattctctgagaggagccttgtttgtgtgtgtgtgtgtgtgtgtgtgtgtgtgtgtgtgtgtgtagggatagatctggacaggggatcacacacgtgcaactacaagggttggggggaagggagaatggggtaactgatggtagggggttgtgagcaggacccatgagtgtcccctgtaggtgcagagtggtgtgtaggcatgaacgtgtgtgcccttgtgcccatggtggcagctggggtgctaggcaggtgggttccatctggctggaaacacacaggttagacacaggtatacctgttggggggtgtgcagtgtgcgcatgcgtgtacaagtacacttgcctgtgttgaagcaggatctggcatgcccctgcccctccaagagcccccgcccccacccctgcttgcttctggccccagttgattaatcatggagctgagtggcttccagcttatcaggtaacttaatagctgaataattccagccccatcagcaggcccttaattgctttcttgtggctgaagcctggagtgcatgctgaatgggtgagctcctgggggaccagtgctagctccaggcagcatgctggactgagggctccgagttcccagcacccagccacctgggcagcccctctccagaggctaccagccacagctgccctgcctgctcatgtgggacctggaggaa

SEQ ID NO: 32008 - DNA, 1037 bp, Homo sapiens
taaaattcaaggagagcctaaaaattggaagtaggagaaaaaggaaaacttagaggagggagtaagatggcatcaggaggtgctgacagaggaggtaaatgagatggcccaggcatggtgtgtccccttgcacacttgcttgcacattcacagtgactctggtgcctactgccttaccggtgccttgtggtcagctgcatcaagaactcagaagggggagcctagctgggctctcctgggaccctggttcagagtccactgtgggtcaggccatgcccttgccccatccaggtccggcacctatgctgttaggagcccttccaatggtgtgttcagcaggatttagggtcatgaccttcaggtagccccaaccgtccaagccagcaaagttccactgcttaaaacatctcagatggccacacaccactttttgaggtgtgaatggacacccacagagcctcacgcaggcctggggctgccatatatccagtgacagtggacaggcccatctaggctatggtaccttttctgtgagcctaagtgtgagacttgagcaagatctgcaaggggcttcctgagtcctaggtgtgaatgtggtgaggtcagtgtgtgtgacctggtatgcaaggtcaagtgcatgtgcctgctgctgcatctgtgcactggtacagggcaggtccctgggatcaccttgccccaaaagaggcccctgataccatgagaggacatgggctcatcttctgggcttaccttcatctctctacccttatctcccacacctgccatgctaagatctcatgttttcacaagagcagccagcctgagggcctcagcagcacctcttactgtgattggggctgtcgttggtgctgtctttatgtggtgacatctttagcaagtctcagcagcacaggacagaattccagcctgtgaggccgggaaagttggtccctgcaggacagaatggatcagggaaggtgctcagggccttgggagcaaccctggaaggcggtcccatgaaaagccaccagcacccc

SEQ ID NO: 32009 - DNA, 1072 bp, Homo sapiens
gcccagctcatttttgtatttttagtagagatgaggtttcgctatgttggccaggctagtcttaaggcttaaggctagtcttaaactcatgacctcaagtgatccacctgcctgccttggcctcccaaagtgctgggattacaggcatgagccaccacgcccagctgagaacattttcagttggcttcctgaggacaggtacaggggagccagactttggagactgtcatgtctcagaaagccttccttctccccaacgctcaacagagatttcaggtgggttggaagtccagggtggaaaccatttgccttagattttctaaggcagcactccattccttccagcttcttgagttgctatggagaggtccccagtcattcagattcccgatccattgtacatgacctggtttttatcagaaacttgtaaattttctccctttgcccagtgttcagaaattccacactgacctatctttgtgcggcttttcatttcttaccactcagtgcacactttcaaactacttgtgtccctcagttgtgggatgttttcttgaatggtttctttgactgtttcctcccttctcatttctctgttctttctagaaaccttaactcaggccctgttcttttttatttttcttttgtctccaatattccatttctgtgtctttctgtgagaaaatcttctcatcaaattttacatttaaccattgcattttaaatttccaggatgtcttttggaactttttttttttctttttttttgagacggagtcttgctctgtcacccaggctggagtgcagtggcgtgatctcggctcactgcaagctccgccttccgggttcacaccattctcctgcctcagccccccgagtagctgggactacaggtgcccgccaccacgcctggctaattttttatatttttagtagagacggggtttcaccatgttagccaggatggtctcgatctcctgaccttgtgatcctcctgtctcggcctcccaaagtgctgggattagaggcgtgagccaccacgcccagccggacctttttaagaataatatct

SEQ ID NO: 32010 - DNA, 1024 bp, Homo sapiens
gactttgcagaaagacggggaggggtgcggcctgaaagctgtggttgctatctctgtggggaagcttataggctggggcaggtctgaattctgtgtgcagactgcctagatctaaaccaggtgctgtcaccagagcaccgcaggagtgacaccgaccttgaaaacgatgtgggaactaggtaaggctcactgctgcccactactccccactccttttgtaaactcctctgtgcagcagaggcagttatactcccctgtgaaacattaccccagcgacctgagaaccaccttggtctctcacaggggccttagcctgccctgcacaaggagaatcagagctcaggcccacctaaccctgacccaacctggtggtatttctccacctgccctggtaacttaatacaaaagacataaacttttaggagacttgtagccccacccatcacctaagaaaccagaatacttcccctaggcaacttagggcaagctcaaatcccactgttattacggcagctggtgctcttttgaaagcaacacctcctggctggaggccaaccaacacagatcttgacaccatctctagatagaataacactgtgcccaagaaggagaaaacagctgcatgacctcggcaatcatcactgcctgcaacaccctggcaaaccaaaggtcctgagtctgtccacgtgacaagttcactactagtattaccagcattcaagaaaggcagcacactaagcctatctacaaccaaggaatctcagagtctatgtcacatcactggatcccttgcagacattccccaattcagggaacaattcaggatgactgcagccccacaggaggagcactgcccagatgcaggcttgcacaaaaggcagaatcacaattcctccctacatggaacatcaatattcctaaagaagaggtgcctgtctgatctgaacagccagaacactgggaaaacagtaaagctgtgaggtggaaagcttttctgctggcctagcagggaagctgaggtagc

SEQ ID NO: 32011 - DNA, 1082 bp, Homo sapiens
gtagagacgaggtttcaccctgttggccaggctggtctcgaactcctgacctcaggtgatccacccgccttggcctcccaaagtgctgggattacaggtgtgagccactgcgcccagccaaagtgtaggtaaaaggcatctgaagcctatgtagatggagagcttattaggtttgggagaactgaacctcttggcatagaaagtgagaagccagtgtgaaggtggtggtgaggtggggatgagaaaagtgtctgtggtaacagggtctcagggttggttgagatccagagcaggagtgggtagcatgcttcctcctcagaccagggctgaagccaggtttagatgtagaggggaccagagagcagcggagggagcttatgccagttgacctattttctgtaaaggaaaggggtgagttgtttatctgcagggtttgggggctttgggtaaccatgaaattgatgtaggtggaattaaggagagaagagttttagaattctttctgtagagaaatttattagtaccttaatttaaaatggcctggccctgaattcctctaagccctaaaagaagtcttagagaattaaaaaaaaaaacaatatccctggatccaaaacattttctaaatgttgtcagagttgagtcaggattctagaaaaatttggtttttttttttttttttttttttgagacagagtcttgctctgttgtccaggttggagtgcagtggcgcgatctcggctcactgcaagctccgcctcctgggttcatgccattctcctgcctcagcctccagagtagctgggactacaggtgcccatcaccacacccagcaaattttttgtatttttaatagagacggggtttcactgtgttagccgggatggtcttgatctccttacctcgtgatctgcccgcctcagcctcccaaagtgttgggattacaggtgtgagccaccacgcccggcctgtttttgtttttgtttttgttttcaaagaaatgggatctcactctgttgcccaggctggagtgcagtggcacaatcgtagttcaatgtagccttgaattcctgggttcaagt

SEQ ID NO: 32012 - DNA, 1025 bp, Homo sapiens
gtgtttatttatttttttgttggttttggagacagagtcttgctctgttgcccaggctggagtgcagtggcaggatcttggctcactccaacctccacctcccaggttcaagtgattcttgtgcctcagtctctgaagtagctgggattacagacacgcaccaccaagcccagctactttttgcattttttagtagagacggggttttgccatgttggccaggctggtctcgaactcctggccttgagtgatctgcccgcctcagcctctcaatgtgctgggattataggcatgaaacacggtccggcctgtatttggattattgaaaaaatatgtccttgattttaaaaatttatttttagaaataaaattaataaatgtttctgctttagaatatgcagaatcttttaaagagaaaagaaaattactcttagcattcactacgtaatatttgcaaatacacataattaatattatacttttaatcaaattcatcttttttatgaatattttcaaaacatagaaaggcacagagaatagtttaacaactgctccatcattaaccaggattggcatgttgttgtatttgcttttggctcagttctttttctgcctccccagagtcacccatcttctgaatttgaaccatattctccccactcatgtttttatactatatatatctgtgtgttcataaataataacgtcatactgctttgcatgtttttaaattataaatattttcctaagttcatctttcacagcttgctttttttacccttatattcttgagatttatatatgttgatatttatttaaaatgctgtatttctatactgcagtttattctgccattgatggctaatttagtgtttttgtttggtttttttggctattaaataaatggtatcatgaacctccttttggaggctctcttgaggatatgatgtagagcatctggtttgtagggtgtctgtgttcttacctttattggatattgccaaattgcttctaaaaatgttcat

SEQ ID NO: 32013 - DNA, 1191 bp, Homo sapiens
attccagcacttgaggaggctgaggtgggaggatcgcttgagtctaggagttcagggctgcagtgagctatgatcatgccactgcactccagcatgggcaacaaaatgagaccctgtctctacaaaaaataaaataattagctgggtgtggtggcatgtgcctgtggttctagctacttgggatgctgagacaggagggcagcttgagcctgggagattgaggctacagtgagccgtgatcaagccactgccctccagcctgggcagcaaagtgagaccctgtcttgaaataagtaaataaaataaaatctcttggccagtgagctgtgctcaaggaggtagtaggcagatgtagagttatatataataataatactatatatctctccttataggcatgctcatatactcatgaacagattgtggaaatgatggaatttttgatagaatatggcccagcgcagctatattgggaaccagctgaagttttcctcaaactttcttgtgtgcaactcttgttgcagcttatttctattgcctgcaattggaagacctattatgcaaggtgggaccagagagagatttcaaatgaagtttgatgcatctttttgttaaagttgatgttggtttgcacattgtatatgcttaacaaacatttgttgaattgaattgaaattttggacttgaatctgagaaattagattaggcatgaaaatatgatttttaatttacagcacacttgttcatatatatggtcttggtgattgtaaaatttgcataataggcaaggattagcctctgtactgtcggagaaggtacatgatttacacggccacagctgcagagctggggttaaagtcttgtcttgagcctggagtccaggattctttagtacttaaagtgtcttgctactacttgacaaccatatataatgtttatattacgttcatataaaattgtccttttactcttggaattcgacatactgttaggattttcacaaattagtttaaggcagagcaggacaaggcccagaaaagggtggctgatgtaatcaggaaactgggtaggttctatttgaagatgatataaaaagaaataaaactgttttgaaaaagatggggtcttaagagaagatagtaaaaaagtttataaacagagtgcttgaccttcttttcctattcactcact

SEQ ID NO: 32014 - DNA, 1050 bp, Homo sapiens
tagataaaagtttgagaaactttcatgtttggttttcaaagacacattagaaaaatcatgaatatatctaatttctgcctcttcaggtgtgatggtccaggtcaacttgacccaaacagatcagttgtcaatgatgtattttatgtgcaaatcttctggtttggattctctggaaaattttatgaggaacaatacttagctgttacttatttcatcaacttataggaatcaaagcaacgcatttatcaaattgttgctattacaggcgttgggctcactgcatgagtctccagttattatgtggaaataagaattattaaggattacttaatccttaataaagaggcaccccctttttctccaattatctgttgataggtggcaatagtgcttcgaagactgagggagctacagctacaggaagtggctttgcggcaggaaaacaagcgtcccagtccacggaagctctcttctgaaccccttttgcctctggatgaggaggctgtggatatggactatggtgacatggctgtagatgtagtggatggagaccaagaggaagcttctggagacatggagatctcctttcatcttgattcaggccacaagactagtagcagagtgaactcaacaaccaaacctgaggatggaggattaaagaaaaacaagtcagcaaaacagggtgacagagagaactttaggaaagccaagcaaaagttgggtttctcatcttctgatccagatcgcatgtttgttgagctgtctaatagcagttggtcagaaatgtctccctgggtgattggcaccaattataccctttatcctatgactcctgctatcgagcagcgactcattctccaatatttgacccctctaggagaatatcaggaggtaagcttattgggaagagtactgttcacacataggaattattgtgttcatttctgtggtattttatggtagtattttatacaaagatatattctaactctaccacaaacaagggtttgcatgaaactgttcaagtcttatgcaggtcattcctgatat

SEQ ID NO: 32015 - DNA, 1031 bp, Homo sapiens
ttttgtgtatggagtctttagggttttacacatataagatcacgtcatttgccaacagaggtaatcttacttcttactctctaatctggattcctttaatttccttttttatgtctaattactctcactagaacttccagtactatgtttaatagaagtggcaaaagtggacaccttgaccaggcgtggtggctcacgcctgtaacctcagtactttgggaggccgaggtgggaagatcgcttgtgctgaggagttcaagaccatcctggaaaacatagtgagaccttgtctctcaaaaaataagtggatatctttttcttgatcttaagggaaagcctttcagtctttcactgttgagtatgatattagctatgagttttcataaatggcctttattatgctgatgtttccttctagaatctagtttattgttttttcattacagggtattgacttgtcaacatttttttggtatcagttgcagtggttatgtggtatgttgaactgtctttgaattcctgagatttagtttatttagtcatgatgtataatcctcttatgctgctgaattcattttcctagtattttgttgaggatttttataactatagtcatgagtgatatattggtctatagttttgttttctcacagtgtctttagctttggtaatgctggcatcataaaatgagttaggaagtgttacctcccagtcaatttttgggaagagttatgagaaggattggtgttaattcttctttattttatttaattatttaaagagatgggtctggttttgttgcttaagtttgtctcgaactcctagccttaagtgatcctcctgcctcagcctctcaaattgttgggcttacaggcataagccgccatacccggctttaattcttctttaaatgtttcgtagaatttactagtgaagtcatcatgtcctgggtttttctgttttgggaagtttttgattattgattcaatttccttactacttataggtctatttagtttttctgtttcttt

SEQ ID NO: 32016 - DNA, 1035 bp, Homo sapiens
cagcctcccaaagtgctgggattacaggtgtgagccaccgcgcccagccttttttttgagatggggtcttactctgttgcccaggctagagtgaagtggtgagatcaccatggctcactgcagccttgacctcctgggcttaagctgttctcccacctcagcctcctgagtagctggaagtataggcatgtgtcaccatgcccggctaatttttaaatttttttgtagagacgaggtctcactgtgttgccaggctagtctcgaacttctgggctgaaaccatcttcctgccttggcctcccaaagtgctgggattacagacatgagacaccatgcctggcccatgtgtttctggaatggatttataatgtcaaactcttactcttgatgagtgatcttcccagtgataaagagctttgtatttgaggaagcctttctttcctattcttcgtggtatttattatttgtgtagctaatactagaagatctcttttgtgctgtgttttgttgtaggggcttggaatattttgttagcaacatgagagctttacattcatgtaggtgtttgggggtgggcaaacaaaaataaactgataatttcaaataagagtaagtgttaggaagacaagcaaatgttaaattgatagtgactatgcatgtatgcttcaactatcaaaaattaggggctgggtaggccgggcgtggcggctcacacctgtaaccccagcactttgggaggccgaggtgggcagatcacgaggttaggagatcgagaccatcctggctaacacagtgaaaccccgtctctactaaaaatacaaaaaattagccgggtgtggtggtgggcgcctgtagtcccagctactcgggaggctgaggcaggagaatggtgtgaacctgggaggcggagcttgcagtgagccaagattgtgccactgcactacagcctgggcgacagagcgagactccgtctcaaaaaaaacaaaacaaaacaaaaattaggggctgggcgtcgtggctcacgcctgtaatccc

SEQ ID NO: 32017 - DNA, 1002 bp, Homo sapiens
atggcacgtgcatgctttggggaggtatagcaagaggctgcagctagaaggtagcacgttattattctgcccggaaactttcctctcacccccaccaggctgccccaaagcttctggcccagaagccagacctgtctgttggtgctctggggccttgccacagcagcagggagagcctgcagaagggctggtgagcaccttcccctctctctactctcccctcacaccagcagagcccaaagctctgaaaatggcaggcaaaggagacagggagtaagacaggatggccagggagggaaaagaggaagcaggaagtggcagagagcaccccaggcaggagcctagggcattggcttggctacacaaatcggtagcttccctctggccctcaatttgcccaagtatgaaataaagggtctacagtcataccaccctgaatgcacctgatcttgtctgatctcagaagctaagcaaggtcgggtctagttagtacttggatgggagactgcctggaataccgggtgctgtaggcttttggcctatcgttccctccctctttccctctttggccaggcgcggtggctcatgcctgcaatcctagcactttgggaggtcaaggcgggtggattacttgaggtcacaagtttcagaccagcctggccaacatagtgaaaccctgtctctactacaaatacaaaaattaaccaggtgtggtgacaggtgcatgtaatcccagctacccgggaggctgaggcaggagaattgcttgaatgcgggagatggaggtgcagtgagccgagatcgcgccactgcactccagcccgggcaacagagcaaaacaagaaagaaggaaagaaggaaggaaggaaggaaggaaggaaggaaggaaggaaggaaggaaggaaggaaggacggacggaaggaaggggaagggaagggaagggaagggaggaaggaaggaaggaaggaaggaaggaaggaaggaaggaaggaaggaaggaa

SEQ ID NO: 32018 - DNA, 1093 bp, Homo sapiens
ggttctgacccttctgtgcccctgggtcagctgcttcacatggaggtctttatcctcagcagtcagtgaagaaagtactgaagtaatagtaagcctttgtggaggctgcctatagaaggcaccacgtgggcacttcctggccgcacttaatcctcaaaaccagccttggtccaacctcggacactttagaaactcctaaaggggtgctgttatgctacagctgcaggtgcagcccatggcatgtgatcccctacttctgaagtaggtattatgattatctttgtttcacgggtgagaaaatattgaagataatgaacctacgaaggggtgggggtagcatttgatctaggcagtccatgtggggccctaggaggtttcaattgcccaaccagagctggggctgctagctcttgactgtaatcctggaagtctctgggtggccaactgccccttgccaaggcatgacaggtggaggtgggtttgaaagggagcaagagcaggttctgtgttctgaaggtggtttggcccagacaggccaccaggttgatgacttccaaagtgaggtctctgtgctggtgtcctggacatggggtgtgaaggttctcctttccccagccatcctgccatgaaaaaggagtgatccctttaccaagttccggtctgaggggggaggccaggtcagggcttcagctgggcttaaggttacagccaactgctaccctcagcctccagcttgtacatggaacctgccttgtgctcaggaagcacaaattcccagttcttgagtttcaactccttcacctccaagctctgttgtctggggcaaactatattagtggaacctgtttctttttcctttttttttgagagagtctcgctctgtcgcccaggctggtatgcagtggcgtgatctcggttcactgcagcctccatcccctgggttcaagcaattctccagaatcagcctcttgaccacaggcacatggcaccatgcctggctactttttttatattttcagtagagagggggttttgccatgttgcccaagctggtcttgaactcctgagcttaggcaatccgcctgcctcagcc

SEQ ID NO: 32019 - DNA, 1099 bp, Homo sapiens
aggtgacacccgtgacagcagtcgttaacgcacatggcagtggtaggactagccatgatcacaggcattacagtagttcatgtttgttgacccctcacttggctcaggtccttatgagaccactgtgcataaataggcccattttatagatgaggaaacagacacgggtgtccagtgccttggggctaaagtgtgcagagccctctccacagcagtgctgttgacctctattccaagttgctgccctacccacactgggcttggccaggtccctcaggggtcgggcaagaccagccagccaccatgctgccctctgtgccccagccccacctgcccacccatgtgggaaggctccttgaaggaggcacctccctgacccatgccaatgtgtttcagacgaagcccgctccaagaagtgtggtgtcctggtgcactgcctggcaggcatcagccgctcagtgacggtcactgtggcctatctgatgcagaagatgaacctgtcactcaacgacgcctacgactttgtcaagaggaaaaagtccaacatctcgcccaacttcaacttcatggggcagctgctggactttgagcggacgctggggctaagcagcccgtgcgacaaccacgcgtcgagtgagcagctctacttttccacgcccaccaaccacaacctgttcccactcaatacgctggagtccacgtgaggcctggtgcacggggggcatggcaccaggcccctgctcggctctccacagggctaggtgggagagcccaagcccgccacctctggcctgaggaacccccagatgtcacctgtgcccagaggcccaggctgatcggtgtcggagcgcccctcaccatccttgggggcagggcccgcaggcaaggtctcccactgcagggcttgctggagaggcctcggctcttggacacgtggctttgggcgtccaccagggcctcatcctgtccaggacgctcctttctgctgacagcccagccagtttggctgttttttaaagacacatccacggacctgagtttactttttacttttggcaggtaaatccaagctccctggagcacaaagagtgtttgagct

SEQ ID NO: 32020 - DNA, 1027 bp, Homo sapiens
gaagggggtacatactagctcacatctgctcttagggaccctcagctcctcccagaggaatagcaaagggccatgaaacatacccaccatggcgaggccttgtgctgccaggaaggccccttctctgtgtggttctgaggttggatgtgtgcagacagggaaggcagctccagacgtgccttgtgggttcaggcctggcagttggctgatcgcgatgagaagggatggcaggaggagcagcaggcttgaggcagggcagacttgcccctgggcgttccgggtgaccagtgtggtgtggtagtggatggtgttgggtggtggacagtgactgtgatagggtgcagagcaaagatggggtgaggaggggacggggtccttggagcacccagcagggaagctaatctgggcccggatgatcagaggaggcctctgtgctcagagactgagctgggatcagaaggcaggcaaaggctgaggatgaaaactgtccaggcaggggaaatacctgtgcaaaggcctggggctgtgtgggaaggagggacagccctcagagagttcaagcatgtcccacctgcacttcccctctccctcctgaaacaagctcatccccagggacagagcttttccagcagcctctttcccactcccccaccctgcccctcagggagaccctagtgagctggacacccctcctgggagctgcaggtgagggaaggcctgaaccctaaaggcaggaaagaccacatttctaaagaggaagaatgattccaaggccttggaatcacccagggcaccaggttgctgccaagaacgaccctctcccttgagggaagcctacagctgccaggcaaggccccggacagggacagctctggtctcttgccatgtgaccataggcgagttcctgccctgctctgggccttgtaagtctgggattgagggttcttccccacagtgagaaccaagacttagggcctttcctccaacctcctccaacctgcccggtgggggcccagggtcctgctgg

SEQ ID NO: 32021 - DNA, 1073 bp, Homo sapiens
agacagaaggggccgcactgtggaagagttggaccccagcaagagggagttctgggagatgggccatctttcctggccactttgcccaggctgcccctctagcagccagagccctggactcctcaaccccttcgtcagtttccctttaccctgccccaaagccagaagccatggacgcttgtgtcaggcaaagcagtttcccttgttgacacctggcacctgacacagcctgtacctctttggggaccttctgaggggctaggaccagacctctggcccctgctcccctgtacagagcacagggtgagaggcagtgtgatcaaggaactgtttggaaggtcagcgctcatttttccttgaataaatgaaagtcgtggcttccaggccatggagtgtggacccggggaggccgcagaggtatttgcctgcagagcgctcctcctcaccctccagggcaggtgtggccttgtctccagcctggtgaggacaggcgctggtagcaggataattcccgggctggacggagcatgaggcgacgagagcagcctgcttggctgggccccgctgggagttgggccactaggcagcaggtggaaatggcagtggcctgtgtacaccgaggtagcatgtattttctgaaccctcgtatgggtatgtggggatgtgcttactttttgttgtgaaccgacaggtaaagatcatatacattctgaacaaggccacgtgatatggctccaaaccagtctgtgccaggggtactccccacacaccccttctgccacctcagatgctctcctgccctcctcccacagctcccgtgcagctggggaagcacggtggcactgtgatggcctgtcctggctgctctgggcctgtggcccagacagactccctgcaggtggcctgccagccctcctgcctgtgtgtgccaccagccctgagtgtgtctccactttgccacttggatgcccagtggggcatttccatcatgggggaaccccttccttccccttgtagagggaaggcacaccagcagcatttcagatttccatgtttcagccgggcgcaggggc

SEQ ID NO: 32022 - DNA, 1025 bp, Homo sapiens
accaggaaggtttttttttttgtttgtttgttttaattaaacaaaacaaaacaaaacaaaaacctttgtattgtggaaatttcaagctagcacaaaagatagaataatgtaacaaaccccatgtaccactcacctagcttcaacattctgctaatctcatttcatctgtttcccccacattttaaagaagagtttgagtggttttaaaaatcccagatatatcattttttactccaaataaggccatttcttagttatataatagcagtgctcttatcacatccaatgaaattaatagttccttcatatcagatatctagtccacattcacattttcccacattgtgtcattgttcaaataaggatgcggaaagctttgagaaaacccatgttctctgctcccccttccccgacccatggttctggtaggcggagtagctgagggggctttggcctggagctgtcttgggcttggggaagggggcgcgtctgggctcacaccacactcctgatgtcctccaggagagtttggtactgtgagctcctcgctccttcctggaggtgggtcaggcacaggtgggctagctactgccagctatcttgggccaggcatccgctggggggcactggctgtctttgaagcctgcagggggagggaagggaagacgtgatgtaaccttggttcataacagctgtctgcgacttcattttccaggaaaggagaggctgtttgaccccatgggacacagccttctgcaactcctccctgggaatcgtggggctgctggtggagggctctggctgatctgctctggtggttctgagggctctggtggagggctgctgcttttgcgggttgggtagagccagtcctggttatctatcttggcaggctttgctcgtgtcctgtgatgctgcacaaagtatgaattacggagcttgggagtgatgcctggggtgtggtcggtggctctaacactctccattgaactaagtgcaaggagagtttaaaatagccagccttt

SEQ ID NO: 32023 - DNA, 1032 bp, Homo sapiens
gacctcctttaggcttcatactgagttgggccctctcaatgggaggggctggcttcccagctggggaggacttgctctctggtgccctcaggatgtgtctggggggagaccctgggccccatgggaatgagttttcccagagctctggattgcagtccaaggctagcatgggaagggcctcggtcttattcccatgtgggtgtgctccttggagaactctgggccacaggctctccacctccagaccatacctcgagatgtgctctgctccatgggagacttctcacggtctgtttgtggatgccagggaagatggagctgggccagttgctccccctgcctctccaatgtcttggtggaggcttgaagcctgttagagctgtaggtcatagcatcacccactgtcctcagccagtggctccatggactcatgcctcatggtctggcacatgaagccgcagtcacgcgcctaccgcttcactggccacaaggatgccgtcacctgtgtgaacttctctccttcgggacacctgcttgcttccggctcccgagacaagactgtccgcatctgggtacccaatgtgtgagtcgtacactttgaggaggcttgttggagtctggggccctggtgccagagccatccccacccaggtcccctagcttggctctggactggtcacagtgggacttctactctgctttggaagaggtgccatcagaggctggggctgcagttggagccctcccctcagggttggaagaggagttctgggcttacccaatctatccctaaagaaatgccacctgatgctgtgttcatgtgggtggggcctagagatggtgctctgttcatataggagaggctctggctttcccttgtggagactggggtactcgggcttgactgactttgggaggggtgcttgaggagtaggagagctttgatgtgcttgtgggctctcatgtcactgttatgggtttccttactcttggatgcctgtccttgtagcaaaggtgagtccactgtgtttc

SEQ ID NO: 32024 - DNA, 2989 bp, Homo sapiens
cctctcctccctctcaattttgcctgagggatgggtcctaaagcttggcgtatcctcagatctcaatccatgtctcatttccagttgtctttgtattgcgccttgagctgttacattttccgtgaatatcctctttaggttcagaggatggcaagatccatgtctggaatggagagagcggtataaaagtagctgtgttggatggtaaacacacaggcccgattacctgtttgcaattcaaccccaagttcatgacttttgccagtgcgtgttccaacatggtatgtgaacagtaagaggtatctgctactcagggacccttcccagttggggtggtgggtgcctcaacaagcacagcaagctgtgttctacataggtacattacaagcatccaagtacatgtttctcaactggtggtttccctatttcatctcctattatttgatctctggctgggctggtcttgcctttcatttttattcttcctagaggtgatcaggaatcatctttgagttccaaggagatcataggccagtttttgctctggaccctaattttaggtccaaactacctgggctatgcttggcaatttttttgctccttaaaatactctgaaccggccttttgtggtttcagttttccattcctgttggtttacgccaaattcccagaaatttctacagttggtcataactcaccacttagaattaactccaggcccttatctcttcctagataatactaacagaacaaaggatcagtgagtctcagctccagttttcccttgtgatctcctaaacctgcctgggtattcggggatgagacatttcattactagcctacccggagcacattgccaccttgctttttttttttaaccaagaaaaaaatgttagaaaaaatacagcaaaaccatccagttccttactttttacagcccaggaaggtgggggcctgttggaggtaacctggtggattagcaatgaggacaggttacttattcacccacctcccaggcagcactcctttttttcccttcctttaaaaaaaagggggcggggggtctgctttggtggaaggtggacagtgattattggagaaaaacagaaccattttactttcacatagaggaaagagtgtttctgtctccttagagcatcggggttggttggttaggagagagggctaccagagccactggggttgggcacatttttgctgtggggtgggatgtgaagaaccgttggcagtgaggagatgcttggctttttaaagttgatttatgttctccttctaggccttttggttgcccaccattgatgactgaccctgttgctgcttggctatttctgtatagtgagggcggccagcaggaagaaactcagagggaactgagataatagtgggattggatcatttgactgggctggagaacatccttttacatggccttcccatggatgtgctgtacatctgctcaaaagaaaataattactttgatgagcgtcttcaaaaggactcttggtgcaacagactcaattggaactcagcttttctaactgtcactgcaccaagctctgctggaggagtgaccagactcacgatttggtatagtggggctctcaagcatcttcaatttgaatgtacatgctgctgaggagccggtgaagtcatcagttccgcacatcccttctaccctccaactgcatgggaagccaaagtcctggttttgaaatgcttgggcagctcagccgcttgccctcaccctgcatgtcttgttactgggtctccctgtgtacttgtggcattatccacaaccatcatgtttcttaggtgccaaacatttacagaaacattttcatatatcttggggtcagagaaagggacagatacagaaggaccttgcttgcaggaagccatgcagttagtttctgcagttagtcgtgtgaggctaggtggttgggcaggcctcgggctgtaggtgttgggtgggaaaaagacccaagggcctgaaagggagggaaaggggagggtagcgggagggtagcaggtgagttcctagggctggaaggtttagcagcagcctggtgcagtgccctgtcatcaagacaaacccacggtcctcctgggtgcctaccaagcttggtttgtacaaaagcaaggtgggagtctatttttgtacatgagatacatcacacttacctgtgggccagtattgtgaagtgagtctgagttgtttacactgatgccttccctgcccaccacaaattgtgtacatagtcttcagatgataccacccctttccccagctcccaaccaagagctggttctaggcctgtgttatatgtcatatttagcgtttttatatatgacctttgatttctgttgtttgtattttagcacagtgtatgcaccttcatttaaatacatctgtgtgcatacagatacgcatatatgtgtgtgcgtatgcatatatctctcatctgtagtttccaagagttcagctgaagcagatggagtcctgcagcccaggagacaccctgcatccctgctaatagtgtttgccacaagtattagtgagtcttccttattaatattttcatttcagaagactgaagcaaagctgatagtgtttgctgtttctttggcagctaagtgagggtcttgggatgacttgctgtgttcctcaagctgcactttggggccatctctgcagtattagccccctttttgcttggtggtactctgtctgtgcctgtgtgtgtgtgtgatagtcactcttgcatggcttccatgtctggtttgtggcatttggggataaggtgctgaagccagagcatttgcagtttgtttgaggcctcgttgccaatgatagatcactcctgttgacctggtatgtctgcttgcttgctgcttttccttgctttctcttggaagaggaaaggactctggtcaggcccaggctgagtgagatgagctgcagctggct

SEQ ID NO: 32025 - DNA, 1109 bp, Homo sapiens
cctccgcctcccgggttcaagtaattctcctgcctcagcctcccaggtagctgggactacaggtgcatgccaccatgcctggctaattttttgtatttttagtagagacagggtttcaccatgttagccaggatgggtcttgatctcctgaccttgtaagccaccgtgcccggcctattctttattcttttgagacagagtcctgctcttgttgcccaggctggagtgcaatggtgcaatctcggctcactgcaatctcagcctcctgggttcaagcgatgctcttgcctcagcctcccaagtagctggtattacaggtgcccaccaacacgcccggctaatttttgtatttttagtagagttgggacttcaccatgttagtcaggctggtctcgaactcctgacctcaagtgatctgcctgcctcatcctcccaaagtgctgggattacaggtgtgaaccaccacgcccggccaggattctgtttttaaacttatttcagtggattattgatgatcatctcacattttgcagtaaggttttttttaggccggtggctacatagtggctcatgcctgtaatcccagcacttagggaggcctaggagagtggatcacttgagcacagaagttcgagattagcctgggcaacttgggaaaaccccgtctctacaaaaaatacaaaaattagccaggtgtgatgggacgcgcctgtagtcccagccacttgtaaggctgaggtgggaggattgcttgagccctggaggtctagggtgatcacaccactgcactccaacctgggtgacagagcgaggctccatctcaaaaaaacaaaaaagatttttctaatgtcattccacaaggatagcttatactgctattttggctgtgcctatctcagagcagaatgggcggaagtccttttttccatttttttttttttttaatgagactcttctgcctgtattgatttttagttaagtatgtcatttctacttttcatgcctgtatttcagaagtggttttctaaggaagcagtgtagttaatgattttggaaaagaatgtaaaaccttaggatcctgaggaaacatgtctatgtgatcatccgaa

SEQ ID NO: 32026 - DNA, 1045 bp, Homo sapiens
aatccccagatttacttttacttcccacctaaccttgccactaggtgttctaaggtggaaagcttcttcagatggctgttgcttgagcgttgttttttcccttttggaagaagttgtttctttccagtgttagaacttaccaaaaatcctcacctttgccacatcattcaagtgcttctctttatgtggagatcccagattttgatgatggagaatgttcatgattttctgtctctattttcttatcagaccaaagagaaccctgtacagtaagaaatatggtgtggacctcatcagatacactcatgcagcaaacacagttgtttacagctctaacaaaatagacggtaagcaagcctttttaggaagttaaggtcatggtttcctttgttaaatagttcatggaatctttgtgactacttctgctttgtgactactttagtttaagtattttcatataatgttagtaatgttaattgcattgttttgactgaaggaatgctggaagcaagccattggcacttttgaaggacttgggactgagtatgaaaagtcttcaattcagagtggggagtggaaaaaggaaacaactaattgtgtttatgatttgtacttcctgacacttaaaagaacgcttttaaagccgggcgtaggggctcgcgcctataatcccaacctttgggaggctgaggtgggcggatcactgaggtcaggagttcaagaccagcctggccgatatggtgaaaccttgtctctactaaaaatacagaagttagctgggcacagtggtgcacgcctataatcccagctacacaggaggctgaggcaggagaatctcttgaacccgggaggcagaggttgtggtgagccaagatcacgccattgcactccagcctgggcgacagagtgagactccatctccaaaaagaacacttttagaacaaataaaaggaaagaacacttgatacacagcaagtgataaacaacaggactttttcttttaaaatgatagagatttgagaaaagtttcacaaatgcttgaact

SEQ ID NO: 32027 - DNA, 1046 bp, Homo sapiens
cttctgatgaagattgacgccttccactacgtgcagctggggacagcctacaggtcagtcggctctgccccaaccccacccccgccccaccctacactgctgttctggctcaggactaccttggactgatggtatcttgggcctgctcaggggcctccagcctgtgccagacgaggaggtgattgagctgtatgggggtacccagcacatcccactataccagatgagtggcttctatggcaaggtactccataccccagcagccagcctgccccatggacatgtgcccatgtcccaaggcagatttggggccctcgtctccagcactgaaggggttggggtcccaaagggtgtctgagacaatggccccctccccagggtccctccattaagcagttcatggacatcttctcgctaccggagatggctctgctgtcctgtgtggtggactactttctgggccacagcctggagtttgaccaagcacatctctacaaggacgtgacggtgaggatgctgggcctgccctcggatggcaggaaagactaagtccagccacagtgggacagccccacctgggccctgctgtaccctcattgtcctccactgcccccaggacgccatccgagacgtgcatgtgaagggcctcatgtaccagtggatcgagcaggacatgggtaagtgtggacagaagccctgccgtggccggcctgagcaggtggcaggactgaccctcacagactcatctgccccattagagaagtacatcctgagaggggatgagacgtttgctgtcctgagccgcctggtggcccatgggaaacagctgttcctcatcaccaacagtcctttcagcttcgtgtgagtccagcccctgtggatggagggacagcagggccagggctctgggtggggagggcaggcacggagccgccctcagactacttgccacctgaaactcctccacacagagacaaggggatgcggcacatggtgggtcccgattggcgccagctcttcgatgtggtcattgtccaggcagacaa

SEQ ID NO: 32028 - DNA, 1116 bp, Homo sapiens
gagaagggaatcataatttaataaaacgcttactagaaagaccattacagatcccaaacacttgggtttggtgaccctgtctttcttatatgaccctacaataaacatttgaaggcagcataggatggcagacagtaggaacattgtttcacttggcggcatgtttttgaaacctgctttatagtaactgggtgattgccattgtggtagagcttccactgctgtttataatctgagagagttaatctcagaggatgcttttttccttttaatctgctatgaatcagtacccagatgtttaattactgtacttattaaatcatgagggcaaaagagtgtagaatggaaaaaagtctcttgtatctagatactttaaatatgggaggccctttaacttaattgcctttagtcaaccactggatttgaatttgcatcaagtattttaaataatattgaatttaaaaaaatgtattgcagtagtgtgtcagtaccttattgttaaagtgagtcagataaatcttcaattcctggctatttgggcaattgaatcatcatggactgtataatgcaatcagattattttgtttctagacatccttgaattacaccaaagaacatgaaatttagttgtggttaaattatttatttatttcatgcattcattttatttcccttaaggtctggatgagacttctttggggagcctctaaaaaaatttttcactgggggccacgtgggtcattagaagccagagctctcctccaggctccttcccagtgcctagaggtgctataggaaacatagatccagccaggggcttccctaaagcagtgcagcaccggcccagggcatcactagacaggccctaattaagttttttttaaaaagcctgtgtatttattttagaatcatgtttttctgtatattaacttgggggatatcgttaatatttaggatataagatttgaggtcagccatcttcaaaaaagaaaaaaaaattgactcaagaaagtacaagtaaactatacacctttttttcataagttttaggaactgtagtaatgtggcttagaaagtataatggcctaaatgttttcaaaatgtaagttcctgtgg

SEQ ID NO: 32029 - DNA, 1050 bp, Homo sapiens
tctttttgcattttgaatgaagtaagagggattctggaattttcattgatttagggtggtttatggtcagtattgaactgctcagcttcaggaaacctggttctttcagtacattgtccattgctacatacgtgtttatttaattctctgcttctgatgattgtagcctgaagtataatgcatttttttcctttggggtttattaaacatgacttctttgcttcattagaatgtagaaattagttgtttccctaaaaccttctgaaggaggcagtcagctacttttcccttacagagttaattttcttcagctgctaaactccatgacactcgtgatgagtcctcaaatcttagtaaaattgggtacaaagaatcaggaaatatatatagtaagtaacaattgtaccaaaaattataatgggccatggaattgcttcatattgaaattataaataatctgtaatgctattaatactagaataatggtagcgcttctcatcttcagggtgcctcgtgagattaaccatggtggttatgctggtgacgtgtttacataaaacctgtgctttctgaatgtgtgttgcagtcttaacattcttgaaatctttgcagaccagttctcaagatgggataggaaagctggactctaggttaccaagtgaaatcggcccgactcctcctgtgttgagactagtcatctactgttccttccattgagacagaactgttgcctgtgtttttactagtcctgttgaatgcaatggatggtattttgaattcctgggttaaaaacagaattgaaaatctgaaatgcctttacagagcgggcagctaaagttgctgagcagcaggagagagagcgagcagcacagcaacagcagccgagtgcttctccccgagcaggcacccctgtgggggctctcatgggggtggtgccaccaccaacaccaatggggatgctcaatcagcagttgacacctgttgcaggtaaaaacaggagctaagaccatttttttccactttaagaaattccttcattttttttttctc

SEQ ID NO: 32030 - DNA, 1231 bp, Homo sapiens
tttttttttttttttttttttgagacggagtctcactctgtcgccaggctggagtgcagtggcacaatctcgactcactgcaacctccgcctcctgggttcaagcaattctcctgcctcagccccccgagtagctgggactacaggcgcgcaccaccaaacccagctaatttttatatttttagtagagacggggtttcaccatgttggccaggatggtcttgatctcttgacctcgtgatccacccgcctcggcctcccaaagtgctgggattacaggcgtgagccaccgcgcccagccacaatcctacaatttatatggaaccataaaagactcagaatagctaaagttattttgagccaaaagaaaactggaggaatcacgttacccgacttcaatttatattatagagctatatagtatctgaaacagcatggtgctggcataaaaacagacaaatataccaatggaaaagagtagagaacccagaaacaaatccatacgtctacagtgaactcatttttgacaacagtgccaagaatatacattggggaaaggacagtctcttcaataaacggtgctgggaaaactggatatcagtatacagaataatgaaattagccccgtctcttgccatgtacaaaaatcaaaatggattaaagacttaaatctaatacctgaaactatgaaactactggaataaaactggactaggcaaaaatttcttgagtaattccccacaggcacaggcaaccaaagcaaaagtagataaatgggattacatcaagttaaaaagcctctgcacagcagaggaaacaaagtgaggggacaacccacagagtgggaaaaaactatctgcaaactaaccatctcacaatggattagttaccagaatgtatgaggaactcaactccttaagagaaaatctaataatccaattaaaaagtgggcgaaagacctgaatatacatttcccaaaaggagacatacaaatggcagacaggtatatgaaaaggtgctcaacatcactgatcatcagaacaaacaatgagatatcatatcactccagttaaaatggcttttatccaaaagccagggcctgatactagtaccccagagttggggcacacagtccaggagtcctgagctgagccttggccccctaaaatcctctagaaactaagcccatcaactgaacccatcttataccacaatcaaacacccaaggtcat

SEQ ID NO: 32031 - DNA, 1054 bp, Homo sapiens
atgcagcagaaactaaatgaggtctatgaagctgtaaagaactatactgataagaggggtcgccgcctcagtgccatatttctgaggcttccctctagatctgagttgcctgactactatctgactattaaaaagcccatggacatggaaaaaattcgaagtcacatgatggccaacaagtaccaagatattgactctatggttgaggactttgtcatgatgtttaataatgcctgtacatacaatgagccggagtctttgatctacaaagatgctcttgttctacacaaagtcctgcttgaaacacgcagagacctggagggagatgaggactctcatgtcccaaatgtgactttgctgattcaagagcttatccacaatctttttgtgtcagtcatgagtcatcaggatgatgagggaagatgctacagcgattctttagcagaaattcctgctgtggatcccaactttcctaacaaaccaccccttacatttgacataattaggaagaatgttgaaaataatcgctaccgtcggcttgatttatttcaagagcatatgtttgaagtattggaacgagcaagaaggatgaatcggtatgttttcaaagccatttttattttgaggatatgtgctatttaatacaaaacagatgaaagaatattgctttgatgtactatttccacttacatacatgatttgtagttggtagcatgctattctgaattctaatcagccagaacttcttaagagtgagtatattctgtgggggagagaaggcacaccactaagtcatctagtttaaggccagtgaggaggaagacaaaattgaaaatctcttgaaaagcataaacttaaaatacagcctttcatagaatgtgttttttaaaaagataaatgtttctaattggaaatagtaacagcgtttttcttttaaggtttggcttcagtgcacgaatgctttaaataaaatagctctaaggtgttgtcctgaggttagactgatagaaatttgatcaccattttaagtacctcagagggtttcttttttttt

SEQ ID NO: 32032 - DNA, 1064 bp, Homo sapiens
agtactgattaggtgaaaagtgaagccttaagcatgtgaaaaaaagtctttattggggtgccagtttattttatgaataaagaaagcagtacagtttaaaaaatcttgttagcaaaataaattcagaattaacctagttcagaagtagccttaatttgttgctagctttgccagggacagaaggccccctcaccaatcattgtggctgtgtttctgtagcaaaaggtagaaggtggcagtgctggtgcaggactggcaggtgctgattccctttcagggatgccttttacagattgagggtggtggagggatcaaaatcagcttcacagtctgagtgacatcagtgcatgtggacacctatgcattgggtcagtgcttcttgagcatgaatacatttcctcagtctctgatcttgttcatgtcttttataaaaagcattcttttgcatgttacttatgatttgaaaacaacctatgtaataattgtgtagtgcttttgttttcacatttgccgtctgacattcacagagtatcagttgcttatagaacactaaactctgctcttacagtttataaaggagaacatttagtcatctcttttacctgccaggaacatataggccaaggaaagaggcaggttgaaaacaaatgaagtcatttggaagcaaggtagtaaaataattgcataaggtacactactaagcagttgtataggatcattgcatgattgcccagatagctttaggaaagattattttcctaccatactttcccttgaaagttgaatgtcttgagcttccccaaatgttactaccatatgtattccactcagtaaaattgctatgttatcattgtcatcttcctaatattttcctaaagaaaagttttcttaattaaatggtaaatttaagaaaaagaccatggattgtattctttcatatcattcataatgtatggcattgaaactaggtggtagtggaaataggaatagggggcatcactgggtagtgttacaaccctgagttctagagcctgactgcctaaattccaatcccagctgttctt

SEQ ID NO: 32033 - DNA, 1026 bp, Homo sapiens
ggcacctcattaggttcatataggttgttctagggatacaatgcctatgtccagcatcagaacattatggggtattcttgaaatttggagttaaaataagtactgcttagaagttgctttctttggccaggcacagtggctcatgcctgtaatcccagcactttgagaggccgaagtgggcagacatgaggtgaggagttcgagaccagcctggccaacatagtgaaaccccgtctctactaaaaaaataaaatttagctgggcctggtggcgcatgcctataatcccagctactcgggaggctgaggcaggagaattacttaaacccaggaggtggaggttgcagtgagctgaaattgtgccactgtactccagcctctccatctcaaaaaaaaaaaaaaaagttgctgttttgaattagctctacaattttagaagctatgtaatattcagcattttattatttctcttagaaagtacttttttctccacattaccagtcttctccagcttacttgaaggagatcctggagcagcttcttgaagccatagttgtagctacaaatccatcaggacgtctcattagcgaactttttcagaaactgccttctaaagtggtaagtgatgcagttaaaaacaggtacatgtcagtgttttgtttttagtacttcaagaattgtattaattactgataaataaagtaagttcaaaaggaagatgttgggccgggtgtggtggctcatgcctgtaatcccagcactttgggaggccgaggcaggtggatcatctgaggttgggagttcgagaccatcccgatcaacatggagaaaccccatctctactaaaaatacaaaaaattagctgggtgtggtggcgcatgcctataatcccagctactcgggagggtgaggtaggagaattgcttgaaccctggaggcagaggttgcagtgggtgagccaagattgcgccattgcactccagcctgggcaacaagagcgaaactccgtctcaaatttaaaaaaaaa

SEQ ID NO: 32034 - DNA, 1021 bp, Homo sapiens
gggtttcaccatgttggccaggatggtctcgatctcttgacctcatgatccacctgccttggcctcccaaagtgctgggattacaggcatgagccactgtgcccggtcataattacttttaatttagcaaatcatttgtcttctgcctcaagtctttctttaatgagataagacctaaataatttgatttcagaatgtctttaaaacatacacttaattttttggaagcgggatttggacccatatatgttttaatcatgaggatgttaaaatttgtaacaatttttggtctttgctgaaacaggtgctttaaaagtagcaactaatttccaatacattactaaagtgtttttttttttctctttgctaacatacagccagattctcctgaatataaagccgcttgcaaactctgggatttgtaccttcgaacaagaaatgagtttgttcagaaaggagaagcagatgacgaagatgatgatgaagatgggcaagacaatcagggcacagtgactgaaggagtaagtgtgtagctggaacttgtgatggatgggctcttggaaggcagagagggcccctgcttgtgattccctctgggctgttgtgggcaactagaattcctgtgcaattgtattggtaactgggaggataaaaggacattcagccagagagccccactccatttttaagggatcctaggatatcctggacaacgtgtgccatgtgtggtaattttcatgaattgtacttacattaatgcatatttcctgctcagttttaaagagaatcttgatattatcaaggattagtccagtattgctacattgagacatcatgtaaggaaaggcagtgttgtgattagaagttggaatgtaatcaccttagtgaggaatatttctgtaggttagaatagttactgttcctagaacctcccaggtgtgtttctgcctctggaattttgcagttgttcttctgcatagaaagtgcttcctttgacttttcccgtgactggctctttttt

SEQ ID NO: 32035 - DNA, 1030 bp, Homo sapiens
ttccttttccagttaacctttgcaaggttctacttgccaattctggttcccagcgcaaagaaggccatatacatggatgatgatgtaattgtgcaaggtatcaaaaatgtcaccatgagtgctgttctccacccagattgggtacaattgctaaataaaacaatgggctacagtgggctgtagtggtttatttatggtcttctataaaaggtcaccatagggagaagtgggagtaacagggaactctcaaggcaacggaaatgtaaatcttaacatcttgtctatttcaggtgatattcttgccctttacaatacagcactgaagccaggacatgcagctgcattttcagaagattgtgattcagcctctactaaagttgtcatccgtggagcaggaaaccaggtaaattgcttaccaaacacccctcttcctacaatattgtttaatgggaagaggttgcaaattcagggaactcttttgctgcaatttacactccccaatcatttcatcccaaaactcaagcctgcttttctgtagacttcttcatggacttgacagcctaattgttcttgaacatctggtttattatgtcaacatctaggttcctattctaacttggaatttcaaatatttattttctaatctgaagaagtcagtttaacagctcttctctctactggctataaaattgtatctattttgtttgaagcagtaagtacatatatcctatttgtgtttttagtacaattacattggctatcttgactataaaaaggaaagaattcgtaagctttccatgaaagccagcacttgctcatttaatcctggagtttttgttgcaaacctgacggaatggaaacgacagaatataactaaccaactggaaaaatggatgaaactcaatgtagagtaagtatgtaactggcctagctgtgaaaaactgttgtatttcaattcctagagtcttgactaacaggagttagtcagtacttttcactaacaaacatttgttttctgtcccaccaagag

SEQ ID NO: 32036 - DNA, 1058 bp, Homo sapiens
atgtagagataaaagcagtaggagaaacaaatgacataatatgtcgtcataattcctgctattgttaataaccttaaggagtagttgataaattataaaattttaaaaagtcaattcagttctagaaatagatttaaagaatatgaagttctatctagtacttgagcagctgtatttcttttctacacattgatggacttttaatattttattctcatttaatataaacctcatctagggtatatacaaattaaaactgagacacattggctttgtaaatcagtatgtttttacataatggttttgttagatttatttttccatcagtgaaaacatttcttaaacacaaatttcatttccatttaagcaatttgtaagcaaagtccaggtccatttagtttttggatatatttaatgtttgtctcctgaagtttgtcttcatgtactgtaagatattagttgtctttccatgttttaaatgtatgattatatagcacatattttattagttgtttaataagaggtaatacccatctaggaaagaaattttatgaagttaaatacaagtcttgaatagtacattttcacttctgtattcgagggactctaaaaataaatattgctccagaaatgttttcaggtgttttttttttgagacagagtttcactctgtcagtcaggctggagtgcagtggcatgatctcaactcactgcaacctccacttctggggctcaagtggtattcctgcctgagcctccctagtagctgagaccacaggcgtgtgccaccacacctggctagtttttgtattttttgtagagacagggttacaccacattgcccaggctgatctcagaactcctgggctcaagcaatccactcacctcagcctcccaaagtgccaggattacaggaatgagccactgtgcccagccctgttttcagtttctataactaaaaatatatctatctttgaaaattacacacacacacaaatactctaatgaaatgttccctttacagccacttaacaatttttttttttttttaagacaca

SEQ ID NO: 32037 - DNA, 1031 bp, Homo sapiens
agtgatctcctgcctcagcctcctaagtagctgggattacaggcatgtggcaccacaccagcaaattgttatatttttggttagagacggggtttcaccatgttagccaggctggtctcgaactcctgagtgctccaccgcctcggactctcaaagtgctgggattataggtgtgagccaccgcgcctggcctaaatatgccatcttgataaagtctgtgccctatgaatattagtccaaaccactttaatacagagggataagatggctgcacatagacacctaataacgtctgctccgcaaccaaggtaaattcagcaagaagagagtatttcaggtggacgagtctgtaggaagcatgcatgccatttgttgactgtgctgctgggacaggctccgtaggcttagttatgggcaaagcatttttgggaatagaaggcagctgtttctttggcatagttcatcaaagactggtttttgcatcccctgccaatgttttcagcttcagatcgtttccatgtagagcttgtagacatgctccagaaagagtacataatgtgtactccaaacaaagaaattcagtagtatgtcatcagactcttccgtcctcagcattcaatttaccagccttccgggcattgtgcctcacctctgtgccttcaatgtagagttcccagctgcctatcacctttgtggcccagcggcatctctggccacagtgccagtcctgcccctgcttgctccctgccctgtcctggcttacttcttttcttttctgagacaggatctcaactgtgtcaaccaggctggagtgcagtggtgtgatcacggctcactgcagccttgacctcccggctcaagcaatcctcccactcaggcttccaagtagctgggactacaggcacttgccaccatgcccagctaattttttggtattttttatagaaatggggtttcgccatgttgcctaggctggtctcaaactcctgagctcaagtgctgggatgataggtgtgagccaccacacttgg

SEQ ID NO: 32038 - DNA, 1050 bp, Homo sapiens
tgttttgataatgtggttttgtggtatgttttaaaatcatgaggcatgagtcctccatctctattcttctttttcaagattgttttggctatttgggatcccttgagattccactgaattttaggatggatttttctatttttccaaagaatgtcattgggattttgatagggattagattgaatctgtagattgctctgggtaatattaatatattgacaatattaagcttttctcaaggagatgcccaaatgtaaaaagagaaaaaaagaaagaacaatgttaagtctttcaatccatgaacatgggatgtgtttccatttatttatgtcttctttaaatttctttcagcaccattttgtagatttcactatgtaagtccttctttcgccttttggttaattcctaattattttattatttttgatactattgtaaattgaattgttcttgtaatttgcttctcagattgtttattgttagtgtatagaaatgcaactgatttttgtatgttgactttgcctcttgctaccttgctcagttcgtttattagttccaacagtttctgtatgtggaatctttagggtttcctagacacaagatcatatctgcaaaaggagataattttacttcttcttttctaattttgatgccttttattttttttttccttgcctaattgctctggctagaacttctagtactatattgactagaagaggtgaaaacaggcattcttgccttgttcctgatcttagaggaaaagctttcagtctttcaccattaaatgtgatgtttactgtgggtgtttcatatatgacttttattatgttatgaatttttttttctattcgtagtttgttgaatttttttttaatcatgaaaaggtgtttttttttcacagccctgaaaatcatcacataagggtgttgatgatcatgtgttttttttccttcattctgttaatgtggtctaatagtacatatgaagcatataattcattgtccttaattagattcacagtatcatgcagccatcaccactatcttc

SEQ ID NO: 32039 - DNA, 1050 bp, Homo sapiens
ttgggaggctgaggcaggcagattgcttcagctcaggagtttgagaccagcctgggcaacatggtgaaaccctgtctctcttaaaaataaaattagctggacatggtggcatgtacctgcagtaccagctacttgggaggtagaggtgggagaatcacttgagccgaggaggcacaggttgcaacgagctgagatcacaccactgcactgcagcctgggggacagagtgagaccctgtccctgccccaccaaaaaagagaaagaaaaaaaagtgatggggaaactagacatcattaagttaactttggtcctattttaccaatgaggaaactgaaatcagaagatttaagggccttcccacccaaggccactccgtgacttcctggacaagaggggaagcccagcccactccccaccctgactactgaggttctgtgcacacgtctctaccttcctgctcaagacactgggtctttccacagcctgaagatgaccatggacaagacgggtctcctgctgctcagtgacccagacaaagtgaccatcggcctgttgttctgggatggccgtggggaggggctccggctccttctgcgtgacactgaccgcttctccagccacgttggagggacccttggtactgagcccattaccggggcccaggccttcctcagaaaccagctgtgcttgggaacaggcagcgcccctcccctgcgtgtgtctcccaggcttcctctgtctctgacccttactgatccaccctttgtatctcaggccagttttaccaggaggtgctctggggatctccagcagcatcagatgacggcagacgcacgctgagggttcagggcaatgaccactctgccaccaggtgacttggcacaagcagaccgctgagcccagctggggtggggtggggactggcaggccaggagccaggctctccagggccccactcctgtccttgcccaggaactagacacagtccggtggaaggttgatgctgtagaagtgtctaagccagctttcagtgaccccacaaaagatgga

SEQ ID NO: 32040 - DNA, 1050 bp, Homo sapiens
acccacttcctcactcaggctaggaatgtctttcctgagggcagggagcaccaattctccatcttacccttggccgcggcatctagctcagggccaggcgctccatggggcgttctgaaggcttattgactggagacaagttaattctcaaaggcctcaactgagggtggccgtcgccgaggatttaggggcccctccaaagccttagacaccaagggacaagtggagagattgtgggagccagcccccagtgtgaaggagtgctgagaaaggggcacccctcctgatgagggagggagctgctgcagaactccagggggtgtgatcaggggggactccccatgcaggtcggtgtcagacctggctggggcccagctatgacctctctggtctggtcctcccaggggttgaggtgactggccagtatgagagggagaaggctgggttctcatggatcgaagtgaccttcaagaaccccctggtatgggttcacgcatcccctgaacacgtggtggtgactcggaaccgaagaagctctgcgtacaagtggaaggagacgctattctcagtgatgcccgggtaaggcccaggctggagcccggggcaggggttgacctttcaggctacagtggctgatgatggtaccagcaggtggcctgaggccatggacctgagaatggagcagctacactcacaggaggggcaaagagacaagagccctgccatatacccctgcagctccggagggcactgaggagttgtcccagggacctaacccaggtcactatcccatgcaggagacagtgtggtttggagctagctctgctgctaatccttgtgaccctgggcaggcagctaagtccctctgagcctcagtttcttcaccaataaccagtactaatcatcctggcccagagtcagaaggctggggggagaacccaatgagagagtgtagttgggagcactttgccgtcagatgatacagtgccccccaagcaccccacaggacagcgctgcctacatagtgacgtgatgttctgatgacaatag

SEQ ID NO: 32041 - DNA, 1092 bp, Homo sapiens
tgcattcaggcagccgcatgcagccgagcagagttggtgcagtgcgcatgagcatgtcacacacaagcaggtaagaggtgcccgtgtgcccctcctcgggggacacagacctcaaggcaaatggcacctgctaggggagtgccctgcggaagtggggatgagttggggagggtccactgcggagcagagaggaagattcccaactctcagagaccagactctagtctacctccgaattctcccagctctgagggcttccttctaggagactggtgggagcttccctgttgccacagaggccaaagtctccagaaatcaaaggacctggtcactgccctttttctgggcaaagctaagccagcatgcaaagctccctgaccccaccaggtctctcacccctgcccaaaggctgagtgtgatgcccctcccagacactggccctggcttcaccagctccaccccctgcatgcttgttcttctccaaggggtgctctgggcccctatagatcaagaaggacgtggcccctgccctgtggtgctgtagggtggggaatgaagcacactgctatctcttacctgagacaaatgttcacatatgagatgcctcactgggttcagcctgaggcctggtcagtggctcagtcagattgggagccagggtttggtctagagccagagtcagggccaactcttgaagagcgtcaccccgagctgaggtggcattgaaaccctgcaacccccttcttctttgctggtccagaatggcatcgacatctacagcctcaccgtggactccagggtctcatcccgatttgcccacacggtcgtcaccagccgagtggtcaatagggccaatactgtgcaggaggccaccttccagatggagctgcccaagaaagccttcatcaccaacttctccatgtaggtgccttcccaccctcctcccctctccacaccccccagtgctatgactccatcgctctgtgccagcaaaccctcttcttgaagtaaggcatgccagggtgtacatcttcaggagtacaccctgcacctggggccacacaggaacaggggcttgccaaaggacttatt

SEQ ID NO: 32042 - DNA, 1049 bp, Homo sapiens
tagggctcttgcaggaatcactccatcagccttggcttccagctctgtgttcgggaacctgacctgcacttgaggtgtggctgctaccctccatcagcctccgcctcaggggtgtgtggggatgaggatgtgttagaaagggtggcttatgctttcctggctctggctccatctgagcaagtcccctccatcctgcaaagcaccactaatgaagaaaggtctgtggtcctaggaccctgcctgagccactctgagcatggtgtggcttctgcaggagcagctgccaggcccacgcagggcacaactgtttccgtgggacagggtgcctggcttactgtctgtgaggtacacagagacccctccttgtttgttgcctggagataagtacccccgccaccacgtggaacagtgtaaactcccacctcccgagtcagccccagccatcctttcttccacaccccacgtccactgtcagcagagccttcagctcaacatttaagacccaaccggaatctgacctcttctcccctctcctattgccccggtcagtgccagcatgtggtcctagttactgcggggggtgaatgggagtgggtggttgtctctagtgggctccctgctgccataccatccctgtgggctgctctcagcacagcagctggagggagcctgctgggctgtggctacagctgcctggccaccacacacaggcccacgtggagctcttagcctgggttctcggtggaggtccagctgcctctcccgcacgccctgctgttctgcctgctgtcctccagccctctgcctggacggctcttcccgagaccctcgtgacttggcctgcaccttcctcgggcgtgggctctccttcatacctcctcattgacagttcagaccccacgtgccagccctcttctctcttcacctgcctctgtgtttacctccatgcttggcactgtctgccatgctccatatgttattcctctccctactagggtgtgatgaaggcaagggttttgtgcatttcatctcctgctgaatggggcttg

SEQ ID NO: 32043 - DNA, 1049 bp, Homo sapiens; identical to SEQ ID NO: 32042

SEQ ID NO: 32044 - DNA, 1049 bp, Homo sapiens; identical to SEQ ID NO: 32042

SEQ ID NO: 32045 - DNA, 1049 bp, Homo sapiens; identical to SEQ ID NO: 32042

SEQ ID NO: 32046 - DNA, 1089 bp, Homo sapiens
ctttaggccattaagttttgtagtaatttgtgacacagtggtacaaaactaacatagcaaagctgtgagagaagttaggaaacttgattcctgttctctaagagtccatagcctgcttaggaaggtagaccacttgaacaagtaactattctaggcttgtatgcaaagtgagcaaagactgattcaggtatatttatctattgggcttatcaattggatttcatcagtgagcagggctgtcggaatcccagagtggtttgtagcattgctattcctcctgagttctttcttatttatttatttagagacggagtctcactctgtcgcccgggctggagtgcagtggtgcaatctcagctcactgcaagctctgcctcctgggttcacgccattctcctgcctcagcctcccaagtagctgggatacaggcacccaccaccacgcccagctaatttctgtatttttagtagagacggggtttcaccttgttagccaggatggtctcgatctcctgacctcatgatccgcccgccttggcctccgaaagtgctgggattacaggcgtcaagccaccgcgcccagccctcctgagttcttgaagatagtttaaacaggctcagataccagcaaacctgtcatccagagtaggagttagctactttttcagtcttaaggatttcagagaggcggtttgtcatattctttttttttccacattttctattatgtttaattgcatatgtgccttacccttagcaagcctacctgattgtcaccgtttacattttttttttttttttgagacaagagtttctctcttcttgcccaggctggagtacggtggcaccatctcggctcactgcaacctttggctcactgcaatctctgcctcctgggttcaagtgattctcctgcctcagcctcccgagtagctgggattacaggcatgcccaccacatctggctaattttgtatttttagtacagacagggtttcaccatgttggtcaggctggtctcaaactcctgacctcaagtgatccacctgccttggcctcccaaagtgctgggattacaggcatgagccacc

SEQ ID NO: 32047 - DNA, 1089 bp, Homo sapiens; identical to SEQ ID NO: 32046

SEQ ID NO: 32048 - DNA, 1089 bp, Homo sapiens; identical to SEQ ID NO: 32046

SEQ ID NO: 32049 - DNA, 1089 bp, Homo sapiens; identical to SEQ ID NO: 32046

SEQ ID NO: 32050 - DNA, 1084 bp, Homo sapiens
attattcaggctcagcccgttcctagagaaaggctgactctaaatggtcaagtaagttgagtttcccttaatatttcttgcattctcctattaaggcatagtttattaggcaattgcataaagaattatatcccccagcgccgactcccgtatattatgtaagcaaggataattgggaatttagcacagggcacttttttaacttaaagtttggacttaatttacctcacaaagctgctgggactgggctagataacaatgatgttctggttactgtgatgctgaaacagatttcaagccagataatagctcaccatgttggggtaaaatgttggtatgttgcacacaggtgcaagaactttgttttttagagagaccaacttcttaaatgtgtaacagtcacattgtgaagggactgcatttgtctggatttcacctgcagctgggcccacagcctgcctgaggtcagaaaatttttcatgacccattttttaccctgaattgacaagtttagaaaacaggttaatggactacttcatcctcctggaccttgaaaagctggctgaccaatattagactactactgctcaattagtgtgctagggaaacctttttgctgcacatgcagatttttctgtgacattttgactagattttgagggcttctggggactatgctgttttcctttgtacaccatcttcatccttctcatttgaagcagagttgaagtggctaatgcagggaatgcatttatggaagcttgcacgctatctgcctttgttcagcaatgcaggtggctcctagcatttatctatgttatagatatgtgaggtcagggaagggtacttactaacctctggaaaagatgagcttcttgataaatatttattgacttatggtagaagcaaacatagaaaactagttcagaacttagccttaatatgccttttctcctggaagtaaaatattctcactgtgagagagaagacattggaccttagcttccagaggacctggatacactttacttgctctctagtaccaattcagtcacgaatgtggtacctgaatacaatttaaaag

SEQ ID NO: 32051 - DNA, 1078 bp, Homo sapiens
agtgtctctgaagagcagcaatgaagccacactagttggggaggtggaaataggagaggaggtagttgcaacctcaccttgaactgtcatagcacctattcgctgtccttgcttatcttctttgagaaactggggcaggggtcacataggatgaaatttacaatttggagccttgtcaaggcattgccacccaaagacaaaattctgatcctacctttccttaaatcctacaagccctatgtcacttgggagaatcactacagaggaggatttttaccttgttaaaatggaaagatttcttttagggatctgtgcctcttaaactatagtgcatgcagatcactgaaggatcttgttaaaatggagcttctgatgtatcaggtctgtgggtatctgggtcctgagtatctatctgcatttccaacaagttcccagatgccactgatgctattgatccaaggtccatacttagtatgacgagctttctaatcagtatttaaattacaaaatcttataagtctaaccttctagtttctatttatatttattggattgtaaactccttaagagtaggaattatcttagcttcttgtatcagactcagcacttagtttaggaaactgcaattattaggagctgagtgaaaaatactattcatgtaaatgcatatataagcacactactctgaaggaagatatgtgaggggaagatatgtggattttattgtgccttttgtctgaatttatctttcacaataatatagttgaaattagcctagaatttagaaggacagttataatttttcccagttagtaatttgaatgatgtcaaatggattcgtatcctttagaaaatttccatttttttcacaaaattgtattatattttgatattactttaatacataactcagctagaatatgtatgtttcatttctggaatgtatattctaaaatttatatgaaaatgcagaggatctagaatagctgaaacaatttggaaaaaagaataaagttggaagacttagtctctctctttttttaaccataaagttataataatcaagagtgtggcatta

SEQ ID NO: 32052 - DNA, 1068 bp, Homo sapiens
tgggagccctgaagctgatctaaccactcagagttgatcctaattcaggtgtggtggccacactttactgaccagttattggaagtaagccactgctccctccccacctcacaaggggcaaggtggccctctcctgctgagagcagtacccagttcagggtgattccagaatagacataaaactgggaactgtaagctgccaacatacccagcagcaggggtatgagtgccttaattctgaaaagaggcatttgggttgcagggttcaactggaaatgtgagcaccagcatactggccactatgatagaccatcgtttttttgttttgttttgttttgagacagggtctcgctgtgtcatccaggctggagtgcagtgcagtgatatcagctcactgcaacctccacctcctgggctcaagctgtcctcctacatcagcctcccgagtagctgggactacaggcatatgccaccacatgtggctgatttttttgtttttgtttttgtttttgttttttgtagagatggggcttcactgtgttacccaggctggtctcaaactggactcaagcgatgtgctcccccgttggcctcccaaattgctgggattacgggcatgagccacaacacctggctgtgactattcttaattaaagagaaaacattatgaactgcaggatcctatcaacaatgggcagtgtgcgcatatctttccttaacattggattaacaggcatatctattagaagagcttctctgtgctttatagcagtattttagtgtctttgaattttttacattcaacagctgacatgcctaccactatgaggggattttttaaaaacattaaattgaaggacagtattgatacagacaaatagttgaagaaaagggtctccagacccagttataccccacagtacaaaaaaaacttagagatgtggtcacagcatacttttagccctctgagaaatctcagagatgggattgctctcacaacatcaaaggctgccaacatattagtttggtggtttttaggagacaaactaattctcaataatattcaac

SEQ ID NO: 32053 - DNA, 1027 bp, Homo sapiens
gtctcacgcctataatcccagcacttcgggaggccgaggcaggcggattgcttgaggtcaggagttcgagagcagcctagacaacatggtgaaaccccatctctactaaaaatacaaaacttagccaggcatggtggtgcatgcctgtagtcccagctgcttgggagactgaggcaggagaatcacttgagcccgggaggcagaggttgcagtgagctgagatcgcgccactgcactccagcctgggcgacagaaggagacgctgtctcgaggaaaaaaaaaaaaaatacatatatagaaaatcactacctttttaaaggaaaaatattgataaattagactacaataaatttaagaacttctgtttatcaaaagacatcatagtgaaaatgagaaaaatgtttgcaacacaactgtcaaagaactgatgcccacaatatagactgaatttaaaaatgggtaaggaacttaagcatttcccaaaagaaatctaaatgactaataaatataaaggttgtcaacttgattaataatcagatcatacaaattaaaattacaataagatacatgacacaccttccaaaatggttaaaagtgaaaaaaggggctgggcgcggtggctcacgcctgtaatcccagcactttgggaggccgaggcgggcggatcacaaggtcaggagatcgagaccatcctggccaacacggtgaaacccggtctctactaaaaatacagaaaattagccgggcttggtggcgggtatctgtagtcccagctatttgggaggctgaggcaggagaatggcgtgaacctgggaggcggagcttgcagtgagcagagatgacgccactgcactccagcctgtgcgacagagtgagactttgtctcaaaaaaaaaaaaaaagtgaaaaagactgaaaatagaaaaatgttggttagagtggagcaaaaggagccaggcgtggtgactcacgcctgtaatcccagcactttaggaggctgaggcaggtggatcgcttgaggcccagag

SEQ ID NO: 32054 - DNA, 1030 bp, Homo sapiens
ttgactttttaatttaatttattttttttgagacagagtctcactctgtcacccaggctggagtgcagtggtgtgatctctgctcactgccacctccgcctcccaggttcaagagattctcctgcctcagcctcctgagtagatgggattacaggcacacgccaccacgcctggctaatttttgtatttttagtagagatggggtttcaccatgttagccaggctggtcttgaattcctgacctcaagtggtccgcctgccgcggcctcccaaagtgctgggattacaggcatgagccaccctgcccagcctgtttcttggctttttaataatcatcattctgactggcgtgagatggtatctcattgtggttttgatttgcatttctctaatcatcagtgatgttgagcttttttttatgtttgttgcccacataaatgtcttcttttgtaaggtgtctgttcatgtcctttgtccgctttttaatggggttgttgggttttttcttgtaaatttgtttaagttccttgtagattctgggtattatacctttgtcagatggagagattacagaaatgttctcccattctttaggttgtctgttcgctctggtgattgtttcttttgctatgcagaagctctttagtttaattagatcccgtttgtcaatttttgcttttgttgcaattgcttttgacgtttttgtcatgaaatctttgctcatgcctatgccttgaatgttagtgcctagattttcttctagggtttgtataattttgggttttacatttaagtctttaatgcatcttgagttaatttttgtattaggtgtaaggaaggaatcccagtttcaattttctgcttatggcttagtcagttctcccagcaccatttattaaatagggaatcctttcctcagtgcttgtttttgtcaggtttgttgaaaatcagatggttgtagatgtgcaatcttatttctgagttctctattctgttccattggtctggatgtctgtttttgtacaagtat

SEQ ID NO: 32055 - DNA, 1029 bp, Homo sapiens
tgtaatcataacactttgggaggccgaggtgggcagatcacgaggtcaggagatcgagaccatcctggctaacacggtgaaaccccgtctctactaaacaaaatacaaacaattagctgggtgtggtgacgggtgcctgtagtcccagctactcgggcaggagaatggtgtgaacccaggaggcagagcttgcagtgagccaggatcgcgccactgcactccagcctgtgcaacagagcgagactccttctcaaaaaaaaaaaaaaaaagaaactgttttgaacagacttcttttttaaaatagcattaaaattttgatgattactttctagttattttgaagtaattatgcattcacaggagtttgcaaagatagtacttactgacatatttcatgttcctttcacccagtttctctcattagttactataatatgatataaaactgaggaaattgatgttagtataaagaatgtgcaattctatgtcattttgtcacatgtgtagattcctggaaccatcccctcagtcaaaatacagaactattccatcaccacaaagagctcccacacctatcctccttcccctgactttccctaatcccaggcaactgttaatttgttctccatctctgtaattttgtcatttaaagaatgttacataaatagaataacacagtacatggctttttgagatgggctttaataatgcccttgacatccatccaagctctcgcgtatattgacagtttgttcctttttattgtggaggagcagtcatgaatgtactgcagtttggttaaccattcatctattgtagtacattttggttgtttccagtttttggctcttaccaacacataagttgctattaacaattgtgtatataatactttatttttctggggtacatacccagcagcacaatcactagatcatatttagtaaagaaaactgcaaaattatgctccagagtggctgtgccattttacattctcaccagcagtatatgagagttctagtttctcta

SEQ ID NO: 32056 - DNA, 1031 bp, Homo sapiens
tgagggttcaaatgctgcccctgctgcttcctatctacagtcatgcatggcatgatggtgtttcagtcaatggtggcctgtatatatgacggtggtcccatacagttataatggagatgaaaaattcctatggcctaatgatgatgtagtagccatcctaaagtcatagtgagatacctactcgtgtttgttgtggtactggtgtaaataaacctgcactggcagttgtataaaagcataacacatacagttatgtacagtacataatacttgatcataatatataactgtggtttatttactgtacttttaaatcattattttagagtatatgccttttatttattaaaaaaaaattaactgtaagccagcctcagacaggtccttcaggaggtattccagaaggaggcactgttatcaaggagatggcagctccatgcatgttattgctcccgaagatcttccagtgggacaggatgtggaggtggaagacaacgatattgatgatcctggtcgtgtgtagtcctaggctgttgtgttagtttttaacaaaaagttttaacaagtaaataaaaagttaatagaaaaaagttatagaataaggatataaagaaaaaatatatatattttgagatggagtctcactctttcgcccagactggagagcagtggcacgatctcggctcactgcaacctccacctcccgggttcaagcgattctcctgcctcagcctcctgagtagctggtattacaggcactcgccaccacaccctgctaattttttttttttttttgagacagagtcttgctctgtcaccaggctaaagtgcagtggcgcgatctcggttcactgcaacctccacctcccaggttaaagcgatttccctgcctcaacctcccgagtagctgggactacaggcacctgccaccatgcctgcccgactaagttttttttttgtatttttagtagagatgggattttgccatgttggccaggctggtctcaaactcctgatctcaggtcacctgc

SEQ ID NO: 32057 - DNA, 1056 bp, Homo sapiens
ttttattgttataaaaggattttctgttctttccttgatcttgtgtataaataagaaaagttacaaaattgacataaattatattgagcgcttgctattttactgttatttttttcttttgtatcttaactcttttcacaatttttgtatgggatttttttccccttttttttggctgtcagtgcatctgttttaaatactgtcacagtaactttgtagtgtttctacatagttgtacctcctactaggagttatatgtagcagatgcttagcatggtcagggccaagtgaatgaatggggtcggggatagggaaggttggtatactaattgattagcctagaattatcccttaaaggtatagaaatttactgctagcacataaagattatgtgttttataaagtaactgctgcgaatatagcaggcatttaaacagtatagcagaacagctagtctgtgccagatgtaatataggtcaaattttgaagtaatttggtttaaaatggacttttacgtgtaatataatgtataagatgtaatagctttgctacaaataaaaagtactgctcaagaaaacatgtaactaaacatgtccatttagcatatggactacacagtgcaaaaactacatgttttttatagggatttggttgaagtttataaatgttaaggcttttgcatagaaaaaaatttttcctaccctttttacctgctctatgtgctattttttgagctgcttaaaaaaaaaacaactgatacagcattatattttcagaaattgggaaatctttaaataatttggttttcttggccctcttttaaattaaaggatgagtatgataaataatgagtgctgagactccaattctatctaaatagctgccagaactactcctgatcagtttcattcagacagaagttgcaagctcaccactgtcaggcacagtgtaaaatcatagagaaagatgaaggtggggcccagaccctgaggagcaggtaggcctgaatcactccaggtgaaatgctcttctagagggtcccacaaaatgctgtgg

SEQ ID NO: 32058 - DNA, 1047 bp, Homo sapiens
tatgttgtccaggctggtctcaaactcctgggctcaagtggtcctcctgctttgtttggccttctaaagtgctaaaatttacaggcgcggccactgtgcctggctttttctacacttgtttctttccttagctagagctattagaaatgaagagctgcttgctggtgggagcacagtaaatgtgagctgccatctacttactactggatccaagatgcttgaaagcaaaactcttctgttcagggatgacctgaggatgtaagaataattaagagtgatggaactttttcttttttgaagagttggagtctcactctgtcatgcaagctaaagtgacacacgatcatggctcactgcagccttgaactcctgagctcaagcagtccttctgtctcagtctctctagtagctaggactgcagatgtgaatcaccacacctagctaactaaaagaaaatctttttttaagagacagggtctcactatgttgcccaggctgaaagaactttaatatttatgtgtacttgtttatgtagtgtagaaccttccctcccatgttgatattattaatttgggaaagaaagggggtcgatgaccacttgtaaagaattgtgcccttggaattttgtgtggttcttttttgtttttgacttgttagggagaatgtcaaacatatataaaagtagactaaacagtgagatgaacatccaaatatccattattcaaagattgcttctgtaataaactcacagccaatgcggtttcatctgtacccacacccctttcttcttttcatatattttttttcattttaagcatttgcaataacttatttacctaaccacctattggtagatatttgagtattaaaccattaaaaaatttttgtaattaataccctttcttgctttgtggtcttgtgtgagttttttaaagataaattcctagaaggggtgttgggtcaaaggacatgcattaggcatgttttagtttttgtaaatttcttccaattttgagatgtcatcacattgctttccaacaaacctgt

SEQ ID NO: 32059 - DNA, 1079 bp, Homo sapiens
acatgattctggctttttaaatgacatttgttgagggaggttgctttatgctttcattttgggggtcctccagattcatagtttctctctgctgtattaacatttatgctggctgtgtctttattcattcactcactccatcacacactgagggcctgtcctttagagtctagtcccaagagagcctaggactcacccctgtcagagactgtgacacctgattttgtgttgcgaaaataaagaatattgtaaaaatagttgtacagtttataaggtagactagatgtactactgttggtctccagagctttttatgaagatctgttatcagtaaaagctctcagataggtttcttcttgttagttgattcattgggtggtggttctagaaactgttttgttttgttttgttttgttttgttttgttttgttttgttttttttaaatacagggtctctcactctgtcacccaggcgggagtgcagtggtgtgatcacggctcactgtaaacttgacctcctgggctcaagcgattctcctgcctcagcctcccaaagtgctggcattacaggcatgagccgctgcgcctcacctaaaaactttctaagaagtgatctcaattctttcctgaattgaggctttaggacattcagtgaaatgcctaagaagaaatgatagaagatgaggaaatccattttggaaaaagccttacatgtaaatattttatttttgaatggcaggcagctcggtgtgttggcagaataacttaggttatggatttggctgtcatttactagttgtgtgatatttgataagttaaataacttctttgagtctcttatttcctgacctttaaaatgggaatatttcaaatggtggtgggatggaagaggtatcatatcacatggtgcctagtgcggtaagcactaagtgtcagctctcttcctccctgactgcaaggcagtttatttaaataaaatgattcttggccgggagcagtggctcacacctgtaatcccagcactttgggaggctgagatgggcggattacctgggatcaggagatcgagaccagcctga

SEQ ID NO: 32060 - DNA, 1117 bp, Homo sapiens
gttgcccaggctggagtgcagtgatacaatcatagctcactgcagccctctggaccttctggactcacgtgatcctcccacctcagcctccccagtagctggggctacagatacaggccaccacatccagttaattaaaaaaatttttttctgtagaaacgaagtctcactgtgttgtccaggctggtctcaagctcctgggctcaagcaatacttccacctcagcctcccaaaatgctgggattacaggtatgagtatcgataatatttatagccatgagtttgcatgacatcacctaggaagagaattccagtgtggatgggaaaaaaagaagagaacacagcaccaaaccccaaggaattccaagctttagagcttgtgattctggaggaggcagcaaaggagacaggattggctaaagaggaagaaggaaaaccaggagagtagtgtcacagtacctgagagaagaaaatcctctgagaagtggcagtttactgtgtagaatggaggggatctggtaagataagagagcaaaccattggatttagcaattggaaggtcattggtgacctggacaagagcagtaccagtgagttaggtgaggctgtagccagactggggaggaaatgaggaaatgccatatgaaggcaagcctctgagatgagacggcttgctgtgaggaggaagcagagaaatggagaagtgcttggagggcacaaaggggttttcttttactattgagatagcaacatgagagcctgtttgtgtgctgatcttatgggactgttatggtagataggggtgtagaacatggggtctaactgaaggttctaggttacagagtaaatatgggaacagggtggtgtctagagcttcagggaagggattttcctttctctgaaggatgaaaacagatccaggcaggtggtgggaaaataaaggaagttcttggccttcatattgtactgcagaactaactttttttcttgcctgcttcttgcattcttcaattttctttttcttttttttctttttgttttgttttcgagatggagtcttgctctgtcgcccaggctggagtgcagtgatgcgatctcggctcactgcaacctccac

SEQ ID NO: 32061 - DNA, 1047 bp, Homo sapiens
tattaatctatgacttcccatttttagaatataggtactatatatttgtagacaacagatttgaagaatgaatcatgaattttcctaacaagttagagtttaaggtgtcagtagatgaatcagtttcttaatgcctagaatttgctgagaaaattgaatgaaaattggtttcttaaagttaagtgaattaagaatgtgtgcgtaaagctttaacaaccttttcaatgacagcagttgacttatatatacaggatagtcagctggtttatcaaatcatttaaagtgcaacaatgaaagcaaaaacaaaaggttaactaaaaattatgtcaggtgtgattaaaaaaatcagcatgactaagatacctttttttttttattaaccctctttctaggaaggtggacttttaaatattctccactgaagcaaatgctgcaacaatttgcatttccttcaccaatgtcgtcttgtgccttttcttgttcctactgtaaaggagatgggttagatgttgtaagtgaattcttattttgttagttcctaacaaaggcttgtgttttttactgcaaagatatctgtgtgataaaagttgggaatgttctaaggcctgtggtgtagggatccatggggaatagtccacaaagttaaaaggttttcttttgtgaaatgatttcgctgaataattctgtctttcccgtgttaagctagccagccaactgactgaccagcaactaagctggatttggtcactccacccaagattcacagcctcattagccaagagagtaattgatgacttagctattattgatacattgtttctttttgtggctctttttaaatttcttgacttttatgtgatcagattgtttaatttaaaatctattacatttttaagagaagcaactaaagagatacacgagaaacaaaatacacaatgaaagggaatttcctttttttgctgttttgttgtaaactcagatttttccttttaaaaatgattgctggctaggcacagtggctcacgcctataatcccagcactttggg

SEQ ID NO: 32062 - DNA, 1048 bp, Homo sapiens
gcctgtaatcccagcactttgggaggccaaagtgggcggatcatctgaatcaggagttctagaccagcctggccaacatggtgaaaccctgtctctactaaaaatacaaattagccaggcgtggtggcatgtgcctgtaatcccagctccttggaaggctgagccgggctggtcttgaattcctaacctcaggtgatctgcccacctcagcctcccaaagtgctgggattacaggtgtgagccaccgcacctggccaaaaaaaaacttttaaaattatttagtggcttattatataagaaatacatgaatgcatttttactttaaaaacataatacacccagcagtttgggaggctgaggcaggtggatcacctgaggtcaggagttcgagaccagcctggccaacatggtggaaccttgtctctaactaaaaatacaaaaattagctgggtgtggtggcggatgcctgtaatcccagctactcgggaagctgaggcaggagaattgcttgaactcgggaggcggaggttgcgataagctgagatcgtgccactgcacttcagcctgggcgacagagtgagactccgtctcaaaaaaaaaaaaaaaaaaaaaaaaaaccataatacagggctggtcatggtggctcacacttgtaatcccagcatacttctgggctcaggcaatcctcccaccttgacctcccaaagtgctgggattacaggcgtcagccaccgcacccagcctgttttgatttttttcaagagacgaggtctcactatgttgtccacactggtcttgaactcctgggctcaagctatcctcctgcttgtgcttcccagagttttagattttcaggcatgagctatcacacccagacttattttctcctttatccccaaccactgcagttaggtttgggttgggatgggggcaggtgggagatgggggaagccaacctccaagcagggcaggaaacatctagccagccccatcttcctgaatccacagctagggtgcctcccagagagcctgctctgctgcagggcac

SEQ ID NO: 32063 - DNA, 1048 bp, Homo sapiens
agcatcttttaaaattccaatggaaacattgctttaccctctcctgaaagacgaagctgcaggtgaagaagaaacgaaaactgcttttaggcccagctggccctgcaggagctttggcgggtaagggtgtcaggcagggagactgtgcagagccaggcatctggatgtggatttgaggtgtccttagccttggaaaccccagtgactaggcccggggaagaaacgccatggctgccagcaaatgctctttcagacacacattccgcacacctccccaggacaagaagggatgctccagaagcttgttaaatgatttccaccaatttcagaaattgcctcagctagttgtttatatttcccatcagccttagattaagacagaaagaaaatggggccctggcgtcaggaaagaaggtggctttgtccagggagggacagctgctgtggcagtttctgaagaaagtggaaaggcatgaatgggccctgccatgtgttgggtggccacaggcatgagctctcctggtctcggctttccaaggcccgggccacggtggcccacgaggacacccctgcacccccacatggcctcacccaccaattgccaatgtcctcaccttgaacccactcatcacaggctgatccagaaacttgctgagttttgttttgttgcaaacactgatttgctttgttgttttttttacttcactgggatgtaggatgccaggttaagatggactggtttctcctgccagaagcagctttgaatttaggatgcccagagggtgctgtctttttcttttgacagagtcgtggtctgttgcccaggctggtgtgcagtagtgcgatctaggctcactgcaacctctgcgattctcctgcctcagcctctcaagtagctgggattacaggcgcccaccaccatgcccagctaatttttctatttttactagagacagggttttgccctgttggccagactggtctcgaactcctgacctcaggtgatccactcgtctcagcctcccaaagtgctgggattacacatgtg

SEQ ID NO: 32064 - DNA, 1034 bp, Homo sapiens
atttttttaaagtatttttattagagatggggtttcaccattttggccaggctggtcttgaactcctgacttcaagtgaccctcccaccttagcctcccaaagtgctgggattacaggcatgagccgccatgcccggccctgtgtctgtcttttgaagtacacgaacagggttttgcttcatgtgtatttcatcttctaaacggcacagcatgttgcgtccatgccttccattatacttccccacccccacccaactgcccttctcagattcgtgggtggccttgaacaagtctccccactccagcagttacagagccctgagcatgtgccgggtttgtggggagacacattttacaggtgttacctgtgagatcttcacaacagactccatctattatctatgggctacaggtgaggaaacggaggcacagagaagtgactcgattttccctgagccacacaactggggtcaacccctggactgtctgattacacagccccctttagctctgggctaatttcccccctctattattattattatcattattgttattattatttcattttactttttttgcgacagtcttgctctatcacccaggctggagtgcagtggcacgatctcagctcactgcaacctccacctcccaggttcaagcaattctcctgcctcagcctcctgagtagctgggattacaggtgtgcaccaccacactcaactaatttttgtatgtttagtagagatggggttttgcatgtggtcaggctggttttgaactcctggcctcaagcaacccacccaccttggcctcccaaagtgctagaattacaggcatgagccaccacggctggccaagttcctccctctattagagcccaggagtttgagaccagcctgggccacatagggagattctgtttctataaataataaaaaattagctgggcgtggtggctctcgcctgtggtcccagctactcaggaggctgaggcgggaagatcactggagcccgggaagtcgaggctgcaa

SEQ ID NO: 32065 - DNA, 1050 bp, Homo sapiens
gccaaaaaagtgatattttaattgcatttttaaaattctcattttttcctgaagtggattatgcctttaaggctgtagatttgtgaattctggaaagttcagcagctgcagggccctcttctagtggcagacaatggaccccatcatcagctcctctcagatggccatatcaaagaggctgtgctgtcgaatgcgtctctgcttgaattagcatgaattaactattggctttattcattattgttattttactcggagttggggaatgatggctaaaagtttgtgaatctatgacttaaactccaaggattggtatagtagacctttctgagatagtttctgaaaaacaggttacatatctctgctgctttgtggaaaagaggtcaaagtactggtctgtgatgggtcccatttgagtggcttgttctgaagttgacctttctgatcactgattagtagtgaaaaaacttcccctgtgaggtacaggctctcgtacttcattaaaagagactctctctggactgaaaagcaaataaactccctctctggaactccggatgaaagcacatctctcctgttggagtatagtattgtgtgtgagagtgtgtgtgtgtgtgtgtgtgtgtgtgtgtgtgtgcgtgtagtatttttaccacccactttgataaagcgtatctccacagcacacagcaccttggcctgaatcagccaaggacctatacctgggcatttgggggatgcagtggcttgccttcttttttctttttggtagagacatggtctcactatgttgtccaggctggtctcaaactcttggcctcaagcaattctcctgcctcaacctcccaatgtgctgggattacaagcatagttctagggtactggccaagttctaggacctcctcccacacctgcagaatcaggaactctggtggtgagggccccatatgcatttttaagtcatcattatattttgagacagggtgttgctcggttgcccaggctggagtgcagtggcatgatcatagctcaccatagccttgaactcct

SEQ ID NO: 32066 - DNA, 1035 bp, Homo sapiens
acttggagggtctgtgggtgagaggaaggtcgtggagtgaggcagcccccgtgccccaccctggctggtgcctttcagagctgcagctgtgtgtgctctgccagctccggccacctgctccagctgaagggccgacacagagccaggcagggcccggagagaactgttccctccaggaggtgagtggggtactcctcaagcaatggcagatgctgagcaaggcctgtgtgggccaagagccttggggggtttggaacctgggttctgccccaggccggagaatgaggcaggcgtaagtcactccctggcacccaggtgtgggcttcagattcctaggcctgggatggcctcacccattttaaagatgggaaaatgagactacaagtggtcagggacttgcccggggacagaggaagtctatggcacgaggggggctgatcccagggcctgggtcggcttccctgccaaatgcccctggctgcccacctgcctgctctcaggggttgtggcttgttctgcccatgtagactcaggtatatgaggatgttctgagtgggggtttggcagtgctgggaggtgtctgggagggggtggatgtcgaggaaagggctctgggatattgtcatggctttggtgctgctgcctggcactgccctctggtgttaaaaatgggcaggatctggaccacttgcagcttcttgggggctcctgctagtctttcgggctgctgggtgctacctgggagttcagtctgttcttggctctggccagactctagtgactactgaggtgacctccagggagagggatattcagccttcctggccgcacacaacaaggtgccatggggtgggcatgcctaggtgcttatagactcctctgctgctcacagatgcattgggtgaccctggaagccctgttctgggccttgggttccccttctgatggccagggtcccttccaacccagtcgacaaactgagtatttctgcagcagacacctctacctgtgtgtgaccctgcaggcggggttgtg

SEQ ID NO: 32067 - DNA, 1204 bp, Homo sapiens
ttgagatggagtcttgctctgtcacccaggctggagtgcagtggtgccatcttagctcactgcaacctccgcctcctgggttcaagtaattctcctgcctcagcttcccgagtagctgggattacagacgcgcaccaccacactcagctaatttttatatatttagtagagacggggtttcatgacgttggccaggatggtcagtctcaaactcctgacctcaggtcatctccctacttcagcctcccagagtgctgggattacaggcgtgagccactgcacacatcctgagagctggttttaatgatcacataatattctgttttatggagatgctataatccatctagccagtcctttgttgttggacacgtaaggtagtttccaaatcgttctacaacaaatgtcgaccttctgtttagggttccctctcttcaaattagttcatgaatggatgtttgcagccccccacccctaactctaacagctcaggcaataccaagcctcagggttagcccaggctcctgtaggccccttccctgttcacaaccccttccttggcatctcctcgggacctcagcacgccctctgacctgagcctgatggccctgtagggcttagccttgtccctagtctcgaagccaaagctgtgctgggcctccagtgctagcctcggttcgacttccctggaagtgggtgtgggcttggggtggcagccagttgccttccctggaatccctttctgggaagtcgagttggcttctctggctcagccccatcatgtggcccctttctggagctgctgtgccagaccagagtccctgcagggtctctgggccccctcaaaacctacaggggaaagaggaggcaaggctgggacaggatagggcctctgaagtgtgggcctgaggctttgtccttctggccatggtaccccacaggggcaccacctcctgtggtggaggccacagaagagcagtatgaggcaggagaggctgcagggagtgctcctggcctgctggcatgtggaagtgctgagtcatgctgacagctccgtggctagctgtcccagcctcttcctgctgcccctgccttggccctgcggcagggaggcctggaggcttggactgctgagcatgcagccgggttgagggccttttcctgcaggagcaggagggcagccatgtcccctctgagcccaacc

SEQ ID NO: 32068 - DNA, 1069 bp, Homo sapiens
gtgcagtggtgcgatctcggctcactgcagcctctgcctcccaggttcaagcaattctcctgccttagcctcccatgtaaagtagctgggactagtggcccgcaccaccatgcccagctaatttttgtgtttttagtagaggcggggttttgccatgttggccaggccggtcttgaactcctgacctcaggtgcctcaggtgagccaccgcccctggcctcttctaaatttttttttttttttttttttgaggctgagtttcactcttgtctcccaggctggagtgcaatggtgagatctcagctcactgcaacctctgcctcccaggttcaagcgattctcctgcctcagtctcccaagtagctgggattacaggcacccaccaccatgcccaactaattattgtatttttagtagagacggggtttcaccttgttggccaagctggtctcagactcctgacctcaggtgatccacctgtctctgtctcccaaagtgctgggattataggcgtgagccacctgaatatttaaaaaaaaaaaagtatatgcataaagaagaagataaatgatgtactcttgtcataaataatgaacctgtgtgtagctgctcccaggattaagaactagtacattacagtgatttttggaactacagtgggtccctccatcctcatcttcccttcccctgagaaagaactataccctgaattttttgtttgttatcattctattgttttccttttttttttttttgagacggagttttgctcttgttgtccaggctggagtgcaatggcgccatctcggctcacttcaacctccgcctcccgggttcaaacgattctcctgtctcagcctcccgagtagctgggattacaggcatgtgccacatgcccggctaattttgtatttttagtagagatggggtttatccgtgttggtcaagctggtctcaaactcatgacctcaggtgatctgccctcctcggcctcccaaagtgctgggattacaggcttgagccaccgcacctggcctgttttccttgtagtatatacaaaaagacttgt

SEQ ID NO: 32069 - DNA, 1014 bp, Homo sapiens
ccgcgcagctgcatggtggcgcgggggatgggctcgcgactcgccaagtaccctctagggtgatgccgggaaggccaccattactgctgttctacagaacgcggccctcttaaccctctccaccacctggctgtgtgggcgccgccgggagtgttcccccttccagatggggaaacggaggctccgagttagtcagctacccaaagttacacacagggagatctgatttgagccccagcagtccgactctagagaccctgtttttaattcctcttgcaggagactcgggggcccggccttctccccacctcagactacgctcccctacccctgtctcctgccacccctgggttgggtccgagtttggagcagggggctgctgagacgccaggcagcggcggggctgattgggggaagaggggaggagggcggtggcacgtgggtgcagaaccctgggatccattgtgaaaaggaggtctaagatttgacctggggcgggaggaggcggagggcaaggagactgagaaggctgagcgccggaaggacggagttccagggccctagcgccgggagtgacgtcctggggcagggccagccaccaggtgctgtatctcccaggcaggagctggcgtgcctaggccccaagatccttccctggccagcccttttggcccagaaggtggacacccaaggagcctcctctgtagcggagacagggataattaatgagggccaccgtgcatgcagctggaggtgtccagtggggtgggtgagggggtcagtcagtgaattacttcagagcctgcttcccgctctgtaaagcggggacagtaatggcacttaaccacgctgggtggtttcaaggactccagtgctctacttggaggctgctttgaggccacagtgccagcagtgctccgggctcatgacagggttgtgagggctgcgtgatggatgatttctcgggaccttcccaaacaagctctgtttcagacagacaagattctggcttct

SEQ ID NO: 32070 - DNA, 1037 bp, Homo sapiens
tgaagctgcagtgagtggtgactgcaccactgcactcccacctgggtgacagaatgagaccctgccttaaaaaaaaaaagacgagatggagtctttctctgtcacccaggctggagtgcaatggtgcagtctcggctcactgcaacctccacctcctgggttcaagcgattctcatgccttagcctcctgagtctgggattacaggcacacgccaccatgcccagctaatttttgtatttttagtacagacggggtttcaccatgttggccaggctggtctcgaaccccacctcggcctcccagagtgctgggattataggcatgaaccactgcgcccagccaaaacatgcagatttttaaatgagtttttgacacatgtatgtaatatcccttgggcaacccaatcaatatgtaacattttgtcactccagaaagttccctcatgtcctcttcagtcatttccccaactctcctcccaaaaagcctttacattttaaatttatcataggatttttcttactgtgcattctatactgttacttctcttacctactgtggtggttggacttggcttcccgtaatgattctaggacattcttacataaatgggctggtcatcctttagctaatggaagtttataaccagatgtcagatgttcacatgttcctactgaatgtttacctgaactcaaaatagtctgtctctgtgctccactcttctgctgcttatgcctgtttccacatggtccctattctgggcctggctactggcttctgcacttcggtacaaaatgaccattgtcactctccaggttgcaggcgccccactggttactgcaacgaccactgcagtgtcttcagtcctgctggccccaagtgttttccagcagacagttacaagatcttcggaccttgagaggaaagccagctccccttctcctctaactattggaacgccagaaagtcagagaaagccttccattattctcagcaagtctcagctccaggatacattaatacatctaataaaggtatg

SEQ ID NO: 32071 - DNA, 1053 bp, Homo sapiens
cacgttctaaaatataaagcctgatggctcatcccctggacatgttgccattgccctgtggataaagtccagatcctctaacgtgtctcagatactctgcagtctgcccgcttcttctctctttccctgtcaccctcctacccagcctctgatccagctgtgctgaagcacgtgtggctctcagtggctgtgctccccagccagctcgcctcatccctccccagtttcactcctcttcctagtgccttccttcccactgagctctgcaactctgccttgtgtgtgtgtgtgcgggggtccggtgggggggcccttaccagttgtcctggcctcttttttcacatcacagtcacagcacaatgcctggcacctgataaattcaagaatttttatcaaatggatgaaacatttgcctggacaaaactgggtttgttttcctgtagaaatgtgatcataccatagtcttataatattgatattatactaatttgcagtgtactttggggccttacagactttctgaagccttgagaatcatgtgtttcagtgaactaattttttcagtataaacagatctaaacaactaattcactcattttaggaataaaaagttgaggctgtctgtgttttcaaagtgcttaggtgtgtctcccactaaaatgtaagctctgtgagaactgttgttactcccttgctgcatcgcgtgggcccaggttagagcaagacctggcaccctgtgagtactcaggaaataaaggttattgactatggaaatactgcttaaaagtacaggaaaacacgaatgtttttcctttgaacgattatggtatcaataagccaacttactaaaatatatataaattttaaattgtcaggcttacatgctttttctgaagaattctgtgactagggactaaggcagtgggagttggggatggcccactattaaatggctagatttattttctgatatttgagacccagtctctgaggtccagtgcctagcgtttcattgagaacagtgaaagtaaaggtagaatcacctgattagca

SEQ ID NO: 32072 - DNA, 1042 bp, Homo sapiens
tgaacctgggaggaggaggttacagtgagccgaggtcacgccaccgcacttgagcctgggcgatagggctagactgtgtctcaaaaaaaaaaaaaagaccacatggtgtttatgtgattatagtttaagccaacttcaatttaatgctttttgggcaccagacattatattgagaatttaattttcacaacagtgttctgagatcattgtcacaatgtcctcgcttttcagataaggaactaaattagaaggattatgctgggctcaatggctcactacaaaaaatttaaaaataaactgatcatggtggcatgcacctgtggtcccagctacatgaaaggattgtttgagtctggaaggtcaaggctgcatgagctgtgatcacaccactgcactccagtctgactgaatgagaccctgtctcaaaaaaaagagaaagaaaaagaaagatgatgtaattttcccagttaacagctgaggtatcttttatttcagaccctaaactctacagtttttttcagaagtaaaaatatgaagaaattgaaccatataagatctttagtatttttttgtatccatggtctaaaattagatactgatgctgccttatatttgaagtgagagtctaacattagtagaatctctttattgaatatttttaaaggtgaaatggtttggtatgaagctacaacttttttacaactgtgggaggttcttgcctcttcctccacaacagttactttttactgactacattttttcagacctgccctgtccctctcacctagcagatgatgctgtcctcataccagggagagaagacagaatggcactcccttaactttctgtccttcacatgcaaacttgcctgcatgctcatcgctgctggccctctttctctgttgtctgacaggagcccctcctgacacaggatctcttgccttaagctccctctcctcatactgacttccccctactccccgaaagaactttggaagagagcactgttgagtgtctgccatgtactgatgggatctgtggt

SEQ ID NO: 32073 - DNA, 1028 bp, Homo sapiens
gaggccaaggcaggcagatcacctgaggtcaggagttcgagaccagcctggccaacatggcgaaaccccgtttctactaaaaatacaaaattagccgggtgtggtaatagacaccagtaatcccagctattcgggaagctgaggtaggagaaattgcttgaacccgggaggtggaggttgcagtgagccgtgattgcgccactgcactccagcctaggcgacagagcaaggctctggctcaaaataaataagtaaataaataaaataaaacaacccttcctcacctccatcctcttactgtactttattttctcactaaggtttctaaccagctaagatggtttctgtttttgttttttgtctgtctcctgcccaccaaaatataagcaccatgtaaaacagttttgtttttttgtttttaagctgtctcttacgggaaagaagggcagttttatgagccttgttcattgctgtatccttagcatgtagcactgtaaatatttgttgaattagttctctttataactgatagtctgataaaagaacagatatcaaataaaatccgtaggtttttaagtagactttttgttttgagataattacagatttatatgcagttgtaagaaataatgcagaaagatcctatgtacccattacccatttgcccattgataacattttgcaaaatatagtacgatatgacaaccaggatattaacacaatccacacatgttgttcagatttcctttgttgtgtgtatattcagttctgtgtaattttatctcatgtatagctttttgtatatccactaccacagtcaagatgctaaatattttcatcacccccaagatgttttgccctttcataaacacactgacttccctgtcataccctattctgcctctgcgtctacctctgcctccccgatcccgccatcgtttagccctggcaactattaatccattttccagttctataatgtcatttcaagaatattatataaatggaatcatatatataacctcttg

SEQ ID NO: 32074 - DNA, 1050 bp, Homo sapiens
ggaagtcccacctccagggtggagaaatgtacatgagagcccatgagaagtttcaagtttgtaccaaattcttcaatgtctcacagagaattaggaggaatgaatggatctatggaagttaaatttggaggagcagtcacctctctaataaattaatcgattcttaggaaaccaaatgagaactaacttcaagaatggctttctgatttagaagttaccttacattcccctcttctacccttgatgacaagcggattttctacgtacatactttgttctgtttgtagagccctttcagtgttctcataggtacctagtaagtccagggctctgtcactcatcctgagtaataactgtatcaaggtaccacacgggacagaaactgtaggtgctgcgcactaaagcagatactccagtaagtggcctggcttactcaggctgagaggttaagtagccacaacgagaaagtaggaaataagacattagctttgaacacaaaactttaaaggaactctagggtcaggtgggcaatctaaacatctgacattattttgaattatatcaatattacaaaaggaatatagatagcatgatagtttctgttttaaataaacttctttcacactatggaataaaatatcgtctatgggtagattaaaatgaaaccctttgggatttggttaaatctttgatatttactttatcatgtgttctttctgattttgaaaactgtctgcaataggtggagcttctttgaattagagttttgttctcttatctgcatttgtctatcatctcatcagatggagctggtataagcagtgacccatgaattcatgggtcttggtgtttggatgggctcccttcagctgccacattttttcagacggcccctttgtttatctttaggtgaagactcagaagattggcaatcaagggcaggggtgcaagctaggcctcagtgttgggatttaatcctgattctgagtctccgctatctgctgagtatgatataatgaacgaaatttcagacttttgaatgagcacttg

SEQ ID NO: 32075 - DNA, 1040 bp, Homo sapiens
agaatcagtgggagcctggagcttgttttcctgcatctaaacagcagttccatctggaggtgatggaagacaatgacagatcatcaggcattagattctcataaggagccacaatctagatccctcgtatgtgcagttcacagtagggctggagctcctatgagaatctattgccacagctgatctgacaagaagcagagctcaggcagtaatgctctgttgtctgccactcaccttctgctgtgcagcctggttcctaacaggccacagaccagtaccaatccgtgaccctgaggttggggacccctgatttacaccacactttggaagctgtattttaaggagctatgggtactgtgtggcagtagcagatatacatcctaacagcaaaggcaaaaccctagtgcaattcactgttttacttagggttgcccattgtttaagaataaaacttttgcaagtgggagtaatcagttgtgatattgttgggtttattttcctaattcctaaagaagttcaatggtcatttcatgtgtctaaattctgtactgagattataatgttaatgggattgtggaaggagtatttcgggttaatatattcagatttgatttaatttagacagaggcaccaaatttttaaatgataaactgaagaccttgaagagtagcattttaaaattacctgtcctaagtcttttaatcattgttcaatattcaataagtagatattacaatttaaattttagaagttggactctttctctaccatattagtgttcagtggtggtctgaaatgagtgggttttttggccaaaagggttaagctgcaaagataattgaatgacattttccagagtttcttgcggatatacaacatctcatctacctaagtgtttgtaacatgccaaaatctgttatgatcccacgtcagtcagtcttaggctccatatcctttttcctgtgtgtgtgttttctgcccctctatcctagagcctttcttgtcttctcactctttcctaaccctttgatgttcttaga

SEQ ID NO: 32076 - DNA, 1027 bp, Homo sapiens
ggagggtggatcacgaggtcaggagttcaagaccagcctgcccaagatggtgaaaacttgtctctactaaaaatacaaaaaaaaaattagccaggcatggtggcaggcgcctgtaatcccagctactcaggaggctgaggcagagaattgcctaaattcgggaggcagaggttgcagtgagccaagatcacactactgcactccagcctgggcaacagagcgagactccatctcaaaaaaaaaaaaaaaaccaaaaccctgctgctgtcagtgatgaaaattttgtctagttctgctactgacattaagttatgataaagtctgtctgaggagaaaaaagaaaaaaaaatcctacttttagcaattagagaatttacatttttttcaagtatatattagaggtttataaaaattgccacatataggccattcagccaaagaatttagggaggaaaatagggaaatctgagtaaagttgaaggaaaataaagagtagaaattaattgcaaaaagtagaaatttctttttttttttttgaaacggagtcttgctttgtcacccaggctggagtgcagtggggcgatctaggcaagctccacgacccgggttcacgccattctcctgccttagcctcccgagtggctgggactacaggcacccgccaccacacccggctaattttttggtatttttagtaaagatggggtttcactgtgttagccaggatggtctcgatctcctgacctcatgatccacccgccttggcctcccaaagtgctgggattacaggcatgagccaccgcgcccggcctagaaatttcaatagaatagagcagatcaacaaaacaaaaaactccactataacaacaaccataaaaagaacaaggggaggtacaatatgcagtattaggaataaaaatataaatgtgttccaactaaaggaagagaacatgcatttttaaaaacaagaagccactgtgaagaacttttgcctgtaaatttaaaacttggatgataaagacagttt

SEQ ID NO: 32077 - DNA, 1032 bp, Homo sapiens
atgagagcccctgtcgcagaggtcatttgggtttaaagtttaaaatccaattagtttcgattcttggaaggagggggtgggtgggtccggctttaatcgaactacacagagtttcggaaaagattccaaggcacttaggaaaagggcttccgtgttcactggatccccgaagacctttgtacaaacaagagagaccctgtaaatgtgttttgttccatctatgatgctggtgatgtcatctctgaatgctcccctcggactcagtactttctggctttcgtgcactggggagggtccgaaaagtcacattcagtgtgttcactgattcttgttagcccctgcttgaagctttgttagttgtttaaaaagcataatttcccactttcttgtaattgacccttcctaattaactcattcagctacaggctttacacttagaaagtaatacgtaaatgcttgttggattgaattcaccaatgactggagttcacatttcaataagatacgaaatccttaaactgacagaactctggaagatgaccgtagtatgtcgtttaccctataatacagttgcatagattatatttatcagtaatttatcgaaaatcatttggcatttatgaacagttaattcagatgaagagtttttataatcacgttgtttatctttgcctcctggaagagaaggagatatgggaagccacaaggaataaaattgtagattgttttttaaatgtagctattttagacattgccttagtttgaaattttatgaatcttttttcttttcttggcctatatataaattttgaaatatggattgccgacaaatggtgaagacttggggctagagttttcctagtttttcacaaaggctttcaatattttaaaattttacattgtggagttctgttttaaatatgaaatacaagctataataacctgaattgaaaaataagctgctactgtttatttggatcctggcacatagagcatgacaaaaatcttttccctctttattattttacagtg

SEQ ID NO: 32078 - DNA, 1062 bp, Homo sapiens
tagtagtgtctcactcttgttttaatttgcattttcctgatgacatatgatgtggacgatcttctcatatgcatctttgccatctgtctgtcttctttagtgaggtgtctgttaaggtctttgggccattctttaatcgggttatctgttattgagttttaagaatatatttatttgtgtatttacatagtagtcctttataaggtgtatcttttgcaaagatttacttctcgtctgtgacttgtctattaattctcttggtagtgtctttagcaaagtagaaaactcacatttgattgaagtccagcttatcaattatttctttcatggactgtgcctttggtgtcataatatataaagtcatcgtcaagcccaaggtcatctagaggttctttctcctgtgttatcttctaggagttttatagttttatattttacatttaggtctgtgatccattttgagttaatttttgtgcagggtataaggtctttgtctatatttactctgtgtgtgtgtgtgtgtgtgtgtgtgtgtgtgtgtgtctagttattccagctccctttgttgaaaagactttcttgctctattgtgctgcctttgatgacttgtcaaagatcagttggctacatttatatgggtctatttctgggctctctgttctgttccattgatctattcaccaatatgacactgttttgattactgtagctttatagtaaatcttgaagttggttagtgtcagtcctccaattttgcgcttcactttcagtattttgttggccattctgtgtcttttgcctctccatatatactttgaaccagtctgttaatatctacaaaataacttgctgtggttttgactgggactgcattgaatttgtagatgaagttgagaagaactgacatcttgacaatattgagccttccaatttgcgaacatgaaatatctctccatttatttagtttttaaatttcatcagggtttcatagttttcctcatatagatcttgcacatattttgttagatttatacctaagtatttctttgtgatgcttattta

SEQ ID NO: 32079 - DNA, 1121 bp, Homo sapiens
aaaaaaatttttttgtagacatggggtttcacaatgtttcccaagctggtcttgaactcctggcctcaagcagtcctcccacctccacctctgcctcccaaggtgctgagattacaggtgtgagccacccttaaatatttaccgttagaaatagttgaattattctcttctagttattttgaaatgtataacaggttgttaactacagtcaccatactgacctgtcaaatactagatctcatttcttctatctaactgtatattagataattcttctatctaactgtctatctttaaccctccatcctcccttcccttcctgaactctgataactacccatctactccctatcttcctgagatccacttttttagcctccgcaccatgagtgagaatgtgatttttgactttctgtgcttggcttatttcacttaacataacgacctccatttccatcagtgttgctgcaaatgacaggaactcattctttgtgatggttgaatagtactccattgtgtatatggatcacatttttaaaaaatctgtttgtccattaatgggtacttaggttgattccatgtcttggctattgggaatagtgctgcagtaaacatgaatgtgcagatatctctttgatatattgacttcctttcttctatatacccagcccagtagtgggattgttggattatatgatatttctatttttagtgttttgaggcatctccatattgttttccacagtggctgtactaatttgcattcccacaaacaatgtacaaaggttcctgaaagggtgagtttaaacaacataactgcagaatcatagtcatgtctgacaaataatgatatcttgacatcctcacatacgcactcagtgttcagatgagcagggtccagtgaagagcagcacattctcatggttggatcttgttcctctcacagcctgtaggcttcccttcctctctctcatctctctctcatttatccattctatacttggatttattgttgaagaactgtgtggggtttccctgcacttggattctgctgatgatggacctttgcaagttgctctgacctttgcgtttcttgtgagtcggtggattgatctagaagt

SEQ ID NO: 32080 - DNA, 1025 bp, Homo sapiens
ggagcacgggccgccgcggcgcgcgcctacccccgcgcacacgtgcatgcagtgagccaggtgcatcagctgcacccgccctcgggcttcgcgcgcctccgctggagcccagctagcctcgcggctccggggccgaccgggtcggaactgctgcgtccccattccggacgcagagagcgcgcggggcgccggcgccgccggttaaagtgccgcggggcaggggccgggccgcggccacccgctcctcccgctccggtcccgactgtcgggctctcggccgagtcgccccgggtgagtagccgcggaggcgccccgaccaccccgcagcagcgccgcccggccgctagcccggagaggcctgggggccggaggtttggggccgggctggacgccgagacccgggcccgctttacacaatcgccccgccgcgcgaagcgaaacgggtggaacgcagactgccgaagctcactgactcctttgagggagcgaattctttcagctacgcggggttagagcggtaggagtgcccgctgcccgaccccaggctttctggtaaatgtctgtttccaccaagtgagttcggacagcaacacctggggctcccaaagcggaagccgtcagcactggcgatttggagctgcggttctcaagtttccctggcccgggatctctagcgccgcctaaaatgagatccagacggcaggtccgggtcaggcccgggatctgcatttaacgagcctccacccacgcccccgtaattcgtgggtgggtggcccagggaccatcctttgagacacagtgggtttgggggaaagttcacaaaaatcagctgggctaacagtggagtcacagaggctggaactgctgcttcagccccctcggtttgcaaacgacagggttgtggtgaccaactcagggccatttaaacttgtaggcagaattagctccattctacagatgagaagacggaggcctagagaggggtatggaacttaggggtgtgttgtcagctggtgagaggctgt

SEQ ID NO: 32081 - DNA, 1061 bp, Homo sapiens
attcctgggcgcatcccagctctgccccaactcgggagtccaggcccgggcgccagtgcccgcttcagctccggttcactgcgcccgccggacgcgcgccggaggactccgcagccctgctcctgaccgtccccccaggcttaacccggtcgctccgctcggattcctcggctgcgctcgctcgggtggcgacttcctccccgcgccccctccccctcgccatgaaggtaggtgttcagtgcgctgccactttttttctttacttccccccaccccctgttggaagttaactgagttcccttcgcctcttcctatccctccatttccccaaccgcctgaagaagctggaactccagcgtcgctggcaggaacccctaccccttcgccctccacgccgggcgcactgcctcagtgtcccaggagatcacttctggtcgcaccacccgttctgcaaacaattttgatttttgagaaaaagtggggaagagcgatagtagacaaactgagtgcggttcactgacgactttccttttgctctgagaacatcgagtgtaatttactatgtatatttcagtaacaggataatgattcaattcaacaaatatttaccaagcgcccactgcgcgggcaccgggacggtgtgtggccggggctcgggatggggaaagggactccttggttgagagaacccgcagaggaactaggggccaactactccagagcggcgtacaccttccccgacacccccccgcaccgacggaggccagattgtaggcttgccttggccgagtaactcgagcgcttcaggcccctttgcctttaagagtgcctggcggggggccagcgcgcaccccggcgcggggagcggggtcgcgttattagcattattagccgccactgggtgagctcaggcactttgcagcagtggtgggggcggggagttgtggtggtagtggctgtaatcccgtactccgggacagcgctccccggccccctgagcggagtccgccttgtcctttagaaaacacttgggcctccgctttgggagagcaggcgggggc

SEQ ID NO: 32082 - DNA, 1002 bp, Homo sapiens
tgctcaaccaggtcaaagggagacagaagcaagaggagatgcttcttggatctcagatgaccctctcccaaatggacccccatggtttcagcaccaaggctgcctggagtttcagttttattgggagcagtgcagcagaactccaccatgactcctgtattagtttcctaggggttctgtaacaaagtaccacaaactggttggcttaaaacaacagaaatttattctttcatggttctggaggccagaagtccaaaatcaaggtgctggcagggccattccctcttcgaagcctctaggggagacccttccttgcctcttccgagcttctggtggttgctggtacccttggcattccttggtttatagatgcattgctccaccctctgcttccatcaccccatggccttctccctgtatgtattctgtgtctctgtgtccaatttttcctcttctaagaacaccagtcattggattaaggcctatcctaattcagtataaccttatcttaattcaaatatatctgcaaagaccctatttccaaacaaggtcacattcacatttactagcggttaggacttgaaaatatctttttaggggacagagttcaactgacaccacccaaggaattgttcttcccttaaggaaaggttatgtagtccccacctgcctccacccagcttccactttgccctgaagtcacacatctggccaggtcactccccttccatggtgtcccactgcctgaaggcagcatctagtctccttaatgtagccataaagtcccacgtggcctggccttgcttgcatctctgccctgactctgctactccccccttcccattccatgttgtgtccttggtgcttgaggttcactgggtcagctttggcctggctctatttcaggccttaccacatgctgctttctgctcagatggttcctctcttccctcttccactcggtagctcctactcaccacccctcacatctcaacctggaag

SEQ ID NO: 32083 - DNA, 1028 bp, Homo sapiens
tctttgtgccaggtaaacaagcagtaaatatgaagcaataaacaatactctgccctcatagattaccttctctcagggagagtcagaaattaagcagataaatgaacaaataagtaagatgattttagacagtggtaagtacaaagaaggaaatgaaggggaagagaccaagaggggaggatgttgcctcagacgaaatagtttgaagggctgatgtgagaaggtgaccctcggatgagaaggagccagcatgaagcaggccagggtggtgatcatcaagtgagatggggggagagatggtagatgaaattggagaggtgggtggtatccagtgtgcactgagccttaagtgagagtcagtagactgaatgttctaggagaactggggagccttgcgaggactctttttgcagggaacgctctatgaataaggaggcagagaagcatgacaatcaccgtggtggggtgggcgtttcagtggtggatgtggggctctctcaaatgccaagtagtcaacctgaattctgacaagcctttctctttccagtcataaatagccaggaccaaaagacaacacaatcctctgtttcacagtgaggaatcaggcttggagggttggaggcacatggccagcaagggcagtggaagggctgagccgggattcaggacctgggacccagagccttgtgcccctccctgccggcccctctgcctcctggcccacctgcatgtcttccagcgacgtggatttaaaaatccgttccccatcagacatttcagagaggcttttacagtttgtttttagaagtgtgttaaaaggcagtcaccttgaatgacttctgcttgacagaagtgtcagcattgtcaccacctattccaaggagcactggcacatgacgggggtgccctggctccatggggaaatgaggaggagggcaaagagctgttcaccagagctagcattcaggttcagcatagctcctcactgactgtgtggcctcgagagagtctcatcttcttcaccctgc

SEQ ID NO: 32084 - DNA, 1029 bp, Homo sapiens
tctgaaaatgtccttcttttaccctcatccttgattcacccaatttggggctgatagttattttctctcagtaacatgttattccactaatgtctggcttccactgttgctgtggaaaacttggctgttgggctaattttaagtggctatctttcctctgtgattctttctttctttttttttttttttgaaacgaagtcttgctctgtcacccatactatagtgcagtggcatggtcttggctcactgcaacctccgcctcccaagttcaagtgattatcctgcctcagctgcccgagtagctgggactacaggcacgtgccaccacgcctggctaattttttgtatttttagtagagacggggtttcaccatgttagccaggatggtctcgatctcctgacctcgtgatctgcccgcctcggcctccgaaagtgctgggtgctgggattacaggcatgagccactgcacccagcccctctgtgattatttctaagatcttttttctttaatgctctgtggtcttactgcaatgtattggtattaattttattttatcctgcttcacacatgtataaatttatatctttcaccagttctgtttaattattagccattatctttgcaaatatctattaccttctttctgtgtcttcagtctctctttatgggctctaattatgaatgtgctagactttccttttctgtcctccatattgcttgatgtcctattcacattttccctcccctgatctctgtgagctgcattctggctagtttctctagttttatcttctagttcactcattctctcttcacctgtgtctactatgtggctaaacccatttattattttaggttaacaattatattttttcattccccaaagtttaatttggattcttcaaatctttctagtaacttttgatagtctgttgttgcgtgctcatttttcatttaattattttatttctaatcctttttgtagaaagagcacctaaaatctactctcttagcaaaatttcaata

SEQ ID NO: 32085 - DNA, 1928 bp, Homo sapiens
agagaatgctgagaataaagcctggactctggggaggccacgtaggagcctgctccaggccagtacccactgttgtcctgttaccatgtgcattctcatcctgccaccaactcccagcatgggcttaaaaaaatcattatctagtattttttcttagagatggaagtaagttttcttcccaaggtcagagcttttccaagaatgtgccagcagtctctgcagtctctgaatttcaaacaacatctgatggggtctggattttgagcatggacttctgtctggctctccaggctatttgatgggatccagtcttgctctgtcaatcagacttggaaggcaaatacaagtcccaggggaagtcaggctagaaggcaggacaggaacttgacaggaagagaccaaatgttgccctttggttctctcgtgtgtgtgtgtgtgtgtgtgtgtgtgtgtgtgtgtgtgtgtgtgtttgaaaaagagtatctagaaacaggatggtcaggaggtttcattcagagtgctaccttgaactgatggataatgaatgttgtaaacatttaaggtgccatagggaacaactctgtgatcaattagtgatgtctgacatcattgggtagaagctgcaatggcccatatgttatatattttccaacattctctagttcagggattttagattaacagtgtgactctctaggagtggtcttggctgttatttagacactttgattctggtaaatgcatctaaaacagttgaccctggtatgaagaagatgaacacctaagtactagctctgtcttttaccacccatgaggtcttaggaagattgggaggccttcctatgtctttatcttcttcctctataaatagttacttacttcttccagttattgtaaagataaaatgacttaatacacattatttagaatggtgcctgttacacagtgaactttcaaccagtgttggtttgtgagttgaatgaaagcctttaaaagatatgtccacctggaacctcagaatggactttattcagaataagggtcttttcagatgtaattaatgtaagtatctcaagatgagaacatcctatatttggatgggccctaaatccaatgacagatgttcttatgagacagaaaagaagaagatacacagagacacagaccagaagttcgcatgaagttggaggcagagattgtggaggcagagaagtaatgcatctgtaagtcaaacaatgtcaaggattgctggccatcaccagaaattaggaaaaagcatggaatggtttctccatcagggcctccagaaggaaccaactctgctgacatcttgattttggacttctggcctccagaactgtaagatgataaacttttgttgttttaagttaccatagcggtaatttattatggcaatcctaggaaactaatacagttgggtattggcattattattgttgttgtttttaaggtgaagatcaattccttggctgtctcctaatttgggcagtcctggaatttgtggactttgatgaagtcaaacagaatctcaggctacccagaagcactgttacctctgatggtggcaagtggcttgttctttggactatttttccctcaacttagtccttggaagatttaaatttgaaatcattagaatgtaaaaattgaagaggggcatgggcatttgttgatatggaaatagaatggctgacagtagaatggacaaggcatcctcctgcgtcggtgccagctattacatccaaatttgagagaaggcagggagttgaattctagaaaaagtgagctctgggaaaaaatcttaaaatgtgcaaagaggatgttaacctggagacagacccccaagcactgacgttcttggggtgatagaagcttagagaaaccacaggtccagggtatagatgatg

SEQ ID NO: 32086 - DNA, 1046 bp, Homo sapiens
aatgcacagttgcttactactccagatttctgtttccttcttttaactctgaagttgatggcttatagtctatagcaaaaacaaaacaaaacaacaaaaaaactatgctgaacataaaacttatagtgggtaagtaaaacttaactataaagaaaataactttagaatagaggaatgttctagttagcttcaaatgcaagaatcagaaaaccccacattccagaagctcatacaagtagctttgtaatcactagggactcacgttccttctgtcttgacattttgccatttttagcatttgcttgcacctcttagtgtgagacttttgcttcagttccagctatccaatccctattccaaccagcagaaaggaggcacgagaaagaaacctccctgtcctttaagttacacatcccatccattgacatctgagtcatttcacagtttattcaatatttgctgagcatctgctatgtgcaagcactgttctaagccctaggcagttatctaagccctgttcttagtgaacagaaaggactctatgaacaaaaatcctcctgttggtggagcttatattttactagatgtgagaacaagtgtgggggaaggggcccactggccagggttttaagccacatggtcatacttagcttcaagaccaagcagggaaatatagcctttagctgcattctgggaatccagttctaaggaaggaaaggaaagaatggatattgggggcaattggcagtctctgacaacatgaataaagtgtgaagaaaaataggtcaactggtatgttatgtcacttagcagtaaaaaacaactttgcaattacacctctagtctattcctaacagacatgtatgtgtatgcatgtatgtttagtgcatatctgagttcatttctgggtaccatggttggtagactgtgaggaggcatgtagtgagtgaacaagttgaggtattcctgaaaatctctttgtgctggggatagctgacctataaggggtattaggtccagagaagtccaagaagacagatgcttct

SEQ ID NO: 32087 - DNA, 1007 bp, Homo sapiens
aaatagattgccacctggatcactacagcaaatagatttcattttgggagacagctctgattaattggtggctgccttaaccctatgttgggaaagattatgaggtcccaggggactcagtgcaaggcagtgctgtaatcgattagtgatgtctgtcagggctggtgcacagaagaaatgagatccatttgtcttaagctagaggcttctccctaaagcagtagaaaatttaaaggcatgaattgttgtgattctgtctaccacaatctagactctgatctgaggtcactaagaggagagcctctacaacccagaatccctttatttgtagcctatcctggagctgcaactgaagagacagatttataaaagctattgcttttataaataaattgaaaataattccttgtttgctattatatcttctgaaccaactttttttttattgtggcaaaatatatataacataacatttaccattttaccagtggctttaaatacattcaaagtgttgtgtaactatcactgtcatccatcccagaactgaaactctatatctgttaaacagtaactcaccaataacctcatacccctggtccctggcaacctgtgttttattttctggctttatgaatttaattactctaagtacctcaaatgagccgagtcatacaatatttttctttttatgtctggtttatttcacttaactcgatgtcttcagggttcatctgtgtgtagcatgtgtcagaattttcctttttaaggatgaataatggaatattttccattgcatgtatatatcacattttgtttattcattcatcttcaatagacacttgggttgtttctacttcctggctattgtgaatcatgctcctatgaacagtgatatatacatatctgttcaagtccctgcttttaattcttttgggcatctacccagagtggaattgatggactgtatggtaattccattcccaatattttgaggagctgccatactg

SEQ ID NO: 32088 - DNA, 1074 bp, Homo sapiens
tgtagtttttggaattcaaactatatgtggagcctgttggtttctggacatgattagtgactggaacaatttaggtaaccctatgtctgagttggaaagattcatcatatctgtcaaatctagattgcaaaggacgcaaacataaaatttactctaaattttaaaataattttatgttaattttccagaagatgtttgtaaaaccattgatcatttatctgttaaagaaatgggatttgataaaaatgtagtaggaggcttcttttatatttgacttgctcttgggagcggatgcattaaagtcagtattttctttcgtatttgtctcaatgtctgcatagtctgacagcaataaatgtaaacggaaggttcagggtgtctgttttgctatgacatgtaaagaccaccttgggacttacatcattagcatgactttgagacgtgaaacatgcatttactgaccacaccatttggtcacatttgattctacggcaattagatcctactcgttctgtaagctggccaactttaatttcctgaccagagctgactattgttaccttagtaagattatatttaccctttctgtctactgcacactttattgctatgtatagaatcaatgtgttcaaattgaaggcattgctagtagaaatttcagtgttttactcactcacattctttctctttcagtctagtttaattgacctcaaagaacatgcatcttcattagcctctgcggggctgaaaagggattccaaattaaaatctctagaaatagccattgaacaaaagaaagaggaatgtagcaaattggaagcacagttaaaaaaggtaagtgaagtctaagaaaaagaatcatgcttatttaaaaatgaatttataaaatggaacaggaagagacgtttttaaaaagaaacaaaccccttatctgttgctgtctgctgataaaagaattaattaaatactcttaactttattgctaagaagtctatcaaatctgtctgtaaacctgaaaaattatctcagatttcctgtttaagaaaaacttgaaaaatagatcaaaatagtagc

SEQ ID NO: 32089 - DNA, 1041 bp, Homo sapiens
aaatacatgaaagaaaaactattagagttgaaaggtaaaataaacgaattcacaattatagtttgggacttcaacataccactatcagcaattgaactaaataaagaaattaaatataggaaactaaatgtagaaaattagaaaaatatggaaagaactgatcaattctatcaactgattgctatttatagaatattcccaacagctgctgaaatgcattatttgcaagtacatatataatattcaccaagataaactatatcctgcattgcagaacacacctcaccaaatttgaacaaactggatttatataaggtatgttctatgatcttaatgtaataaaactggaaattgataacagacagacaaggggatctataaacacttgaaaattatatatcacactgctaagtaacccatagtcgaaagatgaagtttcaaaggaaaaacatacatgaaactgaatgaaaagaaaaacacaaaatatcaaaatgtgtgggatgcagctagagcagtgctgagaagaaaatgtaagcattggatgcttatatgaaaaaagaagaaagatcttgaatgaatactccaagttcctacctcaataacccagaagaacaaaataaaccgaaactaagtagagggaaggaaataataaaaatggagcaaaatttaataaaatcgaaaatatagaaacaacagagaaaatcaataacattaaaagctccttctttgaaaacataaataaaattgataaatctccagaaaccctgagaaaaataaagaagatgtatattgccaatgtcagaaatgaaacagaagctatcattacagttcctgtagctattagcaacctaatagaagaatactgtagacaactttatgctcataaatatgacagtttagtagaaatggaccaatttctaaaaaaccacaaagtatccaaaagtaaccaacatgaaatagatgactgaatagtcttaaaaccatgaaatacattgaaggtgtagttaaaaggctcctgaaaaagaaatttccaagccctga

SEQ ID NO: 32090 - DNA, 1085 bp, Homo sapiens
aactagtttggttagataagtctcccaattgcagtgtcagcatgcagactagtctagtccagagagaaaagcaggaggtagaaaatcacattcgaaatgcttacaaggtcaatagagaaagagcctgagacaccatccctgtgttgaattgaaggaaaaatcaagaatgtcaattttagcgattgaaattgtcttatagagcacaggaggcactaatttgctcagacatctttgggcaaacttgcatgtagaatctgctagatcctgttattatttatgtgcagtcgtgcctgcagccagagaactatctttctggacttgcttctttctaactgagaataaaggcttgaggaatataggagatgtcagtagcaacaagcaacttgaattcctcaagataaagaccatggctgggaagaattgagcaggcaagtggaggttactgactctgcattaataaaaaatttacgagagtgcagaacaaatcatgccaggccatctttatcgttttctaggtggatgtgcaagattaaagaaaggaattcaatagctgtaatatctggaattgagtaaatcatctaattcagtgtctccacaaatctttgggggcagtaggggcaggggcagaagagggggagaccctcaatgagaattggccctgagcactgtcatgtggattcaatttggctgttgtaataaattacaatggaacagggtccattgggacgatgttgggatcaatagaaggtcaggctgtaacatctccagcagtggtctggaagaatggataacatactttattaagcttggcaggccaggaggttttggaactgttgtggtcactgccaccgtcattagcctttatgaagcacctgttgggtatggggcaccctgtgggttgttagatgaaagacagaatgtgtatgattgcccaaatggtcaacctgtctaaaaatgatgataagtacaattcattaaatacttacaaggctgccatgcatagtactaaaactttctcatggattgtttcttttaatcctaatgacaacctttaaagggtgggggtttcttcccattttacagat

SEQ ID NO: 32091 - DNA, 1039 bp, Homo sapiens
accacgaataataaaacacagaagaggaaatggctgttgctgtacccacacctaacatctccagccttggttctattaccctaggaaggtaaaaagggatgaaggtttgagtaagggtgtttcgccactcttccttcattttcctttttaataaaaagaaatgtggtatttacagagaatatcatcttattctgcaaagagaatgcttccttctctagttctcacttctaatttattggattgttaggaaggtgatattttatgagagtgatacaatgaaatttctggttatatgtggtcatttccaattatttgcatttccatgcaaataattatttttataataaaatgattatattatatactatttcttgaacccttactgtataccagacactgcactaaatgatttgcatccttaggttatgcgttcttgtaacagacctaatggcttataggcactatcataatcttggtttttaaaatgagagactatggtttagagaagaactcgttcagagtgacgtggcaggaaagggatggagctattcttaaccaccacactattctggtgtttttcctagtttatgatcctgcttccctcatgagacaagtgggatcattaacttttacagattagctaaactacaatttgagcaacatacctgaggttgatatataagaacccctctttttaggacaaaaccagcagagatgcagccactaaataatgtaattttaaaaaagtagggaacgaattacatgaataaaatataacaccaggtctgtatttaaaaatatgataagttatatgtagaaaaaagaaagattgtggtggctttcaatatctgtttaatttttcttcccccagaagctctttatgtaccattctaagattgttttactgcttcatttttaaaggattgacgtgtttgctctgttggtagtttccctttcctttggttgttggcttaaaggactgagacctcaaaagatgatttgagacatgtaagcagctttcctggactagacgaaggtg

SEQ ID NO: 32092 - DNA, 1050 bp, Homo sapiens
tctaatatctattaggatattccccatgattttgtcttttcataagtgagttctgtaatctttcttaaactctgagagccagtgagtctcttcctgttctgttatggtcagccagagcctaaatggtacattcatgtacagaatagagtctgtcacattttaaaaacaaagttagattcaaaccaaattatagaggctttaccaaagagttaaaagtagagacactgcattcgttagaaactctcaggatattggtgatttgatgaatcatattattaattcatttctgtagagctcttcatggacaaggtcctggtcattggatcctcttcctcttgtagcactagctaattgacacagaaatttagaagagagctcaggagagattactaaggacccttgaatcaaaggggctgtctaggatacgtgggaataacagagagatggttatagtagcctgtcttggagcatgttctaaggattcagaagaagatttttcatttaaaatctccggctgcaaataataacaaaagcttacatttattgaacttgcttatatggaacactgtatgctgactactctgtttactcatgtaaatagtgcttgttacatgcactgtttacttacttttgaccactacctagtgagatgggcacaattattaatctaaggaattgtggaatattgaggcttatggtaagcttgcccaagatcacatagcctagataaaagtgttttttgtctttaggaatatataataaaataattaatgtaaattaagagaataagcctttttttaatttcactttttaggatgatgacaccaggtgtgagagtgaattagggaaaaatatcacacttgttcattttgtcagaagttgagactaagtgcgctcattcttgaggaataaatgacaacagttttctcagtgaatattttgggatggcacttccaatgcataagtgacaaatgaccacttttgccaatgcaaatgttttgcagaattttaaacttccctccacagccagactcaaaagtttgggaacca

SEQ ID NO: 32093 - DNA, 1048 bp, Homo sapiens
tgtatgtaacgtgcatgtttgcttactgtgcatgcaagcctccttcatgaatattcatagctctttttgcaacctgttaaatatgtatacttagccaacccatttggcatgaactcctgttttgccctgtcctcccttgaagtgcttgcttttagtttctgccagaggatacacctcttagccagcaggatggccaggctgcaggctgcaactctctacaagaaataaagctctcctctctaaatatatgaaccttatgattcttcagttgacagtaataagcctatattcacaagtgatatgtttccctgagctatgtgagcgattctagcaaatttccaaaacttaggaggggattacgggaacccctgatttataattaagtcagatggaagtgtaggtaacctggggacccactacatgcaattggcatctgaagtgggagggtggggggcagtcttgtgtgactgagtccttaacctgtgaggtctgtgctaattctgagtagatagtgtcggaattgagtttaattttaggatacccagtttgtatctgcaaagaattggagacttgcttcatgtgaaaaccccatacatttggtgtcagaagtattgtgagtatagaaagagttttcttcttttaatgtaacattctacattcctagagaacacacacacacatatacccactgcaaagtgtgtggaatttccatatgtgggcattaaatcatagagggctgctatatgaaggtattttcctacattcttgctcaacagcaagcgtgaggtatctttatggtcagcagggactgatgctccttagtgttttctgctctgaaactccattaaaaaacttgattcatcttttcagtactattcacatgactaatttcatagaagctttagagagtaatatgttccagctctttctttcatttgttgtcatcttttccttaatgtatcccatctttctatattcagtaaattaataaagaaaaattgtgttcatacatggctctgatatagaatctgatatctcttataaatta

SEQ ID NO: 32094 - DNA, 1055 bp, Homo sapiens
gctaattttttgtatttttagtagagacggggtttcaccgttttagccgggatggtctcgatctcctgacctcgtgatccgcccgcctcggcctcccaaagtgctgggattacaggcgtgagccaccgtgcccggcctgtcctctatacttttaatgtcctatagcaaatgaagtattcgatacatttagaaaatgactggggaaggaattacaatttgttacagctttttggacaacttaagaacttcttatgatttatcaaaatattcttaatgggttgtgtataagctgttcttacttagctcccctttattgagcacttaactttgtgttgggcactcaactaagtgccaagcactcattttaaatttaatcccattcaggatttattctctttttaaagataaggaaactgaggcacagagaatttgtaacttcctcagggtaacatagctgccatgctattagaatataagtattgttctttcccttactcagtcttgcctgtagaaatagtcactcctcatagcatatatcataaccatagcaatagtaacagtagtactcctgaagctaaccttttcattaaaacatgaaaactcggtagacctagttaagtatataccaagtggtgagtggcaactttgtggaaaattccatcccaagcctggacctctctcttgagcaccagcaccatacatgtaaccatctagtggacttcctgtgggttgcagaaacatattgggattagcctgtccagaatggaacttgtcttcttcccaactattctccccctgtgtccttgtcttgctgtcaccaccacgtacctcccaacccaagccagacactgggaacctcatcaatttctctttctccatcactccctgtattagttttttattgctgcggtaacaaattaccacaaacttagtggttttagacaatacaaatacatgattcttgtacagtcctggggatcagaagtgtgaagtcagtttcactgggctaagatcaagatgttgtcaggcctgcattccttctggaagctctcagg

SEQ ID NO: 32095 - DNA, 1041 bp, Homo sapiens
ctttctttccttccttccttccttccttccttccttccttccttccttccttccttctttccttccttccttccttccttccttccttccttcctttctttcattttggtggtatcttagaaaagtggtagggtaaagaatcctgtttaccttgggtttgctattatttattggagctctgtaggtggctactaataaatagtttcaatcgtcaaatctttgtcaagaaaatggactatattgggtccatttggggctggtatagagagtggtagcaaagagggcatgcaggcaggatgaggcaagtttcatttaacctgcacagagtgttcaataaaatataaccaatgtttaagaacctgcagatttcacatagaaatcttgacataaagttgtatatatttaatttataaatacataattattaaatattaaatattgtagtatatataaaattaatttatatatatttataaataaaaatatatatatttgcctcccttgaaaaattgaagatctagcatctagacagcacgcacactctgtagtccccactggccccaccacccaacatttctctctgactttgaggctgaatgtagttgcagtatgcaatcaagatatgatggtgttggaattccagaattcttgtgcctggcccagagtttttttcctggtggacatttcagtccataatctctggcctgaaaaaaggacccaaagctctcctgatgcacagcctttttggcagattggttcttgggcttttgtgatggagaattagaaggaaaggaagagggaagcaagacagaagggaaggagaagctaagggtagaaggaatttagggggatggagctttttaggtgtctggcctgggaacagctgtagtatttgagaacaacagatgggattttaagcaaaattgagaattatgtgtccactccatagtgttcaagaaatacaaacacggatttggcttatttttgaaattgctggactatgtatcagtcagggctgagttagagacagaagctacacca

SEQ ID NO: 32096 - DNA, 1047 bp, Homo sapiens
tatagtgagtaaaatatagtaagcatttaatacatgacagctattattatttctttatatatatatatatattttattatacgttaagttctagggtacatgtgcacaacgtgagggtttgttacatatgtatacatgtgccatgttggcgtgctgcacccattaactcatcatttacattaggtatacctcctaatgctatccctcccccctccccccaccccacaacaggccctggtgtgtgatgttcccctccctgtgtccaagtgttctcattgttcaattcccacctatgagtgagaacatgtggtgtttggttttttgtccttgcgatagtttgcttagaatgatggtttccagcttcatccatgtccctataaaggacatgaactcatcattttttatggctgcatagtattccatggtgtatatgtgccacattttcttaatccagtgtatcactgatggacatttgggttggttccttttgggggatatttagttttctgacactcaaattctcgaagccattactttagattttaagtgctatgagatcagaatggagagagagagaggagagcctccttgggacagcttcatgaaagagattgaactgagagggatggatgggttgtagatctatatttgcatacaattcagtatctagttgcttaggccatgggaccataggaggtaagaaagcaggtctaagggtttctaacttttggagactaaatgaaaatggatgtggtgaaacaggctctaaggacccttctaacagactctaacagaccccatgacccttgcctcctagactcatgcctttttgtgatcctctgccctgaggcaggctctgtgacttgcttctaaccagtagaatatggcaaatgtgatagtatgcacatgatcatgttacgtaagattgtaatgtctggcttggaaggagtttcttttttttgccagatttgaagaagaaagctgccacattgttagctgcctatggagagggctatgtggcaaagagggtagggtaatctccaatca

SEQ ID NO: 32097 - DNA, 1457 bp, Homo sapiens
gaggctgaggcaggagaattgcttgaatccgggaggcagaggttgcagtgagctgagattgtgccactgcactccagcctggcaaaagagcgagactccgtctcaaaaaaaaaaaaaaagtagtatccagtaggtgctcatggagatacaggacaaaaagatttatttatttatgacacaaagttacaaccggagcatctggttagctgggttacatcttcgaatctctaagagtctcctctaggtagcaagtatctgtactatcactgtaggaaatgtgttgaattcaaatgtgggactagagtctgaataatagattgtaataattagtccttttttgtggcagagagggagagtagcaaagtcataggttgatttgtttaaggtcatttgttcctataggtgtaaatggagatgccattgactgtattttcctatggtcttattgcatgagactggaattgcctggaggattttatcatggggatccagtgatagacagtgtgttcagaaatcagtaagatcaaaggagtgggtactgtttgggataatctaagaatgagtattttctgaaccaaaaattataaagaagaggaaagaacagagaaaaagttccattatgagtggacaacaactaggactctacagaagatgagaagaatgatcacgtggaggtggatgaaaaacaaaaccagaattagacagggttcttggcccgctgccttgggtagaagctgtcccctatgtgaggtcatcagctgtgtgcttctgaaagctggcgacttctagaggatctctgagaatcctcccttgaggtcctattatggagtagccttccagttctgtggaattctgcattgcttctgtagttgtgaacccaggaattgactccttagaatttcactgctatatttattgctaacagtaccggataaggtctcttccaacaagattcaaaaacaggttttttttttctgattttttttttctcaatagacaagaagattataaagatgctatttaggacgatgttgtgggaagggggccttaacctgtttttgacaagctgggcatagtacatgattccgttgtaatattttgccacatctgtgtgcagcaggacagaactactagaattcgagatgaaatccctgaacacatgggccttccaattacccattcataggaggatagccaatgtgtccttgagggagtggattgcatggccataaggactaatggtagtacttttggccaagatgaaagagctgctgttagatcagcacctttaactcttgcatgttgttgaaggttatcttctcgtctagcctgaaatctcctacagtttaatcttttgtctgttggtatgactgtattatggtcaagtctattttaaaaaacatctggggtggctttattttatatccttccaataaatggggctaaatgttttccca

SEQ ID NO: 32098 - DNA, 1072 bp, Homo sapiens
caacatggtcatttattttgttggccgtcactggtttagaatggaaaaaggaattattaactaaatgatttttcattgttaaaatttcagccctatttaaggctccctttcacagtcagctgtagatttaactaccaaaatttagcaacctttgtgaagttagatttatatagctgttgcctgttcttggactccatctagatgggcctacccttcctagttaaaggcagggcagattcctgccgggttcttcaaggtttgaacatctgtttactcagagaatgacatctatgggttctcagcctgggtttcttgatttctgggaattccttccaagcagcagaatcaaagggtagatgggttgagataatgggaccagacagttacatgatttattaactccactgactctagctgaagtcctctggggaagcagcaggccagctcccttgagatcacaggcttgacctaatgtctggtctcctccctggttctgcagcacaactcctgaaatggcactaacaagaccatgtgtggccctctcctgctgttgcaggtgggatggtctcatttcatttgcaggtggcctttctcattctcatgccactgtcatgagctggggtttccctggcagggaaacagtatttcgcatgtaactctggaaatcgtaggcactgctttgtcatgttctttctgtgacactgactcttgtggttaaaagactgcagatcattccatagtgagtctggcttttctctgcattttacactatttctctgtgaagtctgactcatgcctcaaggtctggttgactagcacgatttctccagcatttgttaattaaactccttgatatatttccctcctcccatgcaatagagtcccccaatgatcaatactttcaacctaacagctattgcttaactggcttatattttttgctttttcccatttatctacaatgtatttagatgggaaagtgagctattctttgttcatcatttcaggaagagttctataaaatatgcattacaatttttgtactctttttttttggtactcctaatactct

SEQ ID NO: 32099 - DNA, 1068 bp, Homo sapiens
ttagttattgaagagaccagattgtttgtcctatagtttccctccagcctggattttgttgattgcatccctgcagagagtttaaattgttactctgttctttgtgtttcctggaaatttctggttgaatctagaggctgaataaaaaccaagttcctttttttttcatgggagaggtttgtgctaaattttggaaagttatttcttcagggtagttctcttttagggaaataatatacattatttggaataaaaaatgtgcttagaactaaggttcttgatttctttgttgtaaaatgtacctgtaaaatcttgttatatgaaacattctgcagtactctttatctagtcttggtatatttataatcatgaagaagggatatgggaaggttctaatttattagtgaagttttaattttttaagctatatatagagaatgtaatgaaataatttattgatgtaattgagattttcagcttggttccccatgccgacattgacattatcaactactatgaagtgactgtgaatttcaaaggtgttttgagtgcttagcatatctatagtccatgcttgcatccttccctgcatgtgtaataagccagaactctggaaggacttgcctactttcagcctctgtgagtctgcattaatgtaaggctaatgttattttgaatagaagtacgcaggctctaatggttttggattgaagcatttactgtaacctctgtagagtggctggtttgttacccatgtatctatgacagaaaaattcaattcattaagcatatggcatgaatagcatgatgtttgagccctgcggtaggaaggtattttgtttgcctggggatttgtagtatgctttgttggctccacctcatttattacctgtgcccacttgacatggccatcttgtacagaggaagaactgggactaaacatcagcagatttaagttctaaacctggttctgctgtaaagttggcagatctagcaaataaaaatacaggatgcagccatgcatggtggctcatgcctataatcccagctctttgggaggctgaaatg

SEQ ID NO: 32100 - DNA, 1032 bp, Homo sapiens
tggtacttgtgaccatgaagttccatgaagaaggcccaaggaacctgctgatcacaagtttattatgcacctctggtgcgatgtggccgatgggaaattatcaaatgtagacaaaactaatgcacactgaggctgtattgaaagcagcatggtatccagcttaaagaaagtgatggtctcactttcagacctttcctgaagcacagccttcccttctgtccttttatagactggaagatgatagagaacagtgaagaattgggttgatggggatttggaatccagatcatatgatgacaggctgaggatgtttagtctggagaaatatggacttctagaatgagtgaacatttgataagtgacctcagatgtttgggtctttcggtactgtgcttctcaaactttaggatgcacactaattacctggggatctcgttaaaataaagattcggatttaataggtctgttgaggcctgggattctttatttctaagaagtttttagatgatgccgatactgccggtccgtggaccacactgtgagtggcaaggctccagaggagctctgtccaatggaacactgcagggatgggaatattctatatctgcattgtcccatgtggtaaccacctgccgcttctggctattgagcactggaaaggtgtctagtgtgactgataaaccaagtttttgattttatttaatttcatttaaatttaaatagttacatgtggctagtgtctactgtattggacaatgcaattctagaggatacaactgaaactattggaacttaaaagagtttagacttcactttcattgtatgagttttgaaacagttatagctgtttggtactgagaaggcatctagaaaattagaatagtatttaagtcaatgaccatctataaggaatacagaagaagggcacttctactgagtggggaggtggatccaagaggaggtagcatgtaattggaacggagggttaatctacttaacacagtggttcttagctagggacagttttgcttc

SEQ ID NO: 32101 - DNA, 1108 bp, Homo sapiens
ttagctcaaaccccaacttaatatagcatttcttctcttcagtaacacctcataatacaagaaaaatgtatggaagtgcaagaacaatcaccaatctggaaggtagcccttccagatcccctcgtttgccaaggtctcctcgtttgggccaccgaagaacaagtagtgggggaggtggaggaacaggcaagactctgtctatggagaatatccagtccctcaatgcagcctatgctacgtctggacccatgtatctgagtgatcatgaaggggtggcttcaacaacctacccaaagggcactatgactctgggaagggctacaaatcgagctgtatatggaggccgtgtcacagccatggggagtagtcccaatattgcttctgctggactttcccacacagatgtcctttcatacacagatcaacatggtgggctgactggctcatcccatcatcaccaccaccaggtcccctccatgttgaggcaggtaagagacagcacaatgttagatcttcaggcccagctgaaagaactgcagagagagaatgacctcctccggaaagagctagacatcaaggacagcaaattgggatcttccatgaacagtattaagactttctggagtcctgagcttaagaaggagagagtcttgaggaaagaagaggcagcgcggatgtctgtcctcaaggagcagatgagggtttcccatgaagaaaatcaggtaggtcatgactcatctcagtatttttcagccttggcttctcactgagtagttgatgctttgcagatggtaccacgacctgtgcagaagaaagtttggcatcatcaagaaggttatggcttagtatgtgtttgacttagacactatgagagagcataggaaatataccattacagcttgtaatttccttattttccgataaccttttcacatggttgcagatggggagaggggtggggtggggaggatcacttgtcattgcctaacttttgtacttggttaattttgttttctttttcagcagttgcaacagctgttcagatgtacctccttctgaatagaagaagaaaatgttaatttctgtaagaataaagactttaagagca

SEQ ID NO: 32102 - DNA, 1027 bp, Homo sapiens
tatagctggagcaagcctagcttgcatgctgcagagttcatgtgtatgaggcccgtggggtatggttgggccagaggtggggagaaagggtgttggcggaggtgtggggggcaggccttcctccggccacaatgttttggtggaattctgaggagtctaagtattctaagttcaaaattcagatctcaccttccccatctctgtattcaaggtaggaaggtagaatgtattttgtttaccagtttgttagctcagtttataactttaaatgtataggcacatggtatctgggcatccatttgtactcttgccatgggctctaagagtgttagcaccaatgtaaaaacctgggttgcagtgtaggggtttataataggagggaagagagaccccaacaaggaattgcacatattaatatgaaattctaaggtatggaagtgcttttgggtcatatacggattactggacatgagagaggctttggggatgctgataatgttctaagtcttggtctagacagtggtaacacaggtgtgctcactatataaaaattaaccggtgcaggctgggcatagtggctcacacctgtaatcctagcactttgggaggccgaggcgggtggatcacttgaggtcaggagttcgagaccagcctgaacaaaatgtcaaagccccatctgtactaaaaatacaaaaattccctgggcttggtggtgggcacctgtaatcgcagctactcgagaggctgaggcaggagaatcgcttgaactcaggaggcagaggttgcagtgagccgagatcacaccactgcactccagcctgggtggcagagcgagactctgtctcaaaaaaaaaaatcaattaacgtgtgcaattaaggtctaccttcatcatgtatatgttctgctttaataaagtttataaaaataaatgaaaagagaatatattaaaattaaatattaaatgtaaataatataatctctatattttataaatattgtaacagatatactaagattagtatatta

SEQ ID NO: 32103 - DNA, 1043 bp, Homo sapiens
ggcatgagcttaccacacctggctgttttgctatatttttaacttgtggatttagctgtgtactagataatagtttattactttaacaaaatttttaggggtttcagatccttaatttaacactttgaaataaattgatggagtctgaaatttaaataatggaaatggttaatggaaagaacagttaactaatatttgggcatgcagagcccttgccttgtagtatggaagacagtcagcctcttgactcaagtaccttgccataaaacatgagccaaggcagctgaacatgtaatcatgctaaatctacacatggaaaacagtaattataaaatgagtttgggggaactaaaggagagagtactgatgtgtggataggcgtgtttgagtttcatagagctttttggagaatgatgggaaagcaattttgaaaatctctgctgtattaagctggactttccccttactgattcacatcatggcattcacagatgaaatggtttattactgggactttgaataactatggatgcataatattgtagcctgcagatcatgggggaaggcaatgtccatttttctctctagttttagagaactggggttgatgtcttcagcacttttgaacagcagattgagtttgactccaaagtgtctgacagggctaagtttagtgaactgggagaattctatggcaactttgaggctgaaagccactgtgttatattctggtagctttgggcttgtcaaggttaacttctgttgatcattagctgtgtgctaggtattgtgctaagtactttcttatatcatctcatttaatctttcccaaatctatacgaaaagtctgatatccccattttacagatgagaaaagtgaggatgagagaagtaaaatactttgttcaagattgcgtatccagaagacagaaatatgactccagccaaatctgattttgaggctcctcttttcctttttaaaacactatgtctctcctctctggctacaattacagaattgtcctataactgccatggaagtg

SEQ ID NO: 32104 - DNA, 1363 bp, Homo sapiens
tgtagccagtgtaagttgtaagttattatagattatgcatttctacctatattgtagacagtgcatactatggagtatgcattttgtctttgaggtttttgtaagcattattggttactattgtcagcaaaggggttatattaataaaaaggtaggaaaccagatatggcgatttagcattgagctactagatttccccacatgcataaagcaatttaattgcaagatagtagagctgtcatagctttaatcttttgtgagatggcctctgctttggttccaggttctgtgtaaaatgaaagatgtacttttgtttttgatgaaaaaaagcagaaatgatcattcatttagtgctaaccaactagtttagtaatccagtgaagctagatgtcaaaaaattttattttatatttgtcttgtcaaatactgaattaccgtataactttagatgctgttttgacattaacccctttggagctgggagttgggatttcccaacattaaacgtgaacacatttcgcagaagcttttagcatcggattatctggacattcacatctagtgtgagtgttgtgactaagtgaacttgtggcagaagaccaagctttaagggattgtggacttgcagaccctgacgcgttatattgtgtgagtagtgtataattttaaaacttaaacaaactgtgtatttcaatagaggaggactttttgttttttaaatgtagctcttttagaaaacgatgaaaaggatgaagaggatatgtctctggattcaggggatgaaatctcacatatagaagtatgcagcaattttcattcagaaatatgggagaaagagaccaaaggatcacgtggaacagatcaaaaaaagaatactcaaattgagttgcaatcgtctcctgatgtgcaaaacagtttattagaagataagacttaccttgattctgaagagagaacttctattgatatagtatgctctgaaggagagaacagcaattcaacagaacaagattcatatagtaactttcaggtttatcatagtcaattaaatatgtcccatcagtttagtcattttaatgttctcactcatcagacatttttggggacaccatatgccctttcatcaagtcagtctcaagaaaatgagaattacttcttatctgcttatactgaaagcttggatagagataaatctccacctcccttaagttgggggaaaagtgattcttccaggccatattcacaagagaaataactgtagtaactttttttttaagagattgttgtggactttgtttattaacaatttatatttcattctctaaacaaaaggttcttgttctttctcaaatgttttttcttt

SEQ ID NO: 32105 - DNA, 1045 bp, Homo sapiens
ctccatttacagacacactaaagggcaccactgaggatgacgtgttgacaggtcaggtggaggagcagtgtgtgccagcagcagaggcagagccgcctgcagtgagcgaaaccacagagaggacagtgttaggagagtacaatctcttttctaggaagatagaagagattttgaagcaaaagaatgtttcatatgtcagtacagtttccacacctatcttttcaacacaagagaagatgaaacggctttccgagttcatatattctaagacttccaaagctggtgtgcaggagtttgtagatggtttgcatgagaagctaaatactattattattaaagcatcagccaagggtgggaatttgccaccagtcagtcctaacgattctggtgctaagatagcatcgaatcctctggaaaggcatgtcataccagtttcctcaagtgacttcaacaataaacatctccttgagccactgtgtagtgatcctttgaaagataccaactctgatgagcagcattccacttcggctttaactgaagtagaaatgaaccagcctcaacatgccacagagttaatggtgacttctgatcatattgtacctggtgatatggcccgggaaccagtagaagaaacaacaaaatcccccagtgatgtaaacatttctgctcaaccagctctttcaaattttataagccagttagaacctgaagtatttaatagtttggttaaaatcatgaaagacgtccagaaaaatactgtgaaattttatattcatgaagaagaagagagtgtgctctgtaaagaaataaaggtaactaaaccagaaggtaatagtaatgctgtacaaacttctcttgttggtgtgacctctataaaatggaagttttttgtatttaaatgttttgtgtttaaatgttaggccaggaatggtggctaatacctgtaatcccaaaacttgggaggctgaggcaggaggattgcttgaggccaggagttcatgacaagcctgggcaacataacaagacattgtctcttaaattaata

SEQ ID NO: 32106 - DNA, 1121 bp, Homo sapiens
tgatcttttttatattttccttcagttttgttgtatctgactcttttcagaaattaaagtgttgtttttttatttgtaagaaatgtgaaatgactacatctttgtagttatttatttcctttgggagttcccctcccccgctaattaaagttactagtttccttgaagaaaatcttcaccatctccttctaggaaaatgtggttaaaaaaaaaaagaaaccatgaacaacagatatataacatagaggaaagttcacaaatctttttttttttcccctctgatacagaatctctctctgtcacccaggctggagtgcaatggcatgatcttggttcactgcaacctctgcctcctgggttaagcgattctcctgcctcagcctcccaagtagctgggattacaggcatgtgccaccgcacccggctgatttttgtagttttagtagagacagggtttcaccttgtcggccaggctagtctcgaactcctgacctcaagtgagccactgaacctggccacagatctttattgtacagctttttgaaattttacatatgtacatgaccatcacccaaatcaagatgtagaacgtttctagcatcccagaagattttcttccacattctcctagttagtactctccttgttcccaagtaagtgctaatctgattagttttgcctgttgttgaacttaggataaatagagcctactcatgtcgtctctcgtgtttggtactttcatgcaatatcgtgtcagggagtccatgttttgcatctatcagtaattcttttctgatttcggggttttaccatgttggccaggatggtctcaatctcttgacctcgtgatctgcccaccttggcctcccaaagtgttgggattacaggtgtgagccactgtgcccggctagtagttatctttcttatgcttcagaatgttccatcagcacctgcattcctcttatttggaaataccatctttatattttgtaagctaaagtgtagacatctgaatgatggtgcctttagagaactgactactcccctttcacttaaaagttaaaatactgcaattatttaatggcaataagtttttttttaaaaaagcacggtgtctcatg

SEQ ID NO: 32107 - DNA, 1036 bp, Homo sapiens
ccctgcctttgtttaaaagttgtatgcatgtccccattctttctcgatgtcgttttgggatatttatttcaaggggaagatgatggcaggagggttattggggtatgtaaggtaggcactgaggaactaacctgtattaatattttctgatatcttttgtattttaaatcaagttgatggggggcgggggcatgggttgaacctagcacactacccatttttataactaaagttttattggagtacagctgtgtccatttgtttaggtattgcctgtgatagactagagagtctggcctgcagagcctaaaatatttaatgtttggcacttcagcacaaacgtttaccaatccctgttctaaattaacataaaattatgtttcgagggaaaagatgttttaattttgaaactagagtataactttaccatgttgattttacgcatttgtaatgtttagattgaagcacgtgaattttcagtgaaaaaacagtttattcttgacattaaaatgaattggaaataaagctattcagtgtgtactttgatttttaggatccaaatttaattagcgtgaataattttgaagattgcagtttgtgtcccagtgttcccattgaacatggatttcgtagacaacagtctaagtcaaataatgttgaagagactgaaatacattggaaactgattccaattacaggtaagaaaagtatacttggacttgtgtttgcttcattttacttagagaccagtttcctgaatgtttccatcttctgtggatttcactcttgggtcactaggtgcttcatcttaattggtgctgacatcttcagtgtcttattttgagtaatacagtgttcatcactgagtgttgctgttcttggtcagcatcagcaagcacctgcaaaatcaccttaaaaacagggatttaagacacactgtctctatggagtttagcatgcagactgctgaatgaagactgttggcagaaactgagtttttgataaggtgaggtagctgcagagataaaatggtgct

SEQ ID NO: 32108 - DNA, 1081 bp, Homo sapiens
taaattttgtccaagaaatgcacacaaggttttctgaatcagagacagattttgtgaataccccacagtaagtaaaaatgtattggccctcctttgccttagtccttaactccctagggcatgcaggcctaagccacttgtcctgagtagctgcatactacataggtaaaagatggggacaaatactttctatttgcttataaaagggaagaggcagctattccctgctatcctgaatgtgtctctttgaaatgttatgaatattaactccaactctttggtatataaataaaatcgcttcaggagccatttgtttagccctcttggaccaagagacatttccaaattcctggaaactcattctgtattgaaatgtaaatgcttagggagatctccatagtcttcttggcacctctggacttaacctaggaacctctctttgctgtaatctcttaatctaccccacttgatgctctcagggagataaaataagttttattattgtggagcagagcaattaactagataaatgactacagatctaaatcttaaggtatgcgaagagtaaaatatttgtgggggatatgaaagcaaacattcccttatctttatatcatatacatttttgtatattagaaggctaggactttttgcagtggcacgtagaaatccagggaagttttcttttcacccagggagatgatacacgaaataagattatattgacttttttttttttttttttcgagacagagccttgctctgttgctgggctggagtgcagtggcgtgatctcggctcactgcaatctctgcctcctgagttcaagtgattcccttgcctcagtctccggagtagctgggattacaggcgcctgccaccatgctcggctaatttttgtattcttagtagagatggggtttcaccatgtaggccaggctggtcttgaactcttgacctcatgatctgcctgccttggcctctgaaagtgctgagattacaggcgtgagccaccgtgcctggccatctcgccctttctttagtgtattcttttttttttttttgacggtgtttcgctctt

SEQ ID NO: 32109 - DNA, 1039 bp, Homo sapiens
gcgtggtggcacatgcctgtagtcccagctgccctggaggttgaggtgggagaatcacttgatcctaggaggttgaagctgcagtgagctgtgatcgcaccactgcactctagcctaggtgacagagtgagactgtcacaaacgaaacaaaagatctttagaataaggtgagatattcgtagatatgctcttctattttccatcaagtgtacttttttgtgtatgtgttaagattgctagagttgaaaatacagataaggcaaacatgtttttaaaattttctttcagacctgagaaattagatgttgaaacagttatgagtattgatcatctgaaacagaaaatccctccagcactgttttataaggaaacatacttaggtccaaatgaaggtaaggtaatttaattttattgaaatgcattagaagcagacttgatttggatatttactatgtatttttcttatgtcagttttgaagaatggaatgtattgcagcctttatgaagttgtggaaaagacaagaattggaagtaacatggagagtttactgcaaaaactagacagagaaaaacttgtgagtgaaaagttttttaatgtttctcattctttgttacaaatatgcatattcatgtgtgatcatattagtgtttcagtttatttttgcctctgaaagtaccatgaggtgtctgtctgttgctgctgtttagttaacagtgttttactgtggttctggtattcttttatttgggccatggtattggagcttgtgcaaaccagtctttcccatggaatatcttttttttttttttttttttgagacggagtcttgctgtctcaccaggatggagtacagtggcgtgatcttggctcactgtaatctccgccttcctgggttcaagcaattctcctgcctcagcctcctgagtagctgggattacatgtgcacaccaccacagccagctgatttttgtatttttagtagagacggggtttcaccgtgttgtccaggatggtctcaatctcctgacctcgtgatct

SEQ ID NO: 32110 - DNA, 1205 bp, Homo sapiens
gcattgagtgaacatccatccttgtaccttgaatattccatgaatgctcctgcttcagggcctctgcatttgctgttctctcactttccccagtaagctgcataattcattctacatttcttcacgtatttccttatgattgaggtttctctgttttttttttttacctctatactcttatgtctctttttatagcactgaaaaccatcatgatctgttatatatcattgttttctgtcttcctcattagatttatgtaggttggaactttgttctgtttatctctataatcctattacctagaactgtgcctggtaaataagagcttagtatgtatttactgaatgatgaattaatatatttatatattgaggctgtgtcttctaatgtcagcaaaataattgacaagagactttggtggacactgttctctcttggttaatatttttggaaaaaacaactcccttaaatttgggtaaatgtggtaatttgagcgaagtaagtacttctgttttctctaagtagacttggatttactagactttgtaatgagtaatttctttgttcttcctacctggaggaaggacttaactgtagtatgccattaaaaattgcacttatatcatcttacatgttaatttttatgattatactaatgagtaatgtttttcttttcttttaaaaaatttgtagatctaacagctttaatacagatagaaacataggtaagagatttatgtttctttagttttataaatggaaagaataagtacatatagcaaaagattaagtgctttgtattatttttataatgaatgaaaatctgcaaagtatgaaaagttataatgtagcatcagcgcatttggttgtccaagcataagatctcctttgaaaatctgctactgtgaatagactgaaaggttttagcactttaatagaaaaagataaaaaataaaacaggtttcataactcagctttttaaaagtattaaattcaccagaggtgtaggacttagaattagagaagattgaaagtagcattgacattaaactattttaaagtttctttgtttttttttcttttctgagacagagtcttactctcgcccaggctggggtgcagtggcgtgatctcggctcactgcaacctctgcctcctgggttccagcgattctccagcctcagccttctcctgagtagctagga

SEQ ID NO: 32111 - DNA, 1041 bp, Homo sapiens
gtattgaatactgagttccctgagtgaaatggataattcatatacataatgctttccctatttggatagacacagggttgtttattattactacctcaaatagtgacccataattgagatttttgacttaaatattttctttaaaaggagtgacaggatacattgatcgagatacatgtagtgttaaatgacctctgaggacataaaatagactaccagaaaatgtacattcagaacatgaacttaataaattttctgaactgctgttagcagcaagttgacttgaaatccttaaaaatagttgcaggataattttattatcttagaaattatcaccagaaaaaatgagaaattataaccggcctaacgaagccactgaggcatttgcaatacaaaataattaggatacagatatttattgttaaagctaaaatgctttttccttttcatttgcaataatttttttcctgtcagctgtcatttttagtacattggacatgacttggacattgctttagagtcaactggaaatgttaagtactttgagaataatttggatgtgaacttttatgcagattcatgatttgactaattttttacttacgattagattaatggtagaaattgtattgggtagcttaactaatgaaaatttcttttatgtagactaacatttcatagaaattggcagccatgtgatacctttttttgtgtacattttatatatctgaagtcattttgtttagaaacaaaatcgtgtaaaacccaacttttaaaatcataacccaacttttaaaatcatgcttggcccactttggttgtgaaagcctataaagacctccacatgctgctttccttgccaagtttttcacagtttaattggggacaattatcacaaagataagatgtttttgtcctacgttccataacacaggtttgaatgaagacaatatatgccttctaccctcttttctgagctttcatttgtgtttcgtatattactgaattgttgaatttgtgaaagagtcaattttaaatcac

SEQ ID NO: 32112 - DNA, 1095 bp, Homo sapiens
ctgctgcccctccccgcggaagttggaagtagctcaggtttgaagcttgtccgtaaggctgcagctcccagagaggaaagatggtgctcggcgcccctccctcccagcccctgaaagcagagaagccgttgtgtcctcctaaggatgcttctgagaagtctcgctatggaaatagcccgtggccatggattctggggctttctccaaggccattgccaatgttctgaggaccatgagtgcttctccccgtggaaattcttcagttctgtgtgtctacttgaaatgtgcttgatgtcagcgtcctcccttatttagaaatctctattagtagatgtgatccatgcacactgctgttttccatcacacttcatttccatgtagatttttcccccttgtttttgaagcgttagattaaataggtttttctctctttaaattcgaacttagtattgtttttcttatatttgaaaagaatggaaaggtaggttcttggagcagtaatttcccaatggaaaaaaactaatgagaagttaccttattctcaagagtcaccaacttggtcttctagatggtagaacttcaggttaaaaaaaagtccagtcttagtttttggaacccatatggaaacagttacattaattacttgtacttttaaaaaatcttaatgccatattgttaatatggagtcagaattcctaatggaggtcaaaattagtatcgttttttgttattggggtattattttttaactatccagtaaattttggatattctgaatttagacaacttcctttttgccctactgtatggttaggttttcattatttactttggaaaaaaataggatttgtttttttcccgtatcttttccatccatctggtacagagtcttggctgtagcattatactgactttccataagcatcaccagttccatttgcactactggaattgtttgagccttttattggaaaaatacaaataaagttcatttgtttggatggcaaagccaagaaaatacttggtgtgagaaaccatgttgacaaagatgaagttaacctttggaaattagcatgaggaatgtttctagaaata

SEQ ID NO: 32113 - DNA, 1077 bp, Homo sapiens
ttggctttaaaaaattataaattatcttcctttacatttgatatttcatgtggttttgccttcacatagaaaagaaggtttcatcataagcacgtttctgatgtgcatttctcatagctgttgacaacttgctgtgttttgctctgctctgtttgccgtagcggaatcattctcctttctaaccaatctgtgcgctgtggtagcatgttctcttctaggttgctgtttaagttttgttatgtgccttgatgatgttccctctctgtaatacaaccagaaattgaggctgcgacttcatttaaattattgtcaggttgtggaaataggcctgccatgtgctcgccatccccacagggaagtggaggagtgtctgaaatgagaaatgaaccagcttctggcaactcatgaagaatgtgtctggaaatagggatggtatgaagggagggttattgctgtgttttatataataaagggaatgattaatgggctcccagtataccacagtaaagaacaaaattgcctttgggaccttggaggctttgtttagtttgggggcttatgtttgactgaaggtctcatgttcttgacaaaagggtgacatttgctgagtaaactttgaaattttattatatgtaatataataactgaagagggggctatcaagacactctctgaggaaggtctatgttaagtggcattgatcattgcatagcttcctgatttacaggtgacttggaagatcattctaaactgtaaggtccttgaggaccttacatgtattcttttattctttcctcattctttcattgatattcacattgactgagcatctcctatagtcacgctgtgttggttggtggtaagagaataacatggtgagcaaaccaggcaaggtgctggtgacttacagtccaattatggaggcagatgttaataatcaccgtaacaagaatataataacaaatgaaaacaaaagctttgaagaaaagagagacatgttgctgttagggcatttaaccagggagcttgacctagtcatgaaaggccaaggaagccttttctggggaagtgaaagct

SEQ ID NO: 32114 - DNA, 1035 bp, Homo sapiens
gtaaggaagccctttggctgatagatatcagctaatcagtttttaaacttttttttcttcctaaaaattgtgcagaggtcagtaacccacagacaggagtttcacttttaactgacagtgtaaggaaggagacttgacagtttcttgaaaaagctgcacccagggtgtttatgtttctaagaaataaactggatgagcttatttgcaagcggcccctgtgtgcttcatgcagaaattcttcaggtggcccttgcttcttgtgttagtcaaggaggcagaaccgcagcggccaggccggtggctgcttcacagcatacatcagctttccttttttttttttgcattcacttttaaaaatagctgcccatgtatcagttgccaaaataatgtgaggaatctggttataaaagttcagatttgtttagagagaataaagacagagctcaggcgattgcttgtaacaaaaccagtaagataagcactcaagattagccatgactagcaatcgttgagacttccatgttccagcatcatttatttttagttcctgtgttgaaaccatagatgaagacttttctatttattcattcttgaccttgagcagccaggtctgctcccacattcttctcatcattttataatcttgttgagctgggatactaagcagggctctccaagagcatcaacattttcaaatgttcacagtctcttgagttgaaccaccttgagtccaataggccttggcctgggaaagtgtctggacaccgctgctccatttgtctagagttcatggtgaagcaggcagaggaattgttcaggttttacttggattaaccacccttccagctttgaggagtagataaagacattcaataaaagtgcatgactgtgagcaactctcaggctctaatttgatattctttttatttctcactggcttgctgtgctttatgcctccctgataacctagtaacacccaaattttgtttttccttagtgttacctgaatttgtttttgaatttttgtttttcctt

SEQ ID NO: 32115 - DNA, 1080 bp, Homo sapiens
ctggcctggcagggtttgtgttggcaatggtagagagatgctatcggcatctcattgtgtactgtttgcataacgggacaggacagccaactccagccattaaaaaaaatgctttggattagatgaatggttttattaaggtacctgtcagattgggaaggtgcaactgtgactgatgaggacctcctgaagaggatcccagccacagctggtgggaggggggggctggtagttgacccagactcaggaatgtggctgcactgcaatgggctggccacccaagagtgggagagggtcatcggtgagggagagcactggcaaaagcattgtcagttgcattgtcctttggggcttcaggttttttatacctcagaggatctagggctattccggaaacatcagccaagggaagctctactggattttcctcagttaatagcatctacacaaggctttccttcaagaacagtcatcctgttagctactaataaaataacatagaagtgctgaagttttgagcctggaaacaataattttaaagatacatagtgtttgagtttacttatttgctcttagaatgaagtcaccacttgtcaccgtgactatggaaacataggaaatacattttggggagttctgcttaagtcattccatgtcccctagtaaggttctcaaagtgtggtccatgggacattagtggcaacagaacccggaagcatattagatatgcagaatttcaggctccacccaagacctgaagcagtagctgcatttcattgagatccccaggtgatgtgtgggcacattaaagtttgagaaacattccgatttttagggtggtctagattcaggttgcagatactgtcgactcagtagagatttcatgtgaagctctttagtcaggatttggggtgatggaaattggcatgtaaaccgtcccttctttctgtagcagaagaaagttgggctgtgataaatttcagttaaccaggagccatgactctagccacttgggactgaaataattagtgcaaatccttctgtagttcagaatgagtagaagaggccacagtcagggtt

SEQ ID NO: 32116 - DNA, 1014 bp, Homo sapiens
cgcttgagagggagggtggcctttcttaattctggtgctgtttaaggaaggggtgcatttatctggtgcttccagaatttgcactccttggattttcccatatgggaacctgcctagcaggcagctttgcatgaagccgaggattaaatggtggtggtgggtagggtggaggggacccagtgaggagggcaaatctgcttctgtttgcctgggcacatcacctgcacccacaccctgggctgctccacggcaaattaaagcctgtttctcttgatggcctggggcagccctgtcagtctgctggggcagatctccaagctggatgggccatggtgccctgggggtggtttgtgctctagatggtctctggctttctgcttgggtactcctgctgggtgtccttctgacaggagaaggacgcacttcgattccaggcctgtgtgctggctgccttgggacagcccgagtgctctggctgtagatctaaatgcaagcatactgtgaattttatttatttatgtctttgtgtcttgccgtgttccataaaagctttaagccactttatctagagaagatgaggaaagtgtaagggttaagaatgtaggctctggctgagtggggtggctcacgcctgtaatcccagcactttgggaggctgaagtgggcagatcacttgaggtcaggagttcgagaccaccctggccaacttggtgaaaccctgtctctactaaaaatacaaaaattagccgggcatggtggtggttgcctgtaatcccagttactcgggaggctgaggcaggagaattgcttgaacccgggaggtggaggttgcagtgagccaagatcacaccactgcactccagcctgggtgacagaaggagactccgtctgaaaaagaaaagaatgtaggctctggagccagaatgcctgagttctcaggtgtgacattggatcagctaatatacaggcaccgcaggatgtgagggtgagaggcacaagaacaagcggcacgct

SEQ ID NO: 32117 - DNA, 1076 bp, Homo sapiens
gcaatcttggctcactataagctctgcctcctgggttcacgccattctcccgcctcagcctcccgagtaactgggagtacaggcgcccgccaccacgcccggctaattttgtttttgtatttttagaagagacagggtttcaccgtgttagccaggatagtctcgatctcctgaccttgtgatccacccgccttggcctcccaaagtactgggattacaggcgtgagccaccgcgcctggccgacaaatgttattctttctgggttgccatattttgtggtttttaaaaaatatatttttattcatttatctggtgacttgaaatttcatgcaagtacaggtccttacagacaatttctattggaaaatcacttattttgggtgtgtattagggtttggagagaaacagaaccaacaggatgtgtgtcaatcaatcgctcatctatctattgagaggttgatttttaggaattggctcatgtgattgtggaggccaggtgagtcaaaaatcagcaaggtagactggcaggccggagacccagggaagagttgcagtgagcccaaaggctctctgggtagaattcttcctgctctgggaggtcggtctttttctattaaggcttatagctgattggataaagcccaccacatcatggagaataatctgctttactctaagtccactgatttaaatgttaatctcatctaaaaaataccttcacagaaatgtctagaatgtttgaccaaatagctggttaccatggtctagccaagttgacacataaaattaatcatcacagtgggtaaaatactgtttgaggttgttcagaagaaaggaaaaaggcaaaagcctgggcgcggtggctcacgccaatagtcccagcactttgggaggccgaggcggatggatcacttgaggtcaggagttcaagaccagcctagccaacatggtgaaaccccgtctctactaaaaatacaaaaattaagccaggcatggtggcgggtgcctgcaatcccagctacttgggaggctgaggcaggtgaatcgcttgaacctgggaggcggaggttgcggt

SEQ ID NO: 32118 - DNA, 1004 bp, Homo sapiens
ttgagtcttcttatctctttagtatttaatgagctctgtttggaagcatgacactggtttactctgagtacagacaggaaagtcaaggtgtgtaagagcaacaggggaagattagagactcccaacttaggcctctgtggcactaacctaataccaaaagttttttgtcatggagggaagagaagtgaaaattggaagcggctggtgaccaggactcaccttcctccttcttaaataccttccatctgtattaggggcagggaatcaatttccatcttgaaatggatatgtgttttgagaccccagctccagtcttctgttttataagtgtcacttctgctctccaggccctggggtttgactcatcccatctgttcaattcttgggtcctttggattcatcctttgaagctgctgtttcattgcctctttcttccttcctcatctccccacctaccccattgccaccttggcctgtatcagagaccttttccctgtgcttctgtctgccaaatctaggcttgtgctcacatctgtaaggaccactgtatttggatcttgcctgtctccaagatgtaccacatgcaaagctgaacccacttggctatttcagccctatggtgcccatcttttcaggccagttgggggtgtctaacacagaagcaatgagggtgtgttggtcacttccagggatgtgggaagtgtttattctggatgaccaggaagactctgtgtcatccctgagaaatagcaaccatttcctgaatgcttaccatgtgttgggcactgggtggtacagttggtagcacaagctcctgggtctgtgtttgcttgaaataaacttccttcccctccgcaaccccaaagcttgacatgcctcctctgaagacacttctctggctagccttcctctgttcaattaccccttgtctgaaatcttattacacatagagctcagtggcataacttagcccattcattctaggcagtgtaaccttatctact

SEQ ID NO: 32119 - DNA, 1030 bp, Homo sapiens
ccttggctcactgcaacctctgcctcccgggttcaagcgattctcctgcctcagcctcctgagtagttgggattataggcgcccgccaccacacctggctaatttttgtatttttaatagagacaaggtttcaccatgttggccaggctggtcgaactgctgacctcaggtgatccacctgcttcagcctccagaagtgctgggattacaggtgtgagccaccgtgcctggccagcatttttctgtttttaaagagagattattaaataggtgtcttggctatagaaaagaagaaactttgggtcctggacagtggtaagacctctgggcactcaaagtaaaatattccaaagttcatctttgctcttttctatccctacttttatgagaacctagacaccactgagaattctcgtacctccctagaagaatccattggtaaccatgatagctgccttatttgattacaaccttttagaaatatatatatattttaaactatttctaatatctgagttgctagatttctgaactgttatttgcagtcttctagtactaaaatgaactcacttatttaggttatatgtgtgagatatatgacaataatatttactattctagataaagttattccctaaaatatttttagatctttatcatttatcacattctgtccattttcactggagttctaccatctcattctgggaactttgtcttaattctgaagtaattcagtttgctaaatacttgcccatttgtgtatataattagaaatacaatttgtattgtattttgactgataaaccctccttcatctatattcccttcttagttaatgataccatcattcatctggtcatctaagctagaaatattggaatcacattaactttctcctcctcccctcaacagacaagcacacacacacccctgtctctgatgggccttatgttatgttgcttttctctgaccttttcttgaaacatctctgcctcagcacatctctgaaaagcccttataataacat

SEQ ID NO: 32120 - DNA, 1052 bp, Homo sapiens
tgtttccagtgagaaatacgatgtcacccttatctttgttcctatatggttcctaagtctctttttctctgactgcttttaagatttcctctttatcactggtttcaacttatttgatagcaatacactttgatataattttctccatgtttcttgtgcttggacttagtaaagcatctatacgtgtggtttaaccaaatttgggaaaatgtgggtcattggtcattatttcttaacatatttttttctgtccctcttcccttcttttagggacttcagttacccatgtattaggctacttgaggctatttcacagctcactaatgctcttcatttttcctttttgactcttttctgtttcattttgaatagttcctatttctatgagtttaagtttattaatcttttcttctgtgtagtttaatctactgttaattccatctagtgtacttttcatctcagacattgtttttatttctagatgctcaagtcttttaaaaatatcttacatgtctttacttatttaaaataacatctctgtcagttctgtgttggtttcaattgatcaattactctcatgatggtcatgtattccttcctctttgcatgcccaataattttgtattagatgccagaattttaccttgtttgatattgtgtattttcgttttactttaaatccttgtgcggtttgttctaggatgtagttaaatgactgggaaataatttgatcttttcaggttttttataattttttaggtaggtccagagtagtactcaatttagaattaattattcttcatcagtgaggcaagacctttttgagtactctacccactgtcccacaggttatgagtttttttcaatctggctgattgatagaaccaggcattgttcccaaccaaccctggacaatgtttcctctaaccttatctgttgattttccccttggttttgggtagtttgctcagattcatgtgctaataattactctgctgaatattctaaggaaacttctgcagctctctctctttctgtgctgctctctcctc

SEQ ID NO: 32121 - DNA, 1035 bp, Homo sapiens
actgtgcctggcctagaatattttttatgatctttgctaaattttttttgaatttttacatctatgttcatgagacatactggtttgtcattttcttgttttgttttgttttgagatggagtctcgctctgtcacccaggctggagtgcagtgatgtgatcttgactcactgcaacctccgcttcccgggttcaagcaattctcctgccttagcctcttgagtagctgggactacaggcatgcaccaccatgcctagctaattttttgtattttagtagagatggagtttcaccgtgttgcccaggctggtcttgaactcctgagctcaggcaatccacctgccttggcctccgaaagtgctaggattacaggcatgagccaccacacccagctggtttgtcatttttttggtaatgtctttgtctgcttttggtatcaggcttcacagaatgagttggaagtttgtgtcaaattggtattatgtcttccttaaaagtctggtagaatttagcagttaagctatttggacgtagaattttctatgggatggtgtttaactacatttttaacttttaaaatagatacaaggctattaaggtagtctgtttcttctccttctcctcttcctcttcctcctcctcttcctccttctttcttcttccttctttctcctcctcctactcttcatcttccttctcttcctcctgctcctccctccgcctcttccgcctcttcttcttctccttctcctcctcccccctgcctcctcctcctcctcctccttttcttcttcttccttcttcttttttctttgagacaaggtgtcactttgtagcccaggctactacagtggtgcaatcatgtctcactgcagcctctctctgctgggctcaagtgattctgccacatcagcctcctgagtagctgggagtacagctgtacaccaccatacctggctaattttttgcattttttgtagagatgaggttttgccatgttgcccaggctgctctccaactactgggctcaagtga

SEQ ID NO: 32122 - DNA, 1025 bp, Homo sapiens
agtgattctcctgcctcagcctccccagtagctgggattacaggcgcctgccaccacacctggctaatttttgtatttttagtagagatggggtttcaccgtgttggccaggttggtctcgaactcctgacctcaggtgatctgcccacctcggccttcccaaagggctgggattacaggcgtgagccaccgcgcctggccgattgatctttctaataagtgctttttctttcatgcggcattcctccacttggttatctggtagtttccctttgcctgtaagataacatctaaacttcttagcatactaacatggctctaatgatcgggcaacaatattctcatttctgactattcatcctttctgcttttgctccaggaatgctaaactctgtgtagttctacagacaggccataatgtcacttcattgctttgcacatagtttgttctgcatcactcttccctctctcatccacttggcaaaaaacgcccactcatctttcacgtcttcctgtaaatattacctccttggtgaggctgtcctttaatcccctggtagacataggttctcctttgtgattattatgctttttttttttttttttttttgagacagagtctcactctgctgcccaggctggagtgcagtgatgcaatctcagctcactgcaacctccgcctcctggtttcaagcaattctcctgcctcagcctcctgagtagctgggattacaggtgcccaccagtacgcccagctaattttttgtaattttagtagagatggggtttcaccatgttggccaggttggcctcgaactcctaacctcgtgatctgcccgcctcagcctccgaaagtgctgggattacaggcgtgaatcaccgcgctcggctaattgttgtgcattttaaaccaccttcactgtcttctaattttggcatcataactgggtgtgtatatctttcttcctgtgtgctgctggaaggaccgtgtcctttcgtctttttatgtctagtgtaaaacgtgt

SEQ ID NO: 32123 - DNA, 1035 bp, Homo sapiens
gtttaaattcctcattaccaatttgcatgctctttatttctttctcttctctgattgctctggctaggactctgctgcaactttgtcccccaagctaatagttttctcatccccactgggccctgacattctacacctggcttcccttctgcatggataccctccttaccctgctcactctctgattcttcttgttggattgaccccccacccccacccccatggataccctcctgtctcattcaggttactctgtcccactagaccacatctccaggtgggtgccatcttcccctttttgggctctgactctcaacaccaggtcaagcctcacatgagtgctctccttaccctgcttgtgtgcttaccctactccagggtacttctccatggagataccctcatttctctgctctgacaccttatgccaggtggtcccacattgtgacaacctcctcaactcattctgtctttgatgctactcatcaggctacctgtctgtgcttcctgggctctgtgaactgaaaccaaataatccccacacatgtatacattgctcaccacatttgggctccagcagttccacagtaggccactatctgcatgtagatgtccaccttaccttacataagctctgacacgcctccctggtcaatacggctctctttccctcatggcagagatacctaccatgttctgctttaggactgagttgtttaggaagggaagaggaagagctcctttgccttacccatgagctgtttttttgttgttgtttgtttcttttgtggcacttatcttgtttttgaatagttaaaattaactcccctaatttccatctcataatttgttgcatatttttgcacttaattgttgtttgatttttcttttcttttttatttgcatgtgtgtcttttcaactgagtggattggttgtgattttcataaatagataagattttcccccctaatctactaggaaaattttttaccaagccaggaggaaattcctaaataagtgaaagttaccaagtg

SEQ ID NO: 32124 - DNA, 2253 bp, Homo sapiens
tttcaaaacattttataaaagtggatttgaacaatatgtgttattttgtgtttggcatcttttgctcattattatgtttgtgagtcaacattatatgcagatatattccaaaaatgtttaattacatgagggatatggaataggaaaaatagtaaagagacttaggagttaagatgcatgttttacttctggctttgcctctaaccagcaaggatggctttgagcaagtcactggaactcttaggattttctttttttcctccaaaacatgacagaatgggttaaaatgattgataggatttttttcagctctaaaattgatgaaactggataaatgttatactaagctatccttaatttatttcatttttattttcattaggttgtcttggagatacccagttttgttttagatttcgacagtcttctgggaggagggtgtcgctgcattgtctcctggatcaatttgacaaagatttaccagtttacttaaaggttggaaaagtagtcataggaaaatgtccatgtgagaggaaactttagaactcatttattcagttaccgctgacaccattcagaaatattttgcttttgttttgctactatattatatagctgaatttccaaagtgagtcttattcataaggattcagcatctgaatgaaagggactttatacagttactatgtttgaaacataatgtcactgtgatttataaaaatggattagaatgttgaggtaattttctttcatttgttaataaattcttgaattagatgtgggagtggagttgtactgtacagtaactatcatctagagttgaggtagtcatacttgataacatagttgtctctttttgatttttgaatgagccttgttttagttattatttatttaaaacattttaataattcagatgaccttacagcctagatttttttttaagtacatgaggaacgttttcatctggatgccctatcagcacatccagtgtgactttgacataatttgcctgataacagtttttacagtttacctccctggttccactaatggcagagatactacctgtgaaatgtctcttagagccatctcctccttgctgtcactactaatatattcttccaaccaatgataataatagctgttatttgttagggctttgtatgttctagatactgtattaataagcatatatcatctaattaatcctccctacagtgctccaagagagatccttttgtagatgagggaattgagggctattgagcataagaaacttacccaaggtcatcccacctcttgttttattccagcacaatataccttatacagtgttgccagctaaagtgtacatatatattatataagtaaaatctaaaatgactacaaattgtttaacgagtaaagaggtatagtactacttccttgtcctcactttttggaccttccaaaataagaacttcatcatcaaagtttcaccctcatctcctttctatgtgtgccatatatgtgccgtattttaatcaaactgaactatgtgctttttcctgagatagcatgtatttttctgtcttttgtgtttttactgaaactcctagccctttcaacttggaatgcctttgtctttgtttaagtcatattcatccttcaattcccaattcaaaaacagctgcctccatgaaatctttactttttccccttggctttcctgtaacactttgtgttttttcatggtacccatcctcctattacaataatattcatttttctacttcttttttctgagatggagtcttgctctgtcaccaggctggagtgcagtggcgtgatctcagctcactgcaacctctgcctcctgggttcaagcgattctcctgcctcagcctcctgagtagttgggattacaggcacgtgccaccacacccagctaatttttgtatttttagtagagacagggattcaccatgttggccaggatggtcttgatctcctgacctcatgatccgcccaccttggcctcccaaactgctgggattacaggcatgagccactgcacctggcctcatttttctcctttcttatccctcctaaatcatgatatccttgaggaagaactgtgtcttatgcatctttttatcttctctaacacatcaccctgttcaaagtaggtggtcaatatatatttgtttaaggaataataatcaaataaggaactgagccaaagtttactccattaagatgtaaatgctt

SEQ ID NO: 32125 - DNA, 1388 bp, Homo sapiens
aagagaaggcctttttttttttttttttttttttaaataatcttattcttttgccaggctgaagggcagtggtgtgatttcagctcactgcaacctctgcctcccaggttcaagccattcttgtgcctcagcctcctgagtagctgggattacaagtgcccaccaccatgcctggctaagttttttgtatttttagtagagacatggtttcgccatgttagccaggctgatctcgaactcctggcctcaagtgacctgcccaccccggcctcccaaagtgttaggattacaggtatgagccatggcacctggccaagaaggacttttttttttgagagagagagggtctcaccctgtcatccaggctggagtggagtggcatgatcttggctcgctgcagcctttatgtgcttggggggcctgactctcctaagacagccattagtaccaccaggtggcctttgaggcacctccggtataatgtttgaaaatcactggcctttgataattggtggcatgagagaggcattactaccaatgcacacaagatgccttctgtgactaatgtatagtgccagttgactagtcaagcactgagtgtgtaatttttgtcactttgataaatgttatgttcatctcctaaggaggtcaggttggttataacatagagtttggttggcttgtagagtgtgtgcccttgggtgtgttgtttactattgtttgttctgctggtagctgatctgacctagccctgcttccttgcaggggctgtggggcaggagtttcatcagaaggtggttgtggtcactgcagacactaaaataacctaagaaaatgcataatgatcctttaaagggaccagagagaattaggatagcctttattgtggagatggtccttgaggtttcttaaactgcagataattatttttccgtttcatttttcttttactaataactaagtagttaggatgtgtattacttgttggagtcagttgaaaaatattatttactgaagtagacgccagctgaagattattttctctttagattataggctaccaaagaagactcagtaagctttgagttattagtcaattggtaaatggttcttgataacttaatgattttaccaatcttttggagataactttaaaccaaaaactttttttacctaatgtaaatattactcaatgctcccagctttcccccttgtttcattattaaagtttgtgaactgtttctttttgttttgctttttgtcttttaacttttattttaggtttctgggtacatgtaaaagtttgttacataaacatgtacataaactcatgtctcaggggtttgttgtgcagattatttcatcacccaggtgttaagcccagtatc

SEQ ID NO: 32126 - DNA, 1049 bp, Homo sapiens
ttgatcgcctcccaaaggtttcacctcctaataccgctatcaccttggggtttttgttgttattgaagcaaggttttaaattttgatgatatccaatttatttatgtttccttttgttgtttgtgcttttggtgtcatgtctaagaaaacattgcctaattcaaggttgtgaagatgtattactgttttcttccaagagttatatagatttagctcttacatttaggcctttgatccactttgaattgactattgtatatgctgtgaattagagctgttatttttttaaactttattttgagattaggtaagagttataaaagtaacttactccacctgaagttaacttttgtgcttcaaagaacatacagtccattgttcccactgctgctgctgctcttctaacagttctagtttctcacaaatttctgtccataatcctgctcagcaccctgtaccatctctatatctcgcttttcctcccgagctgctgttaggctgtctgttgcatttgtaattcctatagttcctcaccagtagtggctgagctcccgccttcccagcctgtatttttgactcattcaaggttaaaaattctccagcagcttctttaatgtagcccacaatcccctacatagtcttctctctccttacttcttcaggctcaccttgccccacttcatcagtgagcaacaatggaccattgatgtggaaggtacaccctcatgttatggaagcagaaactgaggcatagactggctaatgatttcccacaaggacacatctaattaggaccaaaacatggttttggtaccagtactgtactttccatccttccccactgcctcttaagagtttgaagatgcagagctgtattcatttatttttgcccaaagtcaaggtgagtaaatgtgaactttaaagaaaatttgggctttaaagaaaaaattgaagtgaagaagagatgataggaagaagctgaagatttggcttaggatggtggaataagaagtaacaacaacaatgaaaaagaaagaaggcaaaatgct

SEQ ID NO: 32127 - DNA, 1047 bp, Homo sapiens
tggagtgcagtggggcaatctcgtctccctgcaagctccgcctccctgcaagctccgcctcccaggttcacgccattctcctgcctcagcctcccaagttgctgggactacaggcacccgcaccacgcccggctaattttttgtatttttaatagagacggggtttcaccgtgttagccaggatggtctcgatctcctgacagtgtgatctgcccacctcagcctcccaaagtgctgggattacaggcatgagccaccgcgcctggcctgcccagctaattttgttttttttgtttttttgttttttttagtagagacagggtttcaccatgttggccaggctggtcttgaactcctgacctcaagtgatacacctgcctcagcctcccaaagtgctgggattacaggcgtgagccaccgcacctgacttttttttttttttttccttagagacatggtctgcctcagattggagtgcagtggcatgatcataactcactacaacctcgaactcctaaactcgagggatcctcctgagtatctatgaatacagacatgcaccactacacccggctatttttaattttttttgtggggacagggtcttgctatgttgcccaggctggtctcaaacttgtagcctcaaactgtcctgctgcctctgtcttccaaagtgctgggattataggtgttgagccaccatgcccagcccttctctgatctttaaggtgagaagctaacgtttttagccacttcagtgaaaaagagtgaatctttaactcacttccaaagccagaggaagataatctggcctggtttggggcaggttcctactctgatacaattggctaaagccctgagtagaagggggagtggttcaccttgcataaaatgtcttttaaggccctgtcctaagtgaagggggttaaggaggtctttgagctaggaagaaactgaacaaggtgttgactgcagggggtgtgctgagcttcttttcccctgaagtggctctggaggcattaccacagaatcaaagtgtcctctgga

SEQ ID NO: 32128 - DNA, 1035 bp, Homo sapiens
agttctcgtaatccccatgtgttgtggtgggagagacccggtgagaggtaattgaatcatggctgcagttaccctcatgctcttcttgtgatagtaagctctcatgagatctgattgttttataagaggctttcccctctttgctcagcacttctctctcctgctgctttatgaagaagaacatgtttgcttccccttccaccatgattgtaagtttcctgaggccttgtcagccatgcagaactgtgagtcaattaaacctctttcctttataaattacccagtcttggatatttcttcatagcagcctgagaaggaactaatacacaaaccatacatttgatttcaaaaagggctataagaccatttaatagaaggagaatagtctcttcaacagatgattctgtatatccacatgcaaaaaaatgaggtggactcctaccacatatcgtatacaaaaattaactaaaaatgtttccttgacctaaatataagagctgaaactgtaaaactcttagagaaaaaaaggtaaatcttcatgaccttgcattgtcaatagtattagatatgataccaaaagcacagcaacaaagtttttaaaaatagataaattgtacttcatcaaaatgtaaaacttttgtgtatcaaagaacaccatcaagaaagtgaagagaaaacctacagcatgtgagaaaatatttgcaaatcatatatctgatacgatatgtatcctggtttatatatgaatatatagagagaaaacattctagtatattctagtacccggaatatagtcagcccaccctccatatctgcagcttccccattcacagattttcaaccaagtgcagatgaaaaatattcaggggaaaaaaattaaaaaaacaatataacaataaaagtaatacaaataaacagtgtgtataactatttcctagcattttcattgtattaggtattgtaggtaatatagagatgatttaaggtatactggaagatgtgcataggttatatgtaaatactgtgctgttttac

SEQ ID NO: 32129 - DNA, 1069 bp, Homo sapiens
cttccaccttgcagtttgatctcagactgctgtgctagcattcagtgagactccgtgggcgtaggaccctccgagccaggtgtgtgatataatctcctggtgcgccgttttttaagccccatcggaaaagcgcagtattcgggtgggagtgacccaattttccaggtgccatttgtcacccctttcttttactaggaaagggaactccctgaccccttgtgcttcccgagtgaggcaatgcctcgccctgcttcggctcgctcacagtgcgctgcacccactgtcctgcgcccactgtctgacactccctagtgagatgaacccggtacctcaggtggaaatgcagaaatcacccgtcttctgcgtcgctcacgctgggagctgtagaccggagctgttcctattcggccatcttggctgccagtcctgcttaaatttaatttaaaagaaaactttataccacttttataagtggaaaaccagtgtaattttcccaaaatacaacataaaaataaacatactgaaaacaaaacaatattttgaggtctaactgggtactgtttcttgtttaaggctctgtcctgagggctgctgtttgttaaaaagagtttatcaaggattagatacatgttcagctattctccctgtcatagttaggactgaaggaaaactgacaaagggacatttttattctgggatccagagttatttaatgccacacccatgtaccgtctaaaatcatttcacaaaaggtacatgttccactctttgggaactactgtggtggatttgaaaaggaagccattaaagcttttgggctagagaaggaccacacagtcagttctgtgctttgggaagattaatctgatagtaatatttgcagtgatttggagggtgtagaaattggaagtgaggaagttttttgcagtcatccagattagggttagtgaggactgtgggggcagtcgggggagcagtggaggaatggatgtgaagcaacatcagaaacttaaagtcagatgagctaagacatgtatgtaaacagaccttttccatacaatgtggtaca

SEQ ID NO: 32130 - DNA, 1112 bp, Homo sapiens
ctgatcaggactgcagttcagagtgtttccagggcattgtgagaacacaaaatgcattccttgtgctcctgtctttattacatgctgttcatcagtacattgcaggcacctcttaggcatttaattccattgggagtttctcttgatacaaattactttcatttactataatttttatactttatccacaggattaactcttgactcttttgaaactcttgaccaccacctttctcagaggtcatgattttttctgtttctgctatagctcatgccttgtcttgtgctttgctaataataaatcaataaatggctcatttcttgctctcatccaaatgaagccatatatggtaagcattaattttgtaataaattttcttcgtcagaatatcttactgccatttaaattttttacatagactatggaaataatttacttccaatattgaaaaataatcatctgcttgtgaagtataaactgagcctctgtttattttatctaaagcagtatacaagtcaaactttacttttttattcataagttcacttttatagatttgtttggaatgtacttatattacaaaattttatcttccttaggtagagtggaatatctaaaaaagtttattaatgaatcttgaaatctttggtcatgaactacttatagtgtcatctttgcatacttcagtgatattgaatacttcttaaaaacaggaaatgagtaatgctgtatccagtgaaactctaggaagaatttaaaatgtaatcatcattagcaaaaattctaaaaacagcatgttcttactaagtacattggcttccttgctatcttaattctgtatatttgctttctttacataagaagctctgctattagtattgcagatctagagccaatgatagaatgacctagattctgtgtgtcttatacatcatcatctggatttttcaactagtcctaattttagtaacagtaagagtaaatctctaaaagaaaaaaaggcacagtggaaatttcggattttgattgatttcagtgatgaaaggactaaaatattgacttttactcatgatttttcattatttctgccagtttatcattaattttacat

SEQ ID NO: 32131 - DNA, 1004 bp, Homo sapiens
ataaaggttgaaagcaaaagttaaattctttaaaaaagaaaaaaaaccctgaaagtgtacctcatccttacaaattttaactgatcctttgtgatccttgcatagcagtattctgaatttgaaattgtatctgaatggagtttgatgattttaacctggaattcaatacagaatttatgatgctcattccagagtttttgtcttttccttttgctctgcttcctagttgtgtggctgtggactcaacactttaatttggtgtttccgtttcctcacagtaaatggtaatgctaactcttttattttaatggctggagttaattgaagacattggtctttttctaagaattttacggagtttaggtccacgtagacctcaaagcttcctttttcatttctataatatggaaaattggacatgcttccaaacaaagctttagcctcaagccaatttaatgaaagttactcttatgttattttttccgtactgttactagtgagctagacagcggtcagaaaataaatctaatagaagtttcagagtcttctaccctattgaattttgctcctacctttccttcttcagtgacgttagagacagtaggctcctttgaaactttaaactaagtaaagtgaatatggcctcacagctgcagacctgatcttttcatatgtcatcggtcttcctcagcctctttaaagccactggagttgagagcatacctaaatttgatatctttaggtcacgatgacattagtgacagcttttgagattgtatccatgtaactatgcacaactcttcctgtggaaaatttgctttcttatctttttggtcattcattgccttcctttaaagaaaatagtggttgctttgtagctttttaagttatttgtaaaagagatgttaaccaaatgcaaagaattattatgttatccagtgaaatcttttatgtcaccaagggaatacatctctaaactatgtgttgagaactagacaacaatg

SEQ ID NO: 32132 - DNA, 1045 bp, Homo sapiens
acaagtagaattaatcagtaaacttagcaaggcctctgaatctaaggggtgtgtgtgtgtgtgtgtgtgtgtgtgtgtgtgtgtgtgtgtatatatgttttaaatttctctgtatcagctacaatggttagaaaatgaaaagttttaaagtttgcttttaacatcaaaaatcagatacctaggaataattacaggtatgtaagcttatagacaaaaaatgtaaaatattaagtcattaaagagaaattaaataaatggagaagtaaatgactcaattttattaatataaagattgaattttcctcaagttgactataaacccacagcaactcagttccaaattcccataggttttggtaaaaatcgacaagttgattctaaaatgcgtatggaaatgtagccagagacttagaaaaaacaagattagaaggattggaggggctcactctacaggatatcaagacttattacaaggctataagagttaagagagcatggtattggtacaaagataaatagactgatagaacaaaacagaggacatagaagcaaatccaggcatatatgaacacttgatttatgataaaaatgacactacagagccatgagaaaaggaagatttttttcaatagatagttcttggaaaattggatacccatgtagaaaactaatgaaaagaaaccctacctcacaccacatgcaaaagagagttccaggtagattgtagttcaaagcatgaagtgtaaaattttaaaggctttgaagatattataagaggatatcttcataatcttgctatagggaaagacttttgcaacaggacacaaaaggcactactgaaaaaaaagattgatatattggactacattcaaattaagaacttctgtttgtcaaaatacaccattgagagagagaggagacaagctgcggtggaggggaaagtacttgccacatatataatcaacaaaggactagtgtccagaagacaatataaaatgaaaaaggaagcaaagaaaaacacattatatttaataagaagtcagca

SEQ ID NO: 32133 - DNA, 1470 bp, Homo sapiens
ctccaggtcagaaaagccctgaagagccagcctttcaagcccacttcttgttcagaggcccctccgcaatatccctaccatgtggacttctagccttggcctgaattcaagcatcctaagtcattaccaagccccctttcaaaccacactcttcatcctgcaattttcattatgttaaaaaagcatctgcttccccagacactaaaggccacatattgtatgattccatttctatgaaatatccataataggcaaattgatagagacagaaagcagataagtggttgccagggactgggggggtaggggaaaggggagttaccacttaatgggtgcagggtttcccttcgggataatgaaaatgttctgaaactaggtagcggtgatgtttgcacaacactgttgaatgcactaaatgccactgaacgatatactttaaaatggctaaatggtggattttacgttatgtgtgtatgtttcaccacagacatataaattgctttcttccgatccacccactagttatctacctgctccatgaaaccaaacaagtttaattccttttccacggcccacgttgttaatgtttctttctcctgtgtttgcggaaaccatcacgcacccccaccccatatctccacttctcatgactactcaccctgtgtcccagaattgtgcatctttgaaacccctgatcctgggtaccctccaatggatatatccccttttctcattccttttctgaaattatgctgctgctgggatatactgctgccgaggaatatggacagcacatgctacagaataatcacctgctttggcctgggacttggaaggtctgggtcctgactttaactctctgtgtaacctgaatggtaaacaaatcattcagcctcagtttcttcacctgtaaaatggaagacaagagggcttccaaagccttttctgactttcagacttctaacccaccacatagctctggaccttattcttgctgatgacaccccatagtgtgttcctgtttggcatccctgctatgctactaatacccactgagctggaagttaaccaggcaggacatcttcctcactagggttaagctagatcttccgcaccccaacccgcaatgtgtgacattggatttggggctccagatggaagattgcactaggatcctgattaaatgctgccccataagatggaatacaacattccaaaatgtaatttttgatcttcattgcattatctaacctatgtatatatctcttattttgctctcatagagaaatctgtgtgtgttctcaggcaagtcccttagcagaattttggataagagagggatcacagccagagtcccatactagcccactgaagatttctattctggtgttttcctcatctccagaagtatggcaatggtcctgtttatcactgttctgtttctggaactgtctgagctgagactaaata

SEQ ID NO: 32134 - DNA, 1046 bp, Homo sapiens
acccccatcaccaccaccactctaaattgtcttccttccccaccctctgtgtgaccatagggatctttccaaagcagaggtctgcaaacatttgcaaggtacccagtgacaaatatgttaggctttgtgagtcatgagatctctgttgaaactactcagctctgccactttagcactaaagcagccaaagacaatatataaacaaacgagcattgctgtgttccaataaaactttatttataataataggtggcaggtctgatttggttcatgggatgtagtttgtcccatcctgttctaaatcgtgagacatttttctcacctacacatcagtaactcttctttgctaagggtagccaatcttagccctagctttgaatcagaatcaccatggtgccctggggcctaggcatgtgtaagttgttgtagtacctggtactaagttgttcactgtacatgcccactggtctgacagctgaggatatgttggcccaaagaggatgatcatttgccgaagattacctggacattagtagtattgttggactaaaatccaagtcctgggttctttgtacttctctaggctagattagctagtaaatgttgaaaatgaaaccttggttctcagcaaattaacaggcaaggtatatattcattgtcttagtccattcctgtttctacaataaaataccttagcctgggtaatttaaaaaagaagtttattagtcatagttctggagcctgggaagtccaagatcaaggtgccagcggattgggtttctggtgagggcttgccctctgcttctggcatggagtcttcttgttgtgtcctcacaggaagaaagagacaaacactgtgtcctcacatggtggaagggagaagggaccagagtgcttgcttcagtgtcttttatataggcactaagtccattcatgagggtagagcccccatgtcttaatcacttccccaaaggctcctcttaatactgtcacattgggtcttaagttccaacatgaattttgaagagatacattcagaccgtagc

SEQ ID NO: 32135 - DNA, 1074 bp, Homo sapiens
gccaaatttgtattagttccacaaagacatgctctccctagatgagggctccttgagggtgggtgctagcaaaagccacaaggccattatttaccttaagagagttcagtcctttccatgcctccctactccagatgtgtcagcctttgtccagccattctctgcctgctcagatgagatcattttccatttgtgaaaagtgtctgagaagttcagtgtttgacctacatcatctcatgtgcccgcatgtgaccctggaggtaatgtcagctcttatttctgaagtccattgtgagtggaggagcaaaatgcagaaaggttatgtcagttgcccaaggtcccactttgtcttgtgctctgggtctaaatccaggctgggaggaacatggaggagtgaagagggatgtcgccttgtaatgaagagatggcagtgaggactctgatggtgggcagactaggggaagacctttctgtttgttttcagcttgccccttagcatctcactatcctcattgataaaatgaagctaaggctgttttctaggtcatggaggaggattctatctgacaatgtctattaattgcctagtataatacctggcatgtcatgttcaataaatactaccagccattattattgttgtttttgcagctattattgtcactgttgttattttactaatgtcggtgagaaatcaatgtctgaacttgaaatttctgtctcttcattcattgtctggtgttgtaaggtcacatggctgcaggagaaagacagagaccataaatgacaacagtggactaaaagtaccaaaaaaagaagaaaaaaaaagattctgtagaggatatttattatctaaatgatgcagctgcttgttacattctagttcattgttgccaagcccaaatatgggactaaaattgccagatctaatatttgtttcaagaaatgttggaaatctgtttttaacattggtaagcagtgtctaccaaatacacacacacacacacacacacacacacacacaaacatacacacgcacacatatatacaaatatggtgaaatactatcaaatc

SEQ ID NO: 32136 - DNA, 1064 bp, Homo sapiens
tatagtgtattcatgtcataacacactaaaatatttaagagaaaattgctttttttctgaaaaagaaacagtcttgcttacaactcttaatggaccataaatatcttgtaggccagttgcaccagtacctgctggaaatccttcttacattagtggtaactaaggaactcatagaatattccctttgcacggaaatgtaaccttgctccaacatatattttccctctaaaaaattgtttcttctagtaagctcttcagagttattgaaagaacattgcacagttaggtcaaatctatatatgaaatttcactggcttctctgttaatcttggccctatcagttgatatgaagactgaggctgaatttccttttagcgactctaaaaaattgtttctcttagtaagctcttcagagttattgaaaggacattgcacatttaggtcaaatctatatatgaaatttcagctggcttctctggtaatcttgaccctatcagttgatattgaagactgaggctgaatttccttttcgtgacctggaataaacaactgcacttgttttcctaaattattttccatccacatgcggtgtctaccatttaccttctttccctggggcattgggctagtttcatctattggtgatctgggataaggctgaattggactccttgaaagaggctggaaacaaaattttcattagttggagatacctcaaatgtggagggagactgtgatatgataatgacattagcatactgatgagttagtagatacaatgaagtgctcatttgggcattaaggtacatttatctccatcatgtgtagaaacggaggcataggcagacttgaaaacttttctgaggacacagagagagtaagaaacagacctgagattcatacttaggctgtctggctccagagtctgggttcttttctctctgctgcctttatgaactaccagaggcatcttactcatcttcatcgtctctgcctcccggcacccaaaaaataccacttcataatagagtaggttgtcaagaaatgactgttgagctgaacct

SEQ ID NO: 32137 - DNA, 1030 bp, Homo sapiens
aaagggaaatatcaaagtaaaaaagtgacctcttatttcacaattgattattaactctcctttttgggtttaaaaggagtagaaccctgccatccacaaggtgattattgcagcagtttgatgtcctgcaggcttgagaaataatctttttctttcatcttcaaccatacagatccaaacagcctccctgacccttcatctgaagtagctctcctaaagcccctactctctgtcctggtgcatgatttgatttctctcgaggcattcttcattgtcttttgtttgtttggctatgcacctgtacctctgtcttttctctagttctttgagaaggtaagctttgtgaggacctggattttgtcattgtttatgataggtctcaggacacgctacccccaaaatatgctagctctgcatactgagtattttaaggtgaaggaaactgagaaaactacagaagcaggaacatcactctctgacctttttccatttgtctaccctcaagtgtgccataaaagaattctctgacctaacacccatgcaagtaggtcataagaccttcattccagaggagttctgccctctactcacatgccaagaagaatctgaacacacaggccttgctaagttttccccaatttattaccatcaagtcatactcttttatcatccaatcatacttctgcatgactgtccgtaaaaatacacagttgtctttaggtctttatttctaaaggctcccatggcacataaaatttatattaaatatattcgttaggctttcctctcgttaatctgtattgtgttacaggggtctgagccatgaaccgggcaatgggtaaggaaatgacacagctttttctccggtttattttctatgcctcttttgtgtggggaagagaatgatgatgataatggaactttgcttgttgcttgttggaacgaatctcataagtttctaactttagttaacatgaagtagaagacgatatgtatgtgtattccagcatgcagtcagcaatattcctgg

SEQ ID NO: 32138 - DNA, 1052 bp, Homo sapiens
ttgagaacataaatgataatgttgatgatgctaatacttgctaattaacatttactgaatgtttactatgtgttggtcactgtacccaatgcattatcccatttaaaattaattttgaaatgtttcagacatactcagaaaaagcaccaaaaacaatacaaaggatggcctgtttaccttcaaccagattcaaatgtcattcggattttgccacacttgcttcatttatccacttgagtttttgctgaaatattttaaggcaattgctagaagtattttcttagctctacacacatcagcatgtatctttaaagactacgaaaattccctaattggcaatattattatcatatttctttttctttctttcttttctttctttctctcttttttttttgggatggagtttcgttcttgttgcctaggctggagtgcaatggcgcgatcttggctcaccgcagcctctgcctcccaggttcaagcgattctcctgcctcaacctcctgagtagctgagattacaggcatgcgccaccacgcccggctgatttgtatttttagtagagacggggtttctccatgttggtcaggcttgtcttgaactcctggcctcaggtgatccccccgcctcagcctctcaaagtgctcattacaggcatgagccactgcacctggccccattatcatatttcacaaaattaataggaatttcttaatgcagtagtcaagttctttgactgttttaaaatgtctttttatcattgcttggttggatcaggatccaaaaaagatccacaccttatattaggttattatttgttttagtgctgttttaatccaatattgttatgccattgaatttttttttaactgagtcagttgtcctgtagactgttctatagtacggatttgtctgtttgcttccctttagtgttacttaacttgtttctctatcttgtgtttggtgtaaagtaagttagctctaaggtgggctccagggtagatgctagctataggtggctgattatacacttaagtaaaattagaaattca

SEQ ID NO: 32139 - DNA, 1051 bp, Homo sapiens
ttcttttcctgtgcttaacccagcacctaacatctagtagttctctatctaataaatgctgtgttgggtattattaataagcagatcaggcagaagtgttgccatgttctcagtattatctatagggaaaataatgcgctgctgttaagaggctgaaagaacttcctagctccatcattatgatagagttctggataatttgaaaaccctggtgctcattgacaagtgtgtgcttgggttgggatgggagtggtacatcagagcaatgccacttcattggcaacaggatcacagggtgcatttacatttgtcagtagaagctatgttttgttttgttttgtttttctaatctgacctcaacgctttcatttatctcacacacataaagtgttttccaggttctgtattagaagtttttaactttgtgcttgaaaatagttttacactctgtaaccgtttttctttcttttgctctcacctgtccttatttctttccagtaattgtttgcaaacttatcatttagttctctgaagaaatttgaatctaatccaaaactttaaaaaattctatgattaaaacaggaaaataattcatatgtaaagttaaactgatttttttcctatcatagctcatatttagaaatgtttttgatgattgagcaaaattattaaatttgttctcctctcaataaatatgtgtgatttttcttttccagagtaatcacttggaagaatacaatatatatggcttctgatttacatttgaagcatactctgagtagggttgtggatagatttataagcatgttgaaagaattcgcatatgtctgtctgtatatttttaagaaaatgttgtttctctattgaacgtttggagttttttaatcctgtgaacatcatgtgaggttatatgaggaaaggactctttgaaggtggtaaagtgatgagatgaagtagtaagaaatggagaggaccacaaggaggcacagccaaagtgccttaggtatgactcagatatgacttgcaggaaagcaaaaaagcgggggtgggg

SEQ ID NO: 32140 - DNA, 1077 bp, Homo sapiens
caccaaaatttctgggagaaatcttctacagaatccattccctctgtgtgtctcttaagagctgtagccaagagaaacttaaagaaataaggcagaaatattgtacactgaacccctgccctgccaaacctgactcaggaagccctatgtatggaaactgcataatgctcttggcatttgcagagctgtgctctcagataccttccagaagaatgacagtgtgtgaagggggcaggtcatgactattttttaaaggacgtaaatgagacttggttgtgcctgaagcacttccacaacttaaagctggtatttcacgtgtctggacattatccaaaatattcatcttggccagctgacaggaatgtttactgagtccttaggagccacttgtttggtaccttcgaagctgcctagaaagagtttgtgttgcgtgggagtggggagtgagtgtaagctgcagcatcagctccgagttagccttcccgttcctctaagtgctagttgtgtgactgttggcaagtcatttaacctctctgagctaaagtttgcatccctataaaatggtgaaaaatctggcccttcaacatgttggtttccaggattgaatggaatcaaaaagctttctctaaatgccttgtacactggttgccacgtggccagtgcctagaaaatgttggtttcctctcttctttcttcattgtttgcaatacagtttttcttggtgcaagtgctaaagcaattaagctctgaactgcaccatctttatgacacagaaattggctgagagcctcagaaataaatctgagaattggaaaaaaaaaaaaaaagaaagtccatcaccatacatttgtcagttggcatctccttgctttttctagttagagtctttcatagtagagtgcttatttctttttctcatccatgtatgtaggacagtgtttgacaggcatttttatgtgtgtggtagtatggggaaagtgacaaaaagaggcccactctagatgtcacttccctgtactgcaagctggagttgacaatgaaatccctcctgaagaaccccagtggtgttttggagca

SEQ ID NO: 32141 - DNA, 1139 bp, Homo sapiens
aattttaatttgtgtctgtctagggataagaacttttgatgctttgctcttcaaaggagtttaaaacataataagggagagaatacaggacatgaagttagagaagtggcatgggagaggtaataccatagaagtagaggaacaagagaaaatttccatccaacaaaggttggagaaaacttccaacctttgttccagtgaacaaaggtttaacatttgtatgggtgcatcagttaactgtttcataaaactcatgtgtaccaaactgtccccagtacttggtggattgaaataagagtcatttactctgattcttgtgtctgtgggccagcttggcttgttttgactatagggtgtgagttaagtccatgtgtctgtcaccctccaagacccagcaaaaaactaagacatctgcttctcatagtgaaagacaggaatgcacatgacattttaagcccctgctccattcacatgtcttaagccaaatcaagtctgatatcaaaggaatgtgacagtatactcctctcaggaataagaagtaaagagagagtgaatatttactgaacaacaatctaatttacttcagtgggaaatacagggttatttcgtatatctggtgaacttgttaggaagtagcagtgtttatattgtaaaatcaagctggaggttgcaggacagaggctagaattccagctgagaataatattacaaagggcaggagtggagtgattttttccagtgagtcaagggccacaggttggtcaagggaaatgggcactgaaaatacctttccagaaacacttacttagtagggtgacttcggtagatcatgagaaaatagatttggtagaagattaaaagcaggaagctgattgtttggggctgaaaacgatgaggggttagagaagcaaggtaattaatatcagcgtctcttttgaagacataaagggcagaagagaaatagggttttgaaatgagagagagcaaacgtgagacgaacataagcatgtactatgagagcctatattcattaaagaaagattctggggctgtttgttgtcccaggataatgagtaataggtgatagatacagagctgtcatccttttctctcttttaatataagatattttgtaagat

SEQ ID NO: 32142 - DNA, 1045 bp, Homo sapiens
ggctccagatcaagaaggaacactcacttttttgtattaggaattaagaattcatatatgtaaagcatttagatcaatgcctggaacacagtaagcactacataagtgatggctgttgttattgttgttgttccattcattttaattcatatatattcgttattctgtcatctctaagtgggttctatggtttgaatatttgtgtctcctccaaattgcatgttaaaacttaatccccaattcaacaatattacgagatgttgccattgggaggtgatcacttgtttcctccgaaggagctgccaacaagttaccattttggaagcagaagactaccctcatcagaaacaagatgctaggaccttgatcttggatttcccagatctgtgagaaataattttctgttctttataaatcacccattgtcaggtattttgttagagcagcgctaatggtgtaagacagtgggtaagcctttcatccagcctataatggaatgggattatttttgttgctgttgaacttgtgttattatttaggttcataacccagaagcttgtatgggtgactagctggcctctttccgtccatttatccactcaaccatccatccatcatactatatgcatatttattcatccaacatttgttgagcttcatctactctgtgctgtgtagtggatgtacaacaatggacagggaatcatggttccttcccccacagaactcatagtttattgaggataccaccaacaacaaaaaaaacccaaaaatatactaaaaagtttaataaagttagagtaagctgtggtaagtgctctaaagaaaataaatgtgtcatgaagtcaacaaatattaatcacttgtgtttgttaagacctctgattataggtcttcataagaagtgtgcttggagtgttccctccacatccaaaatcatctcctgtggaaccgtgtggaattatgcagctagctgtcaaacattccccaccaaacaagagactatgtctcataaatgatgatttctgcccttgccattagcgtt

SEQ ID NO: 32143 - DNA, 1049 bp, Homo sapiens
agcatgattttgaaaatctcttacattacctctaaagtactatgtagataaaatgttgcttcgtacttctaccatggccagcctgtccttgcaacagatcattatttcttaggttgagaaccagatgaagaagttgacttgtgttctgaggccatgtcatacaaagactgtagatctttatgtaatcaaaactcacatggtaccaagcagatataaccaaatcaatataaaccagttacaattatgaaacaagtacactgtataatcatttattctttcattcattttcattcatttaacagatgtgtgttcagtatctgcaacatactggcatagcttctgagaggggttactgttacttgattgcagatgtatctagagattattgtcgtactattccttaaaatgcctttatttgtcttctacgactcaccagtagtggagcctgtgggtagcagccaaccagggggagactcctgacttaattagcaggttggaggtactatggtgtatttgtctgttctcacattgctgtaaagaaatatctgagactgggtaatttataaagaaaagaggtttaattggctcacagttctgtatgccatacaggaagcatagcagcttcggcttctagggaggtctcagcaagcttccagtcatggcaaagggaaagggggagtgaggcatctcatgtggtgggagcaggagaagaaaggcaaggtgggaggtgccgcacacttttaaacagccagatctcatggtaacttactatcatgagaacagcaccaaggggatggtgcgaaaccattcgtgagaaaccgcccccatgatcaaatcacctctcaccgtgccccacttccaacattaaggattacaatcccacgtgaaatttgggcagggacacagattcaaaccatatcatacagtaaacccaccaaacatgccagtctcttctttataagagtggctccagagaagaatgttctgtgccagatcacatggatgacactctcttccttcctcaactccttgtcactccaggtgccaac

SEQ ID NO: 32144 - DNA, 1042 bp, Homo sapiens
tgatttggggaagtacgagaaatacatcattggtttaattttggctgctactgtgggtcagtagccaactaagaggagaaactgggctgtaaagaagaacttcacctgcagaaaggtcagatttatgcagaaagccagcaggcaaagctaagaacatgtcttccaggggcctcaagttccattttcaccttttcttcttggtaagtctcagtactataggatacttaggtacacataagccattttctgccgcatttaaggaaaccattaaccacttgcttctgttattctcttcatgtatattcagcccctttctctgttctgctttgctggacctgttgggatttggaggcctttggaacataaaccctaagggttgtgattcttctcattatttggcccaagaaatatctctatttactctctctttaggaataagccagacatggaatttttttttccgttccctaagactcacttatagagtaaaagtgggaaatatttcacttttgggattgtgttttatggagtttaataccctctgagatgcgtgagatgacatgaaaagttcaaacacaaactctgctgataaattccttgtgtgaatgacattaactgaagagctaatatttcttactgggcttttatgctgaagttagaaaatcaggcccattttaatatatgagatgggggagaaaaaacttcctggctgaaacagcattttcattttatcactgtaatctctctctctccctgcccctacccccgtccccctcttttacagcatctagagcagaattaactgtttgtgaggctcttttagttaggaagctcccagttagcaatgcagaaaccagctctgcttatctggtgtgaaaaagaaaattaccagattaacaatgagaactcaaatcttagaaaagagaaggaatggctgggcatggtggctcacgcctgtaatcctggcactttgggaggttgaagtgggcagatcacttgaggtcgggagtacgagaccagcctgaccaacatggagaaaccc

SEQ ID NO: 32145 - DNA, 1051 bp, Homo sapiens
aagggagttcagattttatttctgatgcaatgaggagtcataaaggggttttaagtgaggaagggacctatgtgattggctttgagaagagataggaaagcaagcagtgtggagaatggactgaggagggcagaggctaccaggtagaaggctgctgtctcagcagtaggggaagatgattggagtctctcctagactggcagcagtaggggatactgatgagttcaggcttggggacaggattgaaagagaaatcaaaagggccttcttaggcaaaagagaaggagacatatctgtgggtgccaccttatagcagggagaactggggggaaaggctgtagctgcccttattaggtaggaacattgttttataaaggacacagagcataggcagttttcttgacaagctgataatataatgggatcatatagtgcttacgttacttgaaagtgtgagattatatgaatctgtgcgaatatgagtattggttaaaaatggagttggacctctgtatccatgggctctgcgtgtgtgaatttcatccactgtggatcaagaatatttgggaaaaaaaccataaaaagtaatacaacaataaaaataatgcaaataaaaacaatatgttagaataactatatagcattacattgtgttaggtattataagtaatctagagatgatttaaagttaatgggaggaggtgggaaggttatatgcaaatactataccattcatatcagggaattgagcaactgctaatttttgtatatgcaggggtcttgaaaccaatccaagggatgactgtgggtttgtgtgtatatatgtgtatatatgtgtatacatacatacatgtgtatgtatgtatatatgtgtatatatacacatatgtatatatgtgtatatatacacatatgtatatatgtgtatatatgtgtatatatatacctttctactggtttattgtcacatatgtatatatataaacatatatgtatgtatacatatatgtgtatatatgtgtatgtgtgtatatacatgtatacgtgtcta

SEQ ID NO: 32146 - DNA, 1038 bp, Homo sapiens
ctttaactacggtgtggtgtaacctatatcaattcagatgcccatgtctgatggcctcctttgtgtatgcagtctggtaaatctcccttaacacatctatccaactaatatttgtgattttaaataaaagatgttaccaagactatatatgatatttgtaaaatatccaaagttaaaattctaccagaaaggtaaagtatagtttgctaggataaaaataaatactatacagattctcccaaactgtacccacacttacatttcactaggtaatgctagaaaatggttattttccctattttcaaacaattgctgcatccctgacttgtgcaaagtactatcatccagtttgaaagactattaccacatatgccatttatctatccatatggcatgtatagtatgggactctagggtttattgatatgtgtaatgtataacactgaggaaataactgccatttagcatttctttttccttttcgcctctggaattgtaggtttacatttattttcttgtgaatgtggctatctcttcatgggcagtaaatattagtattttgggaccctcctcttagtcttaccaggcaacatttgtttgctttgtttcctccattaatctagcacatcccatggaaagaataatttactattaaacccctgtgaggaaaccccttcaccagtgaaaataacttagtgataattgatttcatcagagccttccaccttgattttccactgtcctaatagtggcctggcgaagcacttgagtcccatggtgaaagaaagaaatgcacaaataggcctagacttgtttccccgaggtcgttcgacaactgcaccgttgctccatgaggcacacattcagcaattagcaggcatatgtttccagctgactgcatctagcgataaagagaagctccgggaagatagcctaactcaactcctttattcttagggggaaaaaaatttgctcagggtttcttggctgtttccttgctctttacttactcttttgttattacataaatatcagtgt

SEQ ID NO: 32147 - DNA, 1029 bp, Homo sapiens
tgactccaatatattttatacccaaggagaaattacagtaccgtattcctaacatcccattaaatgcttaaaggcaggccgggcacagtggctcatgcctgtaatcccagcactttgggaggccaaggtgggtggaccacctgaggtcaggagctcgagaccagcctgaccaatatggagaaaccccatctctactaaaaatacaaaatgagccgggcgtggggggcgcatgcctgtaatcctagctactcaggaaggctgaggcaggagaatcacttgaaccccagaggcagaggttgcagtgagctgagattgcgccactgcactccagcctgggcaacaagtagcaaaacttggtcaccaaaaaaaaaaaaaaaaaaaaaaaaggcttaaaggtttgccttttatccagcctaaccagtggtggcaggatggctgcagaagctccagcagaagacattatttctgctgtagacattacaactctttcattatagctcctgtagacatcctgagagtcaccctgattagaatggattaggtcatgtgtctatcccacagcaaatctctatgggtaggggggtaggggggtaggggcataggggagtaagatgtgcctcttagcttggcctgaggcacattcttcatgtctaaggatggaattctactgcgaccttatagactgagaggaggagatgattgaattcccaaatgatgtcagggttgttgctggaggaggaggaaaggggctatggggcaacagatgttcattgccctttgatggcaccgcagcaccttcaggctacctaccctctaaagcatcttccagataccatggagctccggaaccttaggtttaatggcagatatattttgatcaaaataccatatacttgttttctcatttgctttgtgcttacaaaggacaaagacaaaaccctagaatagaattttgcaagacaactccatagaagaattacccttttgttttcaatacagtccatcaacattgatcctgaaaaaaaaaaa

SEQ ID NO: 32148 - DNA, 1048 bp, Homo sapiens
tctgtgtcttaataaacttgtcagttgaggttacattattttctaatatccatcacggaaacgtgggatggtgcagctgggcaaagatgtcaggtcgtggtgtgtgtttttagatgggtgtgatttgacacatcccagcagtgccatggctgcatggcaatacttgaaagaacagcctcttcttttaattagggccctgctgccattttggtgggatgtcattctgacacctgtttgtgctgtgggggctgctgataacctctcaacacctttggcagaaagttctgctgatgtgttaggtgtttggttaatgtccatcctgccagggattcatttcccctgacctgaactctgctggcattattttttattcaaaaaagcttcagcagtcttccactagctacctacttaagtttatgatctcccaccaaaccttttttagggagaaattccaaaaaaaatgtttttgttggaatcctgctttgagccaggcatgcccctgaacactggacatttgagggtgagcagaagccagcactgtctctgcctttaagaaactcattttcacgtggaggagatggtcaaagaatgacagaagcacatcctgtgctctggagccagtgctctgaagataaggaaagtgattctaaagagcaatagatcagtgtttcccaactaggagtgattttgtcctctagggacttctggcaacgtctggaggcatttctggttgtcagaactgaggggtaggtgctaccagcatctagtgaatgctgctaaactttccatgatgctcggtgcagaccccacaacaaagaatcacccggccccaaatgtgaacagtgttgagggtgagaaactctgctgtaaaccatagaaatctggcctggccagggatgctggagaggcttcctccagggaggtctgaagggtgagcaggagtcagcaaggtggcagagatgggtagggaacagttttcttgacaggggaaccacatgtacaaaggaaagcacagggggccttggaggaacagaaggaggcttctgtg

SEQ ID NO: 32149 - DNA, 1032 bp, Homo sapiens
gcttctaacttggtgaacgatttgttggtgatatcctaatttttagaggaggtagaggtgttcttgttgcccttctgaaaaactgtgcatttctcattttattgtccattgtagaatatgtgtataaatgtgcacagcttttatcttctatcttacctctcctttctgaagtatgcattgtaactttgctcgtattgccatttagacttcccaaagagtcattatgttgagtaaaaataatttagtcttttctttttgtttggcttaacttttcttccctcctaccctatatcttttgtcttccaagatattataactaggaagagttagcatatataattatgctattatctcagaccctgagataccctgtaggacagattcacaacagagtcatcatttccaggctaatagcagggggttcaccctattcagcattccacattttcctctgtaggcactcacattagttttatattttaggtagcaatatgtgtagtttagctttgtgcaaacatattaggagtagacattcagtgtactgtgtcctggttatctagattctaaagcttcattttataaaaatccagctctgtggggaaagaggggtgttttattaacatgcggcattaacactgctgggctctgtggataggttgacatagtgtcatcgtcacagaagataaaattcgaaggagcatttgtggagagcatgcagtggatattagaacaatatctcaggattttatggtggtttaatcattatccacccctatcctttcgttcacacagtcaacctatattttttaaaattcactacgtgccaggcactgtgttaactgctgtagtgactcaaatgtatgattgcatttatatgagatatccagaataagtaaatccatagagacagaaagcacgttggtcatttctaggggctggggaaaaagaaaataagaaataactgctgagtgggcatggcgttttattttaggatgatgaaaatgctttggaactagatagacataattgtgc

SEQ ID NO: 32150 - DNA, 1049 bp, Homo sapiens
taggctgttgcatatttcggatttgtttttcagagcatcatgcataaggtgattgctatgatgtatcacaggtagagatatatataggagggtgtacctccatttcttttggagtcagacatgtaacaacttaataaatgctaaaatatgaaggatataactgtcagaatgagataatgtgacaatatcttgaaggctataaagagctatggaaatgaaaattaaagtcaataaatgcaaaagaaatgcattgagcttttcactttgtgagaccagatcacaaatctgtatgaagattttcaattttaattattaccaagaggctttgtgcttattaaacatgtctttactaacaacctaaactctactctggtcttctgttgatgccagtggtaatagggggtgcttctgacattagaccaggccatgaatcctagcctatagctatatatccttgggaaattcctttacctttttgaacctagatgttcccatctgtaaaatgaggataatctgtaatctggggtcaggcactgtggctcacacctgtaatcccagcactttgggaggccgaggtgggcagatcacttgaggtcaggagttcgagaccagcctggccaacatggtggaacaccgtatctactaaaaacataaaaactagccagatgtggtggtgggcacctgtaatcccagctacttgggaggctgaggtgggagaatcgcttgaacccaggaggcagaggttgtagtgagccaagattgtaccactgcactccagcctggtgacagagtgagactcagtctcaaaaaaaaaaaaaaaaaaattaaaaaaatttgtaatctgtgtaatgattgtagagagtaatagtaatattcctggtgcaactttattttgttacttctcatagctggttggtaaatggtaccatcaatgtggcagtttaactcatggtactttaaagagactgtaatttttcctactcaccttcattttaaaatagaaaatttaaaaatatccagattatcaaatataagtaaatgcttactta

SEQ ID NO: 32151 - DNA, 1043 bp, Homo sapiens
ctcatggttgaggattttaaattttgagaaatctccatttttctgagtgcagtctggtgtttacaattctaccttttaagcaaaatgtcatccctttagttttcggtcatcttaccccagtgtcatttagaatgaatgattttaagaacacagagagaatattctttcactggcagtggaagtggcagaccaatcacttcagtagaaacttgtgtcattcaaaattatgaagttcatataacctataaacaattatttgaaaaagctcttaatgtggatcgtggttacgaaaagtcaaaaccaaacatgagtcacgcagcctgtagttatcagttctgctttcacggatggtggtggaatcattttagagggtagaaagttaggactcagagtgtggggtgaaataaagatacatatccagaagttcagatcctgggcaggtaagcagcatgtagggtaaaggtgtcaaatatgagatgcaggcaactctgctaattgaacttggaaatcccatttacttctgaatgccctgtagagagcatggctcaactcaatctctgtgttgattgttcatagatcagatgcttacctctggttacgtgtccacccatacaggagaggtagagtcacagaacggaaactcctccacagccatttgggaggtagggagatgagtctctgttggctttcatgaaaggcatctgccataccccatgtctccagccacagcattcatgctgagtcctaaacctacatctgcatttgtctccttgctttagggctttcagcagccctcagtttacctttttcaaaggccattgaacttttgcctgtctatcctttaacttttttttttttttttttgagacatagtgttgctctgttgcccaggctggagtgcagtgacgtgaactcagctcactgcaacctccgcctcccgggctcgagcgattctcttgcctccgcctcctgagtagctgggattacaggcacccaccaccatgctttggtaatttttatatttttggtagagacagggtttc

SEQ ID NO: 32152 - DNA, 1028 bp, Homo sapiens
cttctaagaatacattacccctaccatgtccttaccaaccagtatcttgagttttcatgttttgtaagcctatagatttttcacacattctcatgacaatgccctaaaacatatcagaatgacctttttatagaaacaatgagtggaactcacatacgaattctataggtttctgactttttaaaaagcaaatcatagcatttttattgagtgtcacggtagtcacatacgttgttctcatcaccgccatattaaatagtatgatttgtcggcggggggactgtggggtggtgattctaaattcgctttatactcttagtgcagctggatctaagaaaaacattttaaagtttatcagaaactcagtataattcagaacaaacaggattaggtttggaaaaaaaatacagatatagtaagaaaagtgacccatatagaagcctttcgaggtctgttggaaggccattattgaaaggaaggaaaggtgtaggttgtcagtggtggctgattgctgaatgactggacacgattgttgagatggctgtcttatattttgtatatcaaaataaaactttctagaaattttcttaactaaaagtaaatattctaatttctaaatttttatattgactttttcccctctttttttctggatgtttattggtacagagacacacacacacacacgcacactgacacactccctacttatttaacacatttgaaatagcactttgctggatgaggaagtacatatggtcttcctaggagtgttctgagacttttttcaaatggtttttcctttatcccatatctctaaagatcactttcatcccacttagttgtgtatgtatgttttcacacacatatatccttttgaggtgggtctagtgggaggtatctatttttactctttaccgaggtaagggtttccatgaaacaatgcaaatatatgtgaaattaaactagaatagtaattgcaactggagcgaactaaaaagtacagtggacaccaaattaaattaata

SEQ ID NO: 32153 - DNA, 1031 bp, Homo sapiens
ccacagaaggattacgaggggcagaaacccagaatttgccagaaaaatcttcaggagcaatgaaaacccaaaataagcaaagccagatgcagtaggaaattagataatttgtgaacaaaatgagagtaatgtgggtagatagaccctgggtaaataaacaatattaacttctaaattatttgattcagccttggttaaaatggtagtaaaattcagtgatttccagtttcaccagtgcttcatgagagcctttgaagaagttctaggaaagaatattggaagaatacaaagcattgactgggtggcccttacctttgtttagaagcaggataagaaaggttaatttatatatgtatgtatatatgtatgtatgtatgtatgtatgtaggcagtatagagttaagagctcagaccctggattcaaacctcatttatgtcacttacttagctgtcagatgcagggtaagttacatatccttgggctaataataatagtaactaaggctgatttctaagctcttagaaaagtaccatatatgggtttgttgatatcacagtcatcatgactgtaattagtattgagcacatattcaccatcttgtcattgcaaaattgttagtcttctgttaagaacttttctgtaagatcgaaaggtttgttttaattatgattttcaagaatctttgccttgaaagtttaaaggccatatgtgtttgttattaaagataacatttgttagaatgctttcaaagaaaaaattgttcatttaaagctgtaaactatgtttgtcatggcaagttgaactttcttatcaactgttttataattgacacattgcttatgacctagctgtacaatcctgttataattctcttagcagtatataagaattaagcattttctttctaaggtagcaacattacttgaaagctttgtttcctacataaaatatatttaactacaattttaagtattcctaaaggatttaaaatgtagtatctcattctttcacaagccatagtttaatttct

SEQ ID NO: 32154 - DNA, 1013 bp, Homo sapiens
ctcctccccgttgaccctccgacaggccttagtttgttttgttcccgccatgtgtctatttgttctcataattcagctcccacttacaggtgagaacatttggtattcagttttctgttcctgagttagtttgctaaggatagtgacctctagtttcatccatgtcactgcaaaggacatgatctcattcctttttaatctgcatatatttttgagctaaagcatgagacatcaaagaaatttctgcttgtagcagtctactttacctccaccttccttgtcctcctcctgctcccctacttcagtgaagcaaatgttaatccctatgccatgttactactgtgaaatgtttgagaagcatgggttagggcatccacagcagctattatgttgaacactctatgaaaagccacaatccagggtgaaagagtagcatcagcagaggaagaaaactgggagagtgaaatgtgtggcacccacggagtttcttttattgtccatgcaggatgtgaatggacaagcagtgtaatatatgactgacagagtagatgatactcttagttttgaattccagggtaacgtttctggatttaattcatttggcaactggtgtccattgaaggttttagagcaaggatctgttaggagctaaacatgttagaagaacattttcagcaataggttaagtcataactctcagacagatacagaaatgaacctgtgttaaagattttatttaattcacaagggaagctgcagatgatataactggtttaaaagataatccaaacaacaggcatgtttataaaacaggaatattgaaatgtgtgtgaaaatggaggcaaagctgttttcttcctccaggtggcaggaaggaaggaggtcaaagtaaacctgtatcaaacaggaaataatttgcatgtcttaatattttgcattactattagttacctgtaatgtaacagagttgtaaaataccttgaagacactgaacagacctagacattgcgtag

SEQ ID NO: 32155 - DNA, 1050 bp, Homo sapiens
gagagacagggtttcaccatgttgaccaggctggtcttgaactcctgagctcaagagatctgcccacctttgtttcccaaagttctgggattataggtgtgagccacggagcgtggcttctgtgctaacaagctattagtgacttcaaaggtgggcagcagaagttagcccccaaatagcagcagtccactgttatgtagattcctctggtaatagtcacctggaagaaaatctcctataggtccagcataagtcctctattactgatttcggtttatctagtttgagacctttgaaagttgtcttttaatgccctttctatgacctattgcaagaagatcattgtcagtctgctgtgcactgtgttttaacagcagatatggctttctctggaaggataaaatccttgccggtgttcctccccatggttctttgtagattctttctctttttgccattaccttcttcgccccatccctctttcacacttggaaatggccaaagccgaactaatctctgaaactgaatattagagctctgcctagaatcttggcccatttttatttgagcttttttcctacctcatttttgctggaaaatccttccatttggcttttaataggggtcatttgtgaacaatatttcataaccagttacagatttcaatcttctgcatgtgtatgataatttatagtccaagtgcttttatacttgaacatcttttatgagttctactgccttttccctgaaaggaaactgctttcctcttcccatattgcaggtaaggttattgaggcaaatggactggtgaaaatgtggaatctgttttaaaaaggtagaaccatgtcactgtgcaagtaatagaaactcaaagtaactttaaccaaaatagggattgtatgtgaaggacacaaatgtgtctctcactgcagcaggaaagagagagggcaacaaagcctcactgggggaggcaagcaagaactgcagttgtggtcggagtctgtgctttggccttctttttctctgtttgctgccttctgtgctggggct

SEQ ID NO: 32156 - DNA, 1067 bp, Homo sapiens
ttgaaatttataagggaactttaaactattttcaagttccaaaatttgggctatgttcaagtgttctagaataaagccattctttaacagctgacttttaaccactcttttcataggcattcaagagactgattacttttaatctcctttgtaactaaagaagagccaaaatggcgctcacctgtctgagacttccttttggtcagggtttttgtgcaggtcttgaatgtttcatttacttctgaatcagcaaaatgtgagtgctttgtatttgccatattagagagaagtggcaaagcagtgagccaagaagcagccccaacttggttcggcttttcagattacataggagtgcacagcttgctgctgatgtaaagcatgtggagagagcccatggagaattagttttctttcatgattgaatgctaatacttggtagtatgtggaaaaacagcttcttgcttgtacaggccaacagctgttgttatctgaaaaataatcattatgatagaaagcacactttttcatgttttctgtcagatctgtcagaatatgttctgtgttaacatatgcatgtttcatctgagaaaaaaatgtaattggtaatttaatgtatttttaaaaatttttcttagtggtaacttggagcataccattttttttaagttctttaccagcactgtctaatagaaagtaggtcaccaaagtaattcttacatttaagtaaagagaaacaggcataattaatttaatatagtttatccaacccaatatatctaataaattttaaaatgtggtcaatataaaaacaagaggtttttgtgttacttttttgtgtgtgtgtgtgctgagtctttgaaatccaggacatatctaacacagcacccgatttgggctaaccctgtatcaagtacccaatgatgatgtgtggtgattggttaccctcctgaaccgcatacactgtagatgctcattcctggcatagtgtttgaatctgtatgtttgaatcatagtgtttgaatttatgtgggttgtttgcccatgtaaatgatgaactatcaaatgcc

SEQ ID NO: 32157 - DNA, 1051 bp, Homo sapiens
ttcataaacctaggatgagaatctcagaccctgtgttatatctgccacactatggaacctagcagtctattcagtgacttttaaatcctattgagtgatcagctgcctgatatgctatgcaaagagctctctctgctccttaaacattgctcatgcaattgtgtattcaataactacttactgatagatgcaggatgcagataaaaggagggtcctggagaatctctgacccaccctcacattattgggagaacagggtgaagccaggggaagttcacctcctgtgcagtggggaggagcctggcatcttcaggtcctgtgtatggcttggaattcaatgtgtgaggtgatggcctgttagcaggatcccctcttgctttgctgagagttttttttcttttttctttttcacccaataaattccaattcccttacccttcaatgtgtccacgtttctaatcctcgctggtcatgtgacaagaacctcgttttggctgaactaaggaacaaaattctgcaagattactaagacccatgccacgtacagggttctgacccaggcggtgcgaatatttccctggtagccttacacacagcctttggttacctcgcactaaaatacccatgaagacacaaaaagaaaaaagaaattcactgtaacatctgttaagttggaagtcaatctaagtgtagaatttgggaaagactgttgctaattataaagcagagagactacatagaggcatcttctcagagataagcatatagcatttcctaccttcagtctattaaaaaaaaaatcaagagggagagcaggaaaaagcaaccaatggtgtgttaccttcaaggcatggatcccaacagagcttagaacgcagtaaaaagattttctacaagtaattatgatttgtgatagaaacacatttttctcattcaatcctgcctttgtctccacgtgggcctggttctccaggcttctgtagagtttgtgtatctatgggttttaaatgcagtgcttatttgaacagattttaatttctcagtttttatt

SEQ ID NO: 32158 - DNA, 1030 bp, Homo sapiens
ggagagtatccacataggtccaagccatcatgaatacttagttctcctcctagttgaacagtgtgattgtaggtatttaacaatagcaggaattggtaaagaagcttattcctggctatgagattccttgacagtaagctgtagaccaggaaggtcagtagttctcatgctgtctctaattgatgagttagtgttacctggtgtgctgtgttggaactcactgtgaggccctgcccagcttcaacagggacctgtagtaagatccaggggaatacttgtcatggacacgtactggatgtccctaataggaggacaacatatatcatctctgttgtacacacttagtaatttgttcattaccagtatgacacaaatgatttaaaatttgtgaagtatggggaaaagggattaggatgttcctaatcttaaataaagcatatgattttcataaagtttactttaaagcaatttatagtgtttatacaaagggaaatttgctaatgacattgccttaagtaacatctgggatttgtttttaaatagttttgtgagtgatagtggaggtataaatgattcattatatcattctatgtctttgaaattttttatgataaaaagaaaaaatcttaaaatgtagacttttatgatatcttggctaataaaattctttgaagtgggtgatggactgatttgataccagtttccaaagagtgttagaatacagttttcgtgtggcttatttttcaattagaaaaaaaaatcttgaaagatacttataaatctagctttattaactttcctgacaaaccctaaaagtcaacacgttatcttctaacaagtttggaggcgtctctaaaatacagcctgtagctatttatgtagtttctcctcactgttcctcctccagtgtttgccttttatggcctcaagagagagcataatctgaaataatttctaggatgcaaacacattgctgaagatatgggctcatggaatgtgttctctgtagtactgacacgagtgacttttc

SEQ ID NO: 32159 - DNA, 1027 bp, Homo sapiens
ttttagcttcctggaccaggaacaaaggtgacatcatctttgggaaagcacaaatgcttaaacatgtgtcttatttgttctacataatggttttaaaaattgtgacgttacgtacaattttggagataatatgtagaaattgctatttgtggttccatttaatatgtatatataaaatcatgggagtttggagctctacccttctacatggcaaatattggttagagattagtagctgaaacccacttttagttgggatatgggcttgccagttcagtgccatctcccactactcagaagccaagtacacatgtacactattaccaagttttccctgcttgcttactatacctgccctggcttcttcaggcatctgagttgggagtctccaggaccctcagttccccagttgcaactgacattattattttaactgtggtgcttgatcctttcactcctgatgtaggtatgggagtgtgtactgtaataatctgttaattttatttctgcagaacctagtcattacttacagcatttctggtgagtggctcctacaccaataccaattgtcttctattgttttatcaaactaatgatctccactgccttaattttagctgttccagccagatagacaagagaatgaatcaggaaattctaactgcttgagaaaacagatgtcaacataactaggttttaccctcatggagttgacagtctggaaggggctatgtgatgttagttataaatatgataatcatatatgatttacggtaagttaccttatgaattcagcaatggaactggctttccaacatttttaaaattgtgatttctttagaaaattttgtccaagttgtgtaaaatttaaaaggaaatattgatctttgaattgctttttctcaggaagctatgtttgctgaagtccttatatatacgtttattaataaacagtttatctttggaggcttgtatatttttggagtttagtaccttctgaaaaacttagacttacaatgaatctttt

SEQ ID NO: 32160 - DNA, 1237 bp, Homo sapiens
ttaactggcattgaattcttgttctgataactactctgtatctgtttcttcagactgggttggcttggggctttttcgagaatcatcttatatcagaacctaaggagatactaaactgagtctgtttttagcagggtataggaatgtatgccttcaaatcctatgccttggattttcatttttacaaatctgatgggccacatatatgggttggaaaagtttaaaataaggataggaataataaagtaagtcactaatcagtctgcctttcacaggtaatgactaatactattaatgtgcatacttttttactatgagtttatgtatgctttaaaaataaaataattgtattttaaacaattttggtgccatttttcatttaatatgttacaagcatgtcatatgtcataaaaattaattatagcataggagtctattgtatcacataccattttttatattgccacttttttatcgtgagacatttggattctccagcccatcatcgtgatagaaaaatcctactacataagtctctggccatctcttcttgtttccttagagttctaagaagtagaatagataggataaatatataaaatttgttaaggttttggggtcatattaccaaatttctctctaaaaaagctatcagctgaacaggactgtatgaatgtcaacttctttacacacttcttataaatttttaaaaattactgcaattttgaaagtgtgtctgtctcattttaacttgatttttgcttgagattgacttttttacagatttgtttttcagccactcaaatacttctgggaattggctattctgtatcatttctaaagagttggctttatttaatgttattaatttgtaactttttctaacaaaagctctatgtttgcatagatgtttaaaaaaataaaaaatctcacttttttgtttgattaaggctactatgccaagcagtattcatgcttaatttgttgtctaaattgattagacaaagaagagtaattcaggtttagactcaccagcagaaggagatgtagggaacacctggtactgaggttcaggttctgtgtgccctgagggaaggtaagaaattccctttggcagttttcactcttaagcctttttagtagaccctctactgggcagagcacttgatatgtagtatactttgtatagtgcataataatcacctaagcagttaaacttttaccaaccaggcctggg

SEQ ID NO: 32161 - DNA, 1098 bp, Homo sapiens
gcgatcatgctcttcctcattgttggttttgttgtgctcaggagccttgaacttgggcaagtaaaaaaaccacagttgaactcaatctgttctacaatggaggatgtgcttagtatggcatgggaaactgtttcagaaggctctgctcggttacttttgcagcgttgttataggctgatacagcaaatcccaagacttggtaaatatccttcctgaacaaacacaattttaaataccactcataaatgtaacataaaattatttcatgattatgtattttagtttctaataattgtcaagttctttctctggtacagtgtgaactacagtgttctttcatggcacagtgccagttattatttttggatctctgaactcattgatacaagccctttacaatttcccttacgcttcttgagtttgggtgttgatttgataatgacccagtgattaaacaaaatcatcataaggagacaaagataaggaacaattttcactaaatggaagtatttatgtcattacctactctctaaataaggttacaaatactagacaaaggaggtacacctgtgaattacaacataaagagcttctgaattgaagagttacttcgttgacatttgtcatctatttgtcaagataaatttaaaaaaaaatttgtgacaaaaactggaagaataacctattgctgttttggaagtaatttgttctatttgtagatagctgctgctgattgtttctttgcatgtccattgagttttaaaatctatttcactttgacttcaaatttagtttttttaatagcaatttttcatttcatttaggaacattaaaaattgtatgcagccttttgaaattttttaatcatgcaatgtcattttcttgctttgcttttttttttctcaaataaagccatctgtttagtaaacatggaaaatggattgatatgcaacccaaaaagttcataatgacaactaaataacagatgacagattagataagaagaagtcattaagttggcctataaaaggacagccatctgtaccactaaaacaatcttccaattgatggcagtaataattttctgagtccatgaca

SEQ ID NO: 32162 - DNA, 1050 bp, Homo sapiens
ttattgagcatttacaacacacattatttaatataaatcttccatcaattctatgagttagttaccattattactccattttatagatgaagacagtcagaaaggagaagaataatttccccaaagacctacaactagtgaagacctgagccagattataacccagttcacctggctccaaaaccaagacttttgattgatgtgccataaatgcaggggctggcagagaaatggataagcactagaaagtatagacctaccatgttgtatctgtgttatcagccccttctttacttagcaatgtttattagcctttcactatgctctttctgaaataaagctgattttgtttatgtcagaacactatgaccttagctttttgacctaggctcacagtaatatttgctcaatgatcataattcattgtgatttacgtcttaagaatataaggaacacctgagatctttgtgccaaattcagaaggaatagagtggttttgttttcttctttgcttttttcttcctcatcttccttcattctgactgtagtccatccttggtttcaattcatggcaagttcacagaacctagcaataggttaaggaaaggaaacttctcagccaaatacatctctagtatcaaaatctccaaatagtggctggaaaggattgttctctaaaatgagttctgtctttagaatattttaatctattttatgtcacaaatatgtattaagtgcttgttatgttgagggtgctaggtgcagtgaagaataccaagctaagtgaagtgaactttgccttgaagaatgataaggtgcattgccttctttctcaaaacttatgtggttctccagacagctggaggatataataaaacacaaattgctaaggcctatctcctgagttttgattccagaggtttgggttggaggtctatagttcgaacttctaacatgttcccaggtgatgctgatgctgctgtacataatacaattatgagagtcttttatctactgggagaaggtcagttctcacctctgagccagtat

SEQ ID NO: 32163 - DNA, 1051 bp, Homo sapiens
gagtcaagggaaagttaataaaattggagttactattgaataggtgaggtgttcagctctgttcacgtaggtgataaaaatacaggacatgtatctcatgtacatgataaaaatgtatctcatgtttctcatgttgatgatttaatttgctgaatgcttaagtggcagacactgtgatgggataaagaggtaactaacacactgtccttatccacaataagcacacagctcatacctagtggtgtcatgcttgctagaaacaaaaagtgtggtgagataaattaatttgttctgaaaatgaaattaaaacaacacattttgttaaccctctccaaaaaaaaatccgaacagaaaagccttcatgtttgataagcttttagcttctaagtattgtatctcaatatcaaccagcagatatataggattactaagtttaaagatctaaaatgtataatgtgaggactggagttaataaaattgtattgtattagggatttttttaaggaagtagactttagctgctcttgtcatacacaagaaataaccatgtgagatgatatgttaatttggttcacttagtaaccatttcactatctatatatattctataacatcatgctataaacttcaaatgcacacaataaaattatttttttttaaatctcagtattaaacactgagatttaagattggtgacacccatggcagaagatgtgtgcacagtttggttgagtgacgatgtgatgctgcacatcttgagttgacttgtgtcacttgatttaagaaaggaaggagaaaactttttttgtaaatgagagctgaagtggaacagacttctggatttgactttctcatgaatggattcccgtgagatatgagatagtacagctcacttccctcaaaaagatttatcctcctttactattgccctttggtgtttgtacgagtcaggagagatatggtaagaacttttatttcaaatggtctaagttctgtgttcactgtcattgaggggtaaaatctgtctctctctctggccagtggggttctg

SEQ ID NO: 32164 - DNA, 1050 bp, Homo sapiens
taatgaagaaaacaagcagtcactggaaacagatggaagatgaccaagatattagagttaccatagctataataatattgttaaagaacttaaaggaaaacatggatgctgttcaagaacagatgaagaatcttacctaaaaactgctataaaaatcaaatagaaattctaggatcaaaaagtgccatggctgggtgtggtggctcatgcctctaattccagcactgtgtgaggctgaggtgggaggattgtttgatcctagaattcaagaccagcctgggcaacatggtgagagaccccctctacaaaaaataaaaaaattagcaaggcgtgttggtgcacacctgtgatttgagctactcaggaggctgaggtgggaggattgcttgagcctgggaggctgacactgcagtgagttctgaacatgccactgccctccagcctgggtgacagagtgagcggtctcaggaaaaaaaaacaaagagaaaagaaaagtgccatgattgaaatatactgaatggagttaacagccaactagtctctgcatgctaaaaggtcagtgaactttgagccatatcaatagaaattatctaaacaggaaaaaaaagactaagaaaaagaactattttgagatgtattacacacttaaatataaatgcaaaaactgtagaagttctataacaaattagagaaaaaatatcttacagtctcaggcagagatttcttaaagagcacacaaaaagcactagctataaaagaaaaaataagttaataaattgaacttcattaaaataaaaaccttctgattatcaaaagacccagttgagaaaataaaaaggcaagctacagactggaggaaaatacttgaaatatatatatctgacaaaagacatgtatgcagaacatatgtgtgtgtatatatgtatatatatttctaaaatgcttcataataacccaatttaaggcaacataaaaggtgaaatatttcaacagagtgcccaaagaaataaatatatttatatatatgttttttcaaatgccaataagtcc

SEQ ID NO: 32165 - DNA, 1070 bp, Homo sapiens
ggcccctttctttcttccttttaaaaacctttctctattcatgaagcacaaattagcctttggaagactctctatctagctcataaactcgttaccttcttcctcagaggcatgactcattcgcttttgtctctcgacttcttagattattccctttccttacatctcacttttcttttactgtggaaaggaatatagtaaatgattaagagtgaaggctatggattccactttttaattcataccgcctaaaagctgggtgcctttgaacaaggattttaaactttctaatcctcagtgtctgcatctataaaatggggagataatcatggcttaatgagacagtccatataaaatgctcaggacagctcctagaacatagaaagtgtccaggcagtggtatctaaaaacaatgatcatgatgatatggcttatctgtgttcctcatccccttgccttgcagaaattatcagcttcacaaagcaccaccagctgtcaaatctgcatctagcctgacctttctactcaattctatttctgccgtttcaactacttctgaatagtcccactgcagtcctctgctttcatcttaaatgtgacttctccaaaagccacattctttttgacctttgtccatgttattttattgtatcatctagcttcagattcatgcagtgatctttaaatacttctgtatagctcttttccccacatttctgcagttaccaagtcctatatagtcttccttcacaacttctttgtcatgtatttacttctatttttatggccacggctgcagatgaactctcagccactatccttctggacttaatgcagttttttaagtgatgatgatagtggtaacagtggtagtgatgctgacagcagcacagttaatgttcgtggagaccttactttgtgccaggaactattctaaacatatataatatgtatcaactcacttaattctcacagcagacctttaatgtaggtactagtatttcctccattggagatgaaaaaactgaggctcagagataataagtaaccttcagaagaccatggtgcat

SEQ ID NO: 32166 - DNA, 1048 bp, Homo sapiens
tgttacacacatataaactgacctatgttttcaaaagttacatggtgagtgctggttgaaaagacttgaggaaaattttctcagatagctttaaaatgaggcatgtgctgtcattggtagagccttcgtttagtatgcaactgatacttgaaatatgactttctctgttagtggctttaacaggttccagtaatggttgtgtgatactcttcattttattagggttcaacagttcatcaaagggaagagaaatgtaggggctcctatttgaaaaatttatgtgtgtttatttacacataaatatgtacatttgggtcaggtgcagtggctcacatttgtaatcccaacactttgggagcccaaggtgggcagatcatttgaggtcaggaatttgaggccagcctggtcaacatggtgaaaccctgtctcgactaaaaatacaaaaaatttagccaggcctggtggcacacacttgtaatcccagctatttgggaggccgagataggaggatcgcttgaactgtggaggcgggggttgcagtgagctgagatcatgccactgcactccagcttgggcaacaataaataaaaataaataaaatttaaaaaatatagtatgtacatttgcatatcctattcccattgaatattatctaaacttgcctatatttcttaactcagaagttacatgcatcctccttaacaagtgggtgagctagataaatctcaggggattaaaaaagattcaattacttatcttttggggtgaattgatgaataagaaactgtaatagcaaccctctggacctactaggcatctgtaattggtaggcttttccgacattttttccttcacagacttagcaaccgaagcacaaggtggattaaataaatgactaaataaaagagaaacagaaatatcatatcctggctccagatccatgattgtcagtagtgtgttacagtgtttttaccagtaacagttagcattgccttgattataagcaaacaaaagtagattctatttagcttaagcaaaaaaaaaaaaa

SEQ ID NO: 32167 - DNA, 1030 bp, Homo sapiens
cttgctgcaggctgatagcgccttgccagtggagttttgcaatggcccctgaacaagtctctctgcttccgttggaagtatgcattttccatactcatcacatacataccacattctatacaacaaaagctgtattttcccaattctcaacataaaaataatagaacagaatgtcctgtttcaagttttccaccttaatattttcttaacaagaaaagcaaattgatattaatagggaaaaattggagaaagttaaggtcaaacctttaatttttctgggtggtactgagattttattataataatgctttatgtaataaatatcataatacttctatagtattaaatggaatacctaacaaaataaaataatactttatagcataattgcatatatcagcatcatgattttctcctagtaaaaatgttttcagttcatggatgaaatttaatgtcagtttttagcagtgtttggaaaaataattaaaatttctgggtctcaccatctgaaatgatctgaaaacatctgtgctattggaattgaacccaagtatgctaaaatgtttatcgattgaactaaatttcaatcgataaacatgcgagtctgtgagctggaagtgccttttctaggatggggttcagaatccagggagggaatgagattagatacagtaaatcagtgaaaccagaccaaacctggcagctaaacagttgaagtggagcaaaacagaatgtggagttaaagcagcagaagtcaagccataaagcaaagatggatagaggcagtagaaataaatgggtcccaaaccactgagcaatatttccaaaatgccaatgaagaaaagcagtttttctagccatctcatcaaaactgtcttcggccaaagctttattctctctttagaaaaaaaaaaaaaaaaagtagtgggagaaatcttagttctttacagaggtaattgtgataactggtgaggaggagataaagacgagaaagttagaatttgaaagcaagagaggccaggaagagaaa

SEQ ID NO: 32168 - DNA, 1023 bp, Homo sapiens
ccaagaaataaaaatgctatttaaatgtttttaggacattataatgtgcatctgtttggtaattcttggttctagacctccttaaatatgaattgactggttggagtctcacctctactttctcaaataaatgttacccactgtgcaccagtgatgattccttcaaagtggagtaaaaacttggatgcctgcaaagcagtctaaggcacagttcttctgggcttttgtaatcatctttctcaccttgtaaagatttctccatctaatataaagccaatcactctcaccaattcgatttatctcatctttcgaaaaaagtaatggaagcaatggctctattttcttccgcatatttcatcagtctcttatattcttaaatcatgtaaatacactaaaagtatgatgggtttgggaattgatattttcctggtaaacatacaactgaggtgatggaactagattgtacagtgttctagaaggtagtctaggcaattttggtgttctgggtaccacggacatcattatgttctcaaaggaattgcagaggtttgatttaacccaacaatgtggttagttggtgatcagcatgaatgttattttcccattgtcttagtaaaaaggggattgattattaaacaggaatagttctctttaaatttgaactgtcaagttgttatttaagttaacagtgtgtaatttttgaaggctgttgtgagacctcagttcttcttagtttaaaagaaattaaacaagacacagcaaaggatatgcagcacagagtcatttactgcaaaagaaaagcatattttgaaagttaagtgcggaatagacagtacaccctgagagacagagaattcagggtgggctgcttgtaaggatgagacagcaaagactggcaatagggagttttggggagttttacatgattattcataaggaggtggaaagcagtgttactagtaagcatgttctgggtggtcgtctggacgcacatgtgcagtagctgtacatgcttgtccatgt

SEQ ID NO: 32169 - DNA, 1052 bp, Homo sapiens
cttattgtgacacttatgataatacaaaaagtaataaaaatacaattattatcattcggtagctgctgatattcactgggcatatactatgtgccagatttgcatcgtcatctcatttgaacctcacaacttgtgagggagagatcttcatggcccccattttccaggtggtgaagagattaacttagagctgaaatacttacatagagtcagggctaggatttaaaacaggactgatggtgaaacctgaaggcatagacatgacccatagctgcctttatgttttacaacttcctgttgattttcattttcctcgtttgtcagtcatctcccttgacttcccacatctatctatgttgcatcctagcctggtgcctggcctggcggaggcattggagcattggaaagaatgaatgaatgagtttagccctctggagagtgtatgctgaaaaactgttacctcgcctttaagagcttaaaagtgaagagaatgaattttgatagaaccattttttaaagtaaggaccatccttctgtgtccccagaaaattaaatagagtcagaaaatggcaaagccaagttagaagcattcaggtgtggaagttgtatagggcacttgagttaaaaaaaaaaaaaatctgctcaggcataaaataattaaactgttcatgacagcgtataattgcatcattatattcccaactctgttactgtaatttggctcataaaagagcaaagtgtcaaaatctttctaatggtatttaattttgttttagcatttcctaaaggaagtgttcattttgtactttgaacttgtaaacttttgacacatccttacattctttgctgttgcaaatcattcgtgtacactacagaaatgactaattttccatttttcataatttggagtcaggtctttatatgaactttagatatttcattgttgaagacacttacatttgcatactttcaatgtaccttgttttttaatctatcttatttggagttaatattgttagtaatataacctggaaaaataataactcaattga

SEQ ID NO: 32170 - DNA, 1003 bp, Homo sapiens
aggtggatctgaataaacagtttctaggtttataatattattgggattttttaaaactaaaaaattcgtttagttgaattatgcaatataaatccttagcaatatccccaaaaagtttttccaaagaagtaatattggttcttgatgtttcctcatggttcttttttttttaaccaatataaaagcaaattttaaaaaaaggtgttatttcccttggaaggaagctgtgattcccatggttggttattagtccaaagccgtggaacttctttccttataaacctctcattctggcaagacaggacacttggacaatgattttcctaataagtataaccaaaagactttccctaattttaatgtttcccaaaataagtcctcatcagatttgccccccgaaaggtaagtgaggaaagttcaagacaagtttgatagacatatttgttgaagacatttcttaatttcagattttttgatatgtgaatatgccagttacgaacttctgaaaagagggttgtggagaggaggactataagaagtagtgttttctgaactattttgacctttggctattttacaggacttttgggttgctgattgcaacatgagagaaggacatcttgtctggtgggcatatacatgtacatagcctttttaagagaagcttttgggtttgatatggcagtagattgccctgctcacctccccaaccccaatatatttgaacatttctgaaattgggatgcggtttacaatcattccatgtgttttcttgttttttaacttgcaggaatgctgttaatgaactgagagtgccttaaaattaattaagtaattcagcttttaattttaatttgttcatgctcagcctactgactttgcaagaagtacagtattaagtgaaaagcattgaaggagaggaaaaaggctattttgtggaaaatgtctttataatcagctttattgtttagaagatctagaatctggttaaaaagcaaaatga

SEQ ID NO: 32171 - DNA, 1050 bp, Homo sapiens
gcaaactcattttcaacaaagttgccaagaatatgcattgaggaaaacacaatctcttcagtaagtggtgctgggaaaactgaatatctatatgcagaagaataaaactagacccctatctcttgccatatacaaaaatcaaatcaaaatggattaaagacttaaatataagacctcaaactatgaaacttctacaagaagacactgggggaactctccaggacattggtcttggcaaagatttcttgagtaataccctacaaacacagttaaccaaagcaaaaatggacaaatgggatagcttaagttaaaaagcttctgcatagcaaagtaaacaaatttgaagagcaaatttgaaagcaatttgaagagacaactcacagaatgggagaaaatatttgcaaactattcatctgacaaggggttaataaccaaaatatataaggagctcaaacaattccataggaaaaaaaatctaataatctgattaaaaaatgagcagagatctggatagacatttctcaaaagaaacatacaaatggcaaatatatgaaaaggttctcaacataactgatcatcagagaaatgcaaatcaaaactacagtaatatcccagttaaaatggcttattgaagaggacacaaaataatgaaaagatatgcaaaagacaggcaataacaagtgctggagaggacgttgagaaaagtgaactctcatacattgttggtgggaatgtaaattagtacaaccactgtggaggacagtttggaggttactcaaaagactaaagagctaccatatgatccagcaaactcgctgctaggtatatacccaaaagaaaggaaatcagtgtattgaagagctatctgtacccccgtgtttattgcagcattgttcacactagccaagatttggaagcaacctaagtgtccctaacagaggaatggataaagaaaatatgatacatatacacaatggagtactattcagctataaaaaagaatgatatcttgtcatttgcaacaacctggatggaactggaggtcattgt

SEQ ID NO: 32172 - DNA, 1003 bp, Homo sapiens
aatatgcttctgaatgaccagtgggtcaatgaaaaaattaagaaaattttaaaaatatattgaaacaaatgaaaatggaaacgcaatgtatcaaaacctatgagatatggtgaaagcagtattcagaggaaagtttatagtagtaattgcctacatcaaaaagtagaaaaactaatgatacattttaaacaactagaaaagcaagtgaaaaccagacccaaaattagtagaaggaaaaataaagatcagagcagaaataaatgaaattgaaatgaaaaaatacaaaaggtaaatgaaacaaaaagttgtttttttgaaaaaagaaatcaaattgacaaatcttcagaaaaaaagagaagacccaaataaaattagagatgaaaaaggagacattacaattgatatcatagaaattcaaagatcattagaagatactgtgagctactatataccaataaattggaaaacctagaagaaatggatatgtttctagacacacacaacctaccaagattgaaccactaagaaatgcaaaacctgaacagacgaagtaatgagatcaatgccataatgaagtcgctcagcaaagaaaagcgctagatttgatggcttaactgctgaattttagcaaatgcgtaaagaaccactaataccaatgctactcaaactgtttcataaaactgatgaggaaggaatacttgcagattcattctaggaggctagtatcaccctgatacaaaaaccagacaaaggcacattaaaaaaaaaaaaaaaaaactgcaggcaagtaaccctgatgaatatagatgcaaaaatcctcaacaaaatactaacaaactgaattcagcaacacattaaaaaaagcatttatcatgaccaagcgggatttattccagttacgcaaggatggttcaacatatgcaaatcaatcaatgatacatcatatgaacacaaggacaaaaacgatatgattatttcaatttttgctgaaaaagcatttcat

SEQ ID NO: 32173 - DNA, 1602 bp, Homo sapiens
catttgtgcccacgtgctgggtacagagacagcaatgggagtgtagagcagcactttaacttgcctagtgaagtctcttactcagtcccttactagccaggttcttgcgatcaagtcaccaaacctttctgcagattgtgatgactattcgattcaatcaaacccaaagagatcagccaagagtctggcacacagaaattccttaacaaatattagttcttatgtatcctacaccttgtgtttatagcaagccagtctgcttgtggcagggttgcttagaaatcatttgacagtgtctaaacagtcactcccaaagttgttgaaaaattgacagtctgtagttgcattttgtaatgtttcttttagagcaatagggcagtggttttaactgaagcacgtttaaactgactttgttttgagaaattttagtggcattactaagaatttttggatcaaagatcacgtttattggtgagaggatatccgttgaaagataaaatatgcattataacatgtctttttgataaggagaagtgttttggctttgttcatcaaaagtacatctttgaagctgatatttgaagttattaagatttactagcatctggaatattaccttcaataattaatggaggagacatcagagcctgcccttctctgacctatagatctttagctatcagtgaaagaactgatggtatgcaatgctttctttgcctaacctgtcaggcccctttggaggtatcctaaatttgctgatggatcctaaactgactgattaatgtttgatgttaggagctttggggaattgttcaagggattatggttgtttgtagtgcacaggaaatacagactttttatgatcagttcagctctttttgtgatcctctattttatgactagataatgcttttgtgaaaaaagaatgaagtacatctgacatatggcttgatctttctcttcctctaattaaaaaacaaaaacaaaataaaattttttattggaaattctagccctgaattacctgttttctattattgtttatatactctctcattttaagtgttgtgtaaatatttactgtatcctctatcaaattgaggaaatggtgtctttttcagttcctattagagtggacagcatagattagttagtagaaataggcattgtgaggaggcttttctgtaacaggtgtgcagaagtgtcttctataatgtgccacttcatgctgatcaatatagtcttagacaaatgactattgatagggaaactgttctttgaaataaccatatctttgactccaaagtagacttttcatttattttttctctgatctcactgcaattagtaattagtaattataggttggggtctgtatatgaaaagatgaacaatccgtgggtccttaattattcaaggaatttcaaggtgtttgattctagagagttgtccatttctttatttaaaaaaaattttactttagattccaggatacacgtgcagaacatgcaggtttgttacataggtatacgtgtgccatggtggtttgctgcacctattgacctgttgtctaagttccctccccttgccccccacccccaa

SEQ ID NO: 32174 - DNA, 1030 bp, Homo sapiens
agattagtggtaccaggggttaggagtgggtagtggggaatgtagaatggctgtaatggccacagagttttcttttgggatgatgaaaacattctggaaacagatatggtgaaagttgcatgacattgtgaatgtacaaaatgccactgaattttacactttaaaatgattgatgaattttgttatgtgaatgttattacaactttatgtatttgagtatatgtcatttattaatggacaaagatacattctgtaatttgtctacctccctcttgatctgaaaaaactacaaagcatgtctcaattctaatgcaaagtcttaaccaaaatgattttttctgagctattcatatttagcttctggtgactcacaggaacctgaattttatgttccattcaacactccattatgctcttaaatgagaatctaataattttcccttggaatatttttgaaatccaattctaagtatttagaattttagacacagtcgtatctctcgtttgaatattccaaatattgaactttgttcaacattgtttcaatttgcaatatttatgggttgtcaaaacaaaagtagagatttttttctttatgtccatgtctaaaaatgtcattttggaaatggcaataaaatagagcattaaactgaaattaatatcatgatgttgaaggtgtgacctaattaaaatgcaaatgtaagcacacttctttaaaattgacattgcagcttatatattccccaatagtgggactattgcttgttgataatttgatttgacaggttctcttcacaggttcatttctttaacctcacagtgtaagcatatattggcttgcctgataagatgagaaaatttaggcagattcaggaaggttaaaatgaaatttaatgagttatgatcttccttggatataggctgattctacttattagaggaatttggaaaatgcctaccatctacagatttaagcattgttgaaagtctgtattttaaacttaaaactcacgtcataggcactttttgt

SEQ ID NO: 32175 - DNA, 1048 bp, Homo sapiens
atatctttgtatgtgtttcctagtgtactggtgagtctctctgtagaatatttacctagcagtggaatcaccatgttgtaaggtacacatttctccaacattggagagcagttctatagtcctaattaagtgcttgtgtcagttgatactccatagcattgggtgaaaacatctgtttcccatgatgtttgcattggcacactttttaagtgtttgccactctggtgggtaaaagatggtaccacattattggattaattctcatttctccaattatccagtggagtaaaacgtttgctcctggatgcaaacaggtgtccctttttgtcaattgcttgtgtgtattctttgccaattttttccattgggtcattgttttcttttgcaataattagtatttttatatattctagatttaaatcctttgtgatcatatccatcacaggacttttttttatttctcgcttggaatcttagtgggtttccatatgtgtgatggggtcgggacaggggatagtgcctttgatactaaaatgtttagtataatgaaatttaataatttccttttggtctatgcattttggctgtaccttaagaatatattcccagtgttaatatcataacagtactttcatatttttctaatgtattaatgttttcttttccatatgtgccttgatatcatctggatatcttttatatgtgatataaattatgaatctacttttcttcctatggaaaaacagtgttccattctattctttccccatggtcttgacataaatgtgtgaatctgtttcttgcctgtccactgagttcagttggtctctttgagctttaatgatacagtcctttgattactatgattaaagagtatctttatgtctagaaagacaagcattcctttcttttaatcacattttggctgttctttaccttgactctttcaaatgatttttttccgtcttgtcaaattctgtgggaaaaggccgtgaaattttttaaaggaatggcattgaatacatggattcatttatggaaatttgac

SEQ ID NO: 32176 - DNA, 1031 bp, Homo sapiens
atgggcagccaagtccaggtagaaggaaacaagaacaaaggctcaggggcagaaacaagtttgcatgctcaataatgtttaaaaaaacacagagaggccgggcgcggtggctcatgcctgtaatcccaggactttgggaggccgaggcgggcggatcacgaggtcaggagatcaaggccacggtgaaaccccgtctctactaaagatacaaaatattagccgggtgcggtggcgggcacttatagtcccagctactcgggaggctgaggcaggagagtcgcgtgaacccgggaggaggagcttaaagtgagccgagatctcgccactgccctccagcctgggcgacagagcgagactccgtttcaaaaacacgaagacctgtgggggtgaagcatggtgaggaagtgggaagatgctaggagtctggaaccagattaataaggccttctaaggacttcatttttgtgcagcaataaagctttggtgagatttaagaaaaagcagaagggtggaaggaaggaaaacaggatttttaatataaacattattttgctgcaaatcatttaagtatgcccacatcataccttgctatattcaccatcccccagccccaagggtccaggtcttgtagaggctctgtagaaacagtgaatggggagtttttatccccttcaactccttggtcactcatggaatctcgaagcaaagcaaacactatgaagcatttataggaactatagttcacatctatcacgctattgctttattcttacctttaagccaatgtcaagataacacatgaagtattccagatctttgttaaaagttcctggaatattttgttattcacaaaacattttacagcaacaaccaattaacaatacccttagaaaatcttggggctttttcttgagtttaaccacttttattttttttttaagttgagcttaaatttggtgtaaaagtgtatacagattaaatatctttgaagtaggtttttatttcacaggtcctagaatcaggtaaaatgg

SEQ ID NO: 32177 - DNA, 1029 bp, Homo sapiens
tgtgtgtgtgtgtgtgtgtgtctcaggctgactagaatgtgagctctctgagggcagggatgattctcaggtttattcatgaatgcatctcctctgcctgggcagggccaggctcataggaggtgttcagtaaatatttgttaaatgaatatttgctagatgagtgaccctggttgaccatgttggctttttagctctaaagataaaagaggacaacggtcctcatttaacaagtagaataatgtggtaagttctcacaccaggcagtatactgcaatggttaacatagtgtcaaccaggatttctatgtacctaacacacatgaacacatgcttggagacataactaatattcatcattccaaagtggcctgctttgaaagagagagaagtaacaggtggtttgagcatgaaaaatactcaacccctcccatgcccagcacaggtttcatagatttccatgtggattccagccaggctgatgaaatcagttatttcctcagctgagagaaatctaacagaagggtttgataactcgtcggctcatgagatttgatttcccaagattgtatatgccactgtcttgccttcctcaggaagtctggagcagctctgtaagcaatttcttcagtttagtcaagtttttatggctttatcatcttggcttcccatgcatacaggttgccttacataacatgcccttttgtagatctctatttctttctgatgatccctttgatgaaaccttcttctgatttattatttctataataatcaaggaaatttccattagacaattttagtttgtttattcatttatttcctagaatttttaaaacatgatttaaggtgactatgaaaaagtagagtaagatttaagtgctttaaaaaaaagcaaactacaaaattcaagaagtagtaaaaggaaagtaagatggaccaaaagtgagattagtgcatcaaatagatataaaatatttatatacttgctagagatagtgatatggtttggctgtgtgcccacccaaat

SEQ ID NO: 32178 - DNA, 1049 bp, Homo sapiens
aaattgaatgagaaaagacaatcaactgacacaaacaccaagatgaatcagatattggaattatctgacaataattttaaagcatctgtcatataaatgacctataaagcagctgcaaatttttgatacaattttttaaaatagaaaatattagaaaagaaatagaagttataaaacaactgaataaaaattctagaaataaaaaataacagaaataaaaatagtgctggatagtattaacgataggttagactatctactgttaattagagataagagagggtagaattactaaatttgaggacaaaacaatggaatccacccaatcagagcaatagaccaaaaatagactgaaaaaatgaacaggaccccagagatctgtgagacaatgacaaatggcccaacattcatgtcattggagtcccagaagaggataaagataatgggactgaaagagtatttgattagctgacagccagacatggtggctcatgcctgtaatctcagcattttgggaggctgaggtggccatattgcttgagctcaggagttcaagaccagcctaggcaaaatggtaaaaccctgtctctaccaaaaaaaaaaaaaaaaaaaaaaaaaaaaattaaccaggcatggtggtgcacacctgtagtcccagctactcaggaggctgaggtgagaggattggttgagcccaggaggcagaggttgcagtgagccttgattatgtcactgccctgtataataaagtgagactctgtctcaaaaaaaaaaaaaaagaaaagaaaagaaaaaagaaaaagataaattgggcatggtgatgcacacctgtggtcccagctactcaggaggctgaggcaggaggatttcttgcacctatgaggtcaaggctgcatgcagtgagctgtgattgtgccactatactccagcctgggtgatagagggagatcctgtctcaaacaaacaaataaacacgagtatttgaagaaatgatgactgaaaacttaactaatttggtgaaagacagaaacctacagcttcaagaagct

SEQ ID NO: 32179 - DNA, 1066 bp, Homo sapiens
ttacccacgagtttagcctctttagttaaatcttgggtaaacacagggattttcagaggctggtgagtagagaaatatctacttggtcacatcagaacatatagaaatcttgcttctactagcatcctatctagatagagagaaactttaaaaaatattgtcttttactccttccccaagggaaattactgctatacgaaattaaaatagacaggccatagtcatgcctatttaaagaaaacatttttacagttagaaaaatatgcccattttatgaaggtataatttcttaagtttgcattcacttatgagggagtgacttaggtggatcagcaccttatccaagaagggattgaagaatgaatgaaattaaattcatattggagtagtagcctctattatacctggttcaactttctataaaaatactcaagaagatatatgccaaaaagaagtcgctgccactaaaaatttgtttttatagtcaagctagtcttgattcttgtagagaattctactaatgagatgtttggtggaactagaatgaacaatttcaacaggtgattcccttatgctgtggccaaacagagggaagacctttaatcatttggctgctatctttcccctgcttcagaaacatgcaaacgctaatcagaaaagtgaacaagaattactatgcatgtaagtacttttgtgaagcatcacttttaatgaagacatcttttgcatatgcatgtgaagaatgcaaatagtggttactcaaataaatggtcatatattagttttctgtggctgctgtaataaattaacacaaactttgaggttcaaaatgacatagatttattattttacagtttgggaggtcagaagtttgaaatagatggatattagtgggctaagatgttaggctgaattcctttctgaggtctctaagggaaaatgtgtttccttgtccttcctaccttccagaagctgcctgcattccttagcttgtggccccctttcatcttcaatatcagcaatggccagtcaactctttttcctattgcattgctctgactattct

SEQ ID NO: 32180 - DNA, 1027 bp, Homo sapiens
tttctccagggagtaaattacttcatgtagcttgttctcaaacacttatctcagaagccgcacacctttctgatagaagccaaatgtcatgactgaaggtatgggacaaaagcctgatttatattcctgaaacgcctcttttatgttctagaagccaaatctgcattcttatggagtggtgtagaatgtcagtacaaatgctgtatctatgctgaacctggaaaggaaaaaaaaagccacactccacttctttatttagagtttgcattgagaacagcaagcactatttgaaaggtcatcccatttcaagtagcagatggataggaaaaaaagactctggcttttacaaataatttaattgtattctccttgccatttctgcaggcaattcaggatattttttaaagcattgatccataattatcgctcagagtggttagcattgttagacagatgtgtaattccttgtgtgtataagggagcaatacagcatccattttacctatttgattgtcttttcttttactgtgtaaacaaatgcacataaaaacgacacatcattgctttacaaaaaagaagcaaattaattttttttccagatttgtttttgacttgaaactctcctttctaaggcatgctgtatttataatggtcagcttctttgccttcctttaagtaaattagtttgggtctaggtagcatacttatgtttatagtccgctggacacaaggggtcagaaaccatgaaacacaaatgtatcatattaatagaatatgaaatgaaatgactaagacttttaagaatgcattttatctgtggtttattttcctgtcttttaaaatatatatattatttgtaatctaaccatgctattctgattggtttacaattgccagataaaattcaggatgcccagttaaatctgaatttcagagaaaaagaatgaacacctttttgagtataagtgtgtctcatgtaatagattggagagtcatctcagaatgaaacatactatttaaataaaat

SEQ ID NO: 32181 - DNA, 1032 bp, Homo sapiens
cctgtcttaaaaaaaaaaaaaaaaaagggtcttttcagttcagttgggaaatgtatgtttatctaataaaagatgctatgaaaattggcttttcatcagtaagttgtaaatgttagaccactattttttacaataaaaatctaaaaattcagatgaattaaatatatgaatgtacattaaacaatataaattttagaaaaataggaattcttagacactgatgacatacagttatataccatatttgagaaaaatggctagggatattaattggcaattcacagagggaaaatttaagtgaccaagagacatgcaactctgctcaactttactagtagttgtggaaatacaaattaaaatcacaatgaaataaatacttttccagtcaagtagttgacaaaattggaaaatattgataatatccatgcttgttaaaggtgcttagaaatggaagagtttcatatattgctaaatctggatatatttatcaaaattaatggtacacttgctctttgactctgcaaccttaattttgggagtcagtaatctctgatgtgaaaatgtatatttaaagatggctgcatttttagtagtggcaaaaaaaaatcaagacaaataacattaacataaaaacagcacatgaatagtgagattgttgaatatatttatactataaccatactgtgaaatattatggaactaataataataactaaatacatctatatgtgatgtccagcatgtccatgatatggcagcatctaatcatttgactaattggaacgatatgagaccgttggaattagaaagcaaagaatgactatatcaaaacctgtttgtatgtactggtatgaaactagaaaaagatgtagaaggataaacaagtaattgtttctattttttgttttgttttttttagttgccatgggaaaatggaattggaaatagtgctgggatagcgtattgacttattttatataccacatacatacatacctgtgtattttttttttttttttgagacagactctc

SEQ ID NO: 32182 - DNA, 1055 bp, Homo sapiens
taatagacagtggataaaacaacacccaattcaggttgggcagctcaggccacacagtcacctggtgtcctatcttgaaacattctgtctcttgttggggcgcaatagaacaagagttgcttaacaagagggaaagcctttctttgattctaatctagagcttgccaaagcctctttcttatttctgttcagaagccacagatagtctgatagccatctgatcatctatcatgtgaagacaccgaattttgttaatctgtttctctgctaatggacattttaaatcagttaacagtagattctctgggatatataactagaattgggagccactaggttttcagagtaaatagtctggattagaatctcacttccatcacttaccaggcacatgatcgtagcagacaaattaacaaattctctgaaccttgatttctttatggaggaaaatgggaaatataagttcctacttcatagaagggatgtaagaattaaataaaatattgtgagtaaagacccacaatataggcttgctgatagaaacactctgtgcatggtcatcattgtggtgtctttatcatcctctctgttcttataaactgtagtgagcaaacaaatataatctccattaagacaacatacagattcacttgccttttggttgaaatactatttactttatattaaaatgctatcattatttcttattttatctttaaaatgcctgttatttgtctgttttttaagctaatggtagaatttctgttaacatttgtaggctcaattcaagacgtaagttttgcaagccaaatgggtcagcgatgagttaaatgtgggaaatgctggagtaaagaactgaagtttatataatcatttcgcattaggatgagcatgaaaaatgtccaaaaggagattgagcatgccacattccaaaaggtatttggtccatggattatttttacaagggtcactttcattctaaggaatgcaattttagaaatactacactgaactgtgacttcttcagggataaggatcttgtcttgcttatctct

SEQ ID NO: 32183 - DNA, 1086 bp, Homo sapiens
gacatatttattggttcaactttagtttatagcagaaatctttgtcaatcattgtacaccacctttgttcttctctttccaacacttttaagaacctgtcagcagtgccagtgctaatctgctgttgcctggattgggcactcctctgagtttcctgcagaagagagccaaaattgtgtctgagattttcagcttgatgacatcttggcttaataaaaattcttgaagaagagaatgtgaatttttttaaagttccaggctggtgaaaatgaacaattttgcataagaaataaatccttagcattaagataaatgagaagcactgctgatgtgaaactaagtttgctttgacatagataagggggctaagtgggattctatgggaattgacacactggatctaaatctttttttaattactgcatcaataaatgtgctttttcacccccttctataagatgactatttaaatactttcctgtagcactttttaaatgactgtattcagtggtctcacttgccctgtgctcttaaactggaatcctgacaaggcagtgagacccccctctcaggaagtaggccatgtaggcctctgcaacgtgtctgagttacacagtcactgatcaacatgggaaatgggacaatttctggcattcttgccttctttaacatgcagaccactccgttcctgttttgaaatgactatgccagatatttaacactttggaggagttttcagaaagagtattgatatgcaaagtgtaactcaaaaaaagcagacaaaatgattgttgaacagtgggatagagagagagagagataaatattactttcaaagcataggtgtgtccagggatgtgcttccaagttgaaagctagatgaagagttaggcttttgacttagccaaagatgttgccatgttcactgacagaaaagaatatttcatacaataaataggctagccttaggctaagaaagaagattgagttggaaaaggaatgcaggtgggattctggaaataggagtcagtttcattcactgcttatggcttaaaggtaaaggagtaggttgcagattccacagaa

SEQ ID NO: 32184 - DNA, 1026 bp, Homo sapiens
ctggcaagtcaatatagttctgaaaacccaaaaagcagtttgtaacctcaaaacacttagcaaaccttgcatctgacctgcattatttagcctacctatttacattttgataatacctgcatttgaccaatagtttttaagactgtttctatttcttaaagattaaagtcatgtgaactgaaaggtaccagactttatcttccctttaaaaaatattagattcaagcacttgtctttctttaggctgtattaattagagttctcttgacaaacattacgtacagtacacacacaggcaggcagaagaaaacccagttgctgggtggggccctttaagagaaagggctaggaaaacatgcagacattgaatcttacagggttcatcctctcaaggctttgctaaacaaatccttgccacaattaccagccatgccctcaggatataaaacaagatggaggcttgatttcacaaccgaaactttgcagagaatacactgacagttgttgggggtgggtggaggctagcctagtacaacatcttctaaaagaaaaaaaaatttaagttaacttgctgatggggtagagaaggggaaagaaaagaaacagtttaaaagtgcctgaggaagaacctcatatttctttgcaagtggttcctccaccagggagacaaatttaagcttaattactgtctgatagagttacatcccttggccagggaaggggaaggctgggacagccaggagtgacggggaaccagccagcaggctgtgcaggacacttaggccatgtgtcccagccccggcatggagtgaggagcagtgggcagctgctgctcgccggtccatcccaaaaaaggaaggaaaaggccacggggatgagaagactcagaagggagagggaaaaagaattattggtttgcatctcacttaccccttctcgagtccccacgttgggcgccaaaaatattgcaggacttttccatagttcagttaaagacagggtacttgtccgtcccacagccacgaa

SEQ ID NO: 32185 - DNA, 1029 bp, Homo sapiens
caggtattgctaagtagccgagctagcatttgaaccatctccattcttaagcatattacactgcagtgcttcctgaaatccttatgagtgacttaataactttcaaaattttgttttaagatatcaactaaagcaagattataaaacttaaaagattttttcatttccataagttacttattggttatggccttttttcttagtttcttgccagaaaatgcccattgcctctccatgccatcttcccagttttataaatgagaacatttaggcaccaagtagttaagcaacttggctaagttcaagttgttaggaagaaggacgcctgggacttcagcccagggctgtctcattttttactatcaatttctaaaaattaggcttttaaaaaaatattgcttttttattctgatttcaatactaattcacactgaatgtaggaaagttagaaaacttatacacatgaataacaaaacatgcagacattggattcttctgtctttatctctgtagataatctctttgttactaatcttgaaaagtactctctctgtgtgtgtgtgtgtgtgtgtgtgtgtgtgtgtgtgtgtcttctgtttgttgcatttgagttagctttatttctagcatgaagctgtttgctcctggagggaaggaatgatttcatttaattctctgtctcctacagcacccatcttcttactaagaatatggttggttttcagcaaatacttgttgctttaagtggaattgaaatcacttactgcccaggatactctttttgccaccacaggatgcagcaatacaatcccagaggcccaagtcagacagggaatcttggttttatgtcaatttcaaattttgccccctgtgcctggggaatagctcaattgctgtctttttctctgggataaaacttagaggacaccaaggtcaactttcagacacagcagagagccaggctgcaatagtaaataaaccctctgcaagtccatggctaatatcagtacagtgaatgttggcaaaatg

SEQ ID NO: 32186 - DNA, 1031 bp, Homo sapiens
taattctatttaaaaatgaaaactggtaaaattaattttatatctgcataatggaatactgtgaagtcatcagataggatgtggaggttctgtgtatagttatggaacaatctacaaaacacatgaagtgaaaaaaaagcaagatgcagagcattgtgtctattataccgacatttgagtaaaagtgtgtgtccttgtgcatatgtgtatgtgtcatacataactaaaggaacgcaaaagcaacggattacaatgattgcatctgggggaagggactaggcagctggaagacaggtagagatacttttttactcatgcccttttgtactttttgaatttgatacacagtacatgtattacatagtcaaagaattataaaagtaaacaaaattgcccatagcacaaataaagaaaaaaactgccagtgtgtttttatgaagccaatgtaatatggattccaaagtctgagagagacagcacagaatagaaaactataaatcaaactcatttacggactcattatgaaaatttaaagttaataaacaatttatcagattattaaaatattagccccatcaaaagaggtccttattcctcaagtacgaaagtatctcattaataagcaatgtgttaatatactcttaactactatcctgcactacttctcaagtggcagagctatgtgtgaactgtcaatccatccataaatagctatatatctatctactgcattttagcaaatctaaaatgctgtcaagtataagacagcctatttcagaaatgttaaaatgtggaaaactgttttatctttaaatcaatgaagtgtagtatccatccatccatccatccatccatccatccatccatccatccatttttccttcccttccttcctctttgcatttatctgtctaatctatcatctctctatttagaatatgtatatagatctaatataatatctagaatacaagatatattctttagtgagaaaaagcaaggagtagaacagtggaacagttgtccaatct

SEQ ID NO: 32187 - DNA, 1032 bp, Homo sapiens
tcctgtccctaccacaaaagcagtgtacatctctattgtctgcagttttgcagttgccatatccacaacccacaacccttcctgacattcagattcagtcaccatttcttcaatgaaagtgggcaagagaggtgtagaaacattttcctagggcaattacatcatttggcacaagagtaagagttactggttgtgtctatgtgaggcaagcaccaaatcctgagccacagaagccctgatgtgttttctaatcacttcacttatggtgattagaaaatgcaaaatattttgcaaacaactttgaaatatgtttgtgataggaaagcccctctaaaatatgtggttcaaaatatatcaaataataaaacaatgtaatacaaacacatggcctttataagttatgaagaaattgcaggaaatttcaagaagctgaagtacaaataaagtccccattacctgattacaatgcaataaattagaaatcagttttatcaaaaccttacaatctggatattttaaaactctttgatactctgggaggccgaggtgagcagatcaccagaggtcaggagttcgagaccagcctggccaacatggtgaaacgttgtttctactaaaaatacaaacattagttgagtgtggtggcacacacctgtaatctcagctatgaaggaggctgaggcaggggaattgcttgacccaggaagcagaggttgcagtgagccaagattgtgccactgcactccagcctgggggacagaccaagactccatctcaaaacaaacaaacaaacaacaaccctctttgataaacaactcttaattcaaagaaacattttaaacccaacttgaaaaatatctagacaccattgataatgaaaatataacacatctgagctatgggctacagctaaagcctcgcttagaagaaaatgtatacagcctttaacacctgaatatttaaaaaagaataaaaataaaggaattatgcatctgacttaagaaagggacagccaaaaaactggaaaaaatg

SEQ ID NO: 32188 - DNA, 1055 bp, Homo sapiens
atttcagttgtgattcttgaaactcagccctttgcccagtaagtgctaaccggaagacttgttttcttacactttctaggtggataatctgatcaccacaaatggcaagggtgatgccatcaacagttgaaaacagaaactctcctatttatttatttatttatttatttcggtttggtttggcaaacatcccattgtctccaaataggattgcttggtattgggagagcagccttgtacataggcaagacagaagaggaattttaatcagctttacatttgttttgaagattcaggaaagatggaggctttatctcataccaacgtatctatgccatagattgctgggaaacaagagttgtcctggttactaacgtagtgtacattaagtttcctggaatttttttttttaagcctgtttatttgatgctggcacctctgttcttctgaaggcagcatattaggtttactaataaatgacacccagttcctaagagactcggcctaaaagctttcctgacagggcaggaatttgtttcttttttctttgcttttattaaaaaacaaaaaacaaaaaaacaaatattgaggcaaaatcgaggatgaaggacattttgaaaacttgagtactgtaaatagttttaaggaagatttcatttttccaaaactacacattttgcagtttctttaaatgcccatttaatattttgggtcttgccagggcaacgtgttgcttttacgaataagagccaataatgagcccatggagcctttaatttatgatgtatctgacagtatagtggtggatctgataggggatgcatgtgattatgtctgcaagctgaaaataaagtagctggtatttgttctgaaaacgttctgagaacaccctcctgttaatggcccatggcttgatccagcatctggtaaactaatagattgtcatttttaccatgaaagcataaatcattaatgattccacaaccatttgagttcttctctggtctagaatatgccaattaccatgaaattagtcctattagcaacatgattga

SEQ ID NO: 32189 - DNA, 1065 bp, Homo sapiens
actagtttttcatgataagatctttaactacacaggacctgttaaagcaaaaattataacattgtcttgtggtgtttataatgtaatatgtacagatgtaatccatatgactttatagcataaagaatggaggcagtggcaaatggatttatacagttgcaaggttttccaattttatatgagatagtataaaattaaatctaagtagactgtgaaagatcaagaatatacgttttaattcctagaaaaaccaccgaaaatccaaagataaaatagaatcctaaattaagaaaaaaatgatccaaaagttgcagagggaagaaaaagaaaaacaagaagtggaggagcaaacagaaaacatataataaacttgcagctctaaatgcaatcatatcagtaatcagactaaatgtcagtggactaatcactaattaaaatgtagcagtgtcatagcaaaattctacctgatgtacaaagaagagctggtacaattctactgaactattccaaaaaattgaagaggagcaactcctcccaaactcattctgtgcatcaccctgataccaaacctgacaaacacacaataaaaaaaaagaaatcaacaggccaatatccctgatgaacatagaggcaaaaatcctgaacataataccagcaaaccaaattcaacagcacatcaaaaggttaatttactatgatcaagtaggcttcattctggcatgcaaatttggtccaacatgagcaaatacaaatgtgattcaccacataaataggatttttaaaaagccttagaatcatctcactagatgtagaaaaagcttttgctataatccaacatcccttcatgataaaaaacttcaagaaagtaggcactgaagaacatacctctaaataataagagccatctatgataaaaccacagccaatatcatactgaatgggcaaaaactgaaagcattacccttgcgaactggaacaagacaaagatgcccactcttactactcctattcaacatagtactggaagtgctagccacagcaatcaggcaagagaaagaaataaaa

SEQ ID NO: 32190 - DNA, 1051 bp, Homo sapiens
catatttttaacaaatgaatgaaaatatgagtgcattaatttattccactaatgagcacccatcaagtgtttagtaaacctcagattgatgaatgataaggtgataaggcatactttaatacctattttcttaaaccctttcttttctgtgatatttaatgcataatggtttattagtcttctattactgtcataacaaactatgatgaatttagtgacttaaaacaacacacatttattatctggcagtcagaagcccaatacatgtctcactgggctaaaatcgaggtatcagcagcgctgtgtttcttactggagactgcagaaaaaccaacttccaaactcgttcaggttattgacagaatttggttctttgtggttgtaggactgaagtccctattttctttatgtctgttaggcagggctccacccttagctccctcaggcctctttctggtcctcacacagagcctcctacattttagaaccatcaatgattcatcttatctttttctttcttgtgtttggaatctgactttccctctgcagcatagctcctgcatcctcttctgctttctcactctgactgattcttccaccttccacttatgtttttacaacctcatgtgactagggtaggcatacccagataattcaagataaccttcctatgttaaagtcggttgactagtaaccttgatacatctgctaagtctcttcatggcagcacctaatctagtgtttaattggataaccagggacaggaatctttttttttttttttttgagagggagtttcactctgtcgcccaagctggagtgcaatggtgcagtcttggctcactgcaacctctgcctcccgggttcaagcaattctgctgccttagcctcccaagtagctgggattacaggcactcaccaccatgcctggctaagttttgtatttttagtagagacagggggtttcaccatattggccaggctggtcttcaacttctgacctcaagtgacccacctgcctcagcctcccaaagtgctggtattacaggcg

SEQ ID NO: 32191 - DNA, 1046 bp, Homo sapiens
gggagaattttttagttttttggtcaacacatgcattccctcttaggtaccttatttatttattttgggggattctgatttgagcagttggtttgttgctactgagaaattttctcaaagccaacagatagatttattccctattttattttattatgatttatttctattttattgtgaactaaggcgattcagaagctgagcagtgtctctgtggttgtggatatgaagagctttgtagatagaagacagctggattcttacatgcatctaccctttatcctcatttccatagagttaatcgaatcttttagggttttgatgcattttcaaagggtgttttctaagttgtattaataagtgtcattatacttgtgggctatacactgcgttcctaagagtgtccactaatatcccctgaaacaatgttaaaaatgatatgtgagttgctgaagatgatttaccgtatcatgctcttgaataggttcttttgatagctttagaacgaaattcaaactgctgagaggttcaagtctttcaagtcaggacaacttaggctccaacctcatctgccacccctccttgccaatacagagccctgttccagaatatgccacaccatccaccttcttcctgaatctctggctttaccaatgcagtttcttctactggctcctccttttcttgatgaaggtattcatcccaaatctcagcccttctgtgaggcctcctcacccttctgcaatgagagacagcacaatgaagtgtttaaaaccatgggctctaaagttggacctcctgtgttaaaattccagctccaccacttaccgatagtaactttaggctggtttcttcacctgcctgtacctcagcttcttaatctgcaagatggtatgaatcatgggtctgtctctgctatggtttggctgtgtccccacccaaatctcatcttgaattgtacctaccataatccccacatgtcatgggagggacccagtgggtaggaggtaattgaatcatgggggcaggtttttcccatgctgttc

SEQ ID NO: 32192 - DNA, 1073 bp, Homo sapiens
agtctaatggggattcccttaaatgtactgtgacacatttctcttgttgtttttagaattcttgctttgtctttgactttgacaattgaactataatgtgcatcagggcttgaatctattcgggaacctttgagtttcctggatctgtatatacacatctctatccagacttgtgaaattttcagctattagataattaaattaggttttttttttaatacatcttttccttctggaactgccataatatgaaaatttgttcacttaatggtgtcctataagtcttgtagtcttttttaaaaactctttttctttcttatttttttttctctctagctaagtaattttaaataacctatttttaggttcagagattgttttctatacttaagtctgttcttgaagctgcctattgtattttttattttattaattgaattattttttataatatctatctctgttgaatttctaatttatataataaattctttttctgattttgttgaattgtctatctgtattttcttgtatcttgttgagtttcttaagagtactagtttgtattccttttctggcaattcattgattttcttgtcattagggtttgttactagggagttattttgttcctttggcattgacatatttctttgctttttcatatttcttgtgtttctacatcaatgtctatgcatttggtggaaaaattgcctcttccagactttctagagtggcttttgcagagaaagactttcacctgtagttggatcttagtgtgctaattaggaaaagtgtggtgactttgtttccaggtaggttcagtggtatagtatctatgcagtttcttcagctgcattcagtgtcaacagtaactgtggatgcctgaatgacttaggctgtaaaagtgtatggtggtgctcatcatcactggccatcagagaaatgcaaatcaaaaccacaatgagataccatcttacaccagttagaatggcgatcattaaaaagtcaggaaacaacaggtgctggagaggatgtggagaaataggaacacttttacactgttggtggga

SEQ ID NO: 32193 - DNA, 1053 bp, Homo sapiens
gaggattacggatgctgagcattttttcatatgcctcttgtccatttgtatgtctccttttaagaaatgtctattcaggtcttttgcccagtttaaaactgaattattagcatttctgctattgagttgtttgagttccttatatattttggttattaatcccttgtcaaatggatagtttgcaaatattttctcccattctgtgggctgtctcttcattctgttgattgtctcctttgctgtacagatgctttttagcttgatataatcccatttgtctattttaacctttgttgcctttatatttgaggtcttatccaaaaaatctttgcccagaccaatgcccagaagcattttccccaatgttttcctcttagttttatagttcgaggccttacatttaattatttagtccattttgatttgattcttgtatatgtgagagacagaggtctagtttcattttttctgcatatggatatccagttttcccagcatcatttatgaatagactgtcctttgcacactcaatgtttttggcattttgtcaaaaatcagtttgctataattaaaggatttacttctgatttatctgttctgttccactggtctatgtgtttgtttttactccagtaacatgatgatttagttattatcactttcttgtatattttaaagtcagataatgtgctacctccagctttgttctttttgctggggattgctttggctatttggggtcttcagtggttccacataaattttaggattttttctaatcctgtgaagaatgatattggtattttgaaaaggtttacatcaaatctgtaaattgtttttggtagcattgtcattttaacaatataagttcttccaattcatgaatatgggatattttcctttttttgtaaccagatcttcaatttcttttatcagtgtcctgtcatttaattgtagagatcttttgcttccttggttagatttattcctaggtattttatattttctttctgtagctattgtaagtaaggttgctttcttgctttatttttt

SEQ ID NO: 32194 - DNA, 1065 bp, Homo sapiens
ttggagatgatcttgaagtaggagaatcaatgacagcagtacaagtcatgatagtgagcctttctgacctcacaaagtatttgtaccagtagcctgctatcttgaagctgcccccaactctttctttgtattgccatttaggtttccctgagctttgagcagattcttagctaggcaaagtagctgctggggcccaatgagtgggggatgctcaactgaggactcctgtgcccagtgcggtatgcagtgttcagagagatttcccttttctgtgtttgatttgcttttaggagcctctcatcatgttccacttttcctcagcccctaccatcctgtttctttattatcacattccatccccataagcccagctgaaatttttaaaatcctgggattatggtcagtttttggcatctcacaaagatgtatccctgagccaaggcagcctgataatcaccggctgggttttggtatcctggtggttaagccacttttgcacatattattgagtgactgttgaaagacttcttgtgaggtgaagagtctctggcacactgttggatgtgacaagagctccatgaaccccggcctttggctccagttttaggagcaggtttcctttatttgctgagcagcctttaccgttatgaatcttgcctttttgcaggaccagtggattctgcaaaggtttattaatcttgatttaatatattcatatgaaaaaatacaacagtgagagaataaagcttatgtaggcgttgcaggggtccctttgggggttcactttatattactcatagcagtgaaaagtaaaaatggcaagttatattagctaagttcgagatacaaaaggcaatattaatttcacaggaagtgtaaaaagatatgcaaatgtgatcaactccgaggaaaacattgcaatataccactccaggctttgaaattatgcagtttaataaacacttgttaagaagcttcacacaccaaatatcgaattttaaagcaagtgtttctgatcacgtactgtttttcaggaatggcattattttcctaagcttttggaac

SEQ ID NO: 32195 - DNA, 1081 bp, Homo sapiens
tctttaatccatcttgaattaatttttgtataaggtataaggaagggatccagtttcagctttctacatatggctagccaggtttccccagcaccatttattaaatagggaatcctttccccactgcttgtttttctcaggtttgtcaaagatcagatagttgtagatatgcggcattatttctgagggctctgttctgttccattggtcaatatctctgttttggtaccagtaccatgctgttttgattactgtagccttgtgtagtatagtttgaagtcaggtagcatgatgcctccagctttgttcttttggcttaggattgacttggcaatgcaggctcttttttggttccatgtgaactttaaggtagttttttccaattctgtgaaggaagtcattggtagcttgatggggatggcgttgaatctataaattgccttgggcagtatggccattttcacaatattgattcttcctacccatgagcatggaatgttcttccatttgtttgtatcgtcttttatttcattaagtagtggtttgtagttctccttgaagaggtccttcacatcccttgtaagttggattcctaggtattttattctctttgaagcaattgtgaatgggagttcactcatgatttggcgctctgtttgtcttttattggtatataagaatgcttgtgatttttgcacattgattttgtatcctgagactttgctgaagttgcctatcagcttaaggagattttgggctgagatgatggggttttctagatacacaatcatgtcatctgcgaacagggacaattggatttcctcttttcctaattgaatgccctttacttccttctcctgcctaattgccctggccataacttccaacactatgttgaataggagtggtgagagagggcatccctgtcttgtgccagttttcaaagggagtgcttccagtttttgcccattcagtatgatattggctgtgggtttgtcatagatagctcttattattttgagatatgtcccatcaatacctcatttattgagagtttttagcatgaagggttgaattttgt

SEQ ID NO: 32196 - DNA, 1049 bp, Homo sapiens
gtgcaacagctatactgcaaatcgtagactactactttgacattctggttttatatgttggtctcatgagtgtgtttaatgaagtccatctcatgagaaatggattccatactgtgtgttgagaaaaccaaggccaagggggctgaagcctggtataggggaccatgtaaagtgtggatgactttcagctgggcttctggggagaaagcctgctgcccttcctcatacagcattctacatagcacaacacagtaggaagcttaagtcttttcctatttggactctgcccctttccaactctcaagttctgcaattctttgacttttctgtcttcagcccttgcttcctctgcttttctcactgcttttgtcacctagcagaaacagtggtgagagactgctacacaagagacattgtttgctgctggtatttaactttctcctggagttttctgtggatgacattgatttatggtgcaaagggccctctgctttggagctgacctgtagagaaacagagtccctcaggccttctgtgaggctgggacccccttgttccagcgacagggattggtatttatgtgagactgtgggatatccccctagagccaggtgattcctgcagtgacaatgtgaagaaaagtagcagagggccgggcgtggtggctcacccctgtaatcccagcactttgggaggctaaggcaggcggatcacaaggtcaggagttgaagaccagcctgaacaatgtggtgaaaccccatctctactaaaaatacaaaaattagctgggcatgatggcgtgcacctgtaatcccagctactcaggaggctgaggcaggagaattgcttgaacctaggaggtggaggttgcagtgagcggagacctcaccattgcactccagcctgggtgacagagtgagactccatctcaaaaaaaaaaaaaagaaaagaaaagaaaaaagaaaaaaaaagcagtagaccacttctgcacctgagagaggcagacattctgtgagctcacatatttttctcatcagactctgaaacag

SEQ ID NO: 32197 - DNA, 1043 bp, Homo sapiens
tatagaacttcaaactccactaacagataatatacacacatagaaagtcttaatgctgatgaataaaaattatatttactaattctttatttcagaggaaaaaagcaggagattagaaactgatacttttcaaaactttatacatttggaaactcaaaactgtacctgtcaataatttgtgagtcaaagaaaaatgatgatagaaattagtacatactttaagtcttgtgggacacaaagaggtatatagagggaaatttatagactcataaatgtatacgttagaaacggaaggagacattgttagggaattaaggattcaattaaaaaggtataaataaaatagcagagtaaacccaaatacagtagagggaaggaataatacaaaaatattaccaaaaatgaaatagaatacaaagaaacagtagagaagatcaaccgagcaaaaaatgattattttaaagactaaaacagcacattctcacttgtcaaacttgatcaactacaaagagagaagaacaaagagagagagagagagagaaatacaaacagtattagaaatgaaaaatgggagctaaatatagagacaattgaaaatagaaggtcaaaagaatataccatgaataacttctttatggccatactcttgaaaatataccttctaattaacagggataccctatgtatatatatccatgatatacacattgtaagctagtgtcatgactagagattgagaaacataatgaccaggttaagtctggcttctgagaatgaaaattcattcattcactcaattaatatttgtggatacctactgtatacttttaattatgctggtgctaacatatttttatgaatgagagagacattaaacaaatcagtaaaaaaaataactacttcagcctggccaacatggtgaaaccttgtctctactaaaaaatacaaaaattagccaggcatggctgtgggcacctataatccagctactcgggaggctgaggcaggagaattgcctgaatccaggaggtggaggttgcagc

SEQ ID NO: 32198 - DNA, 1050 bp, Homo sapiens
ttggcgttgtgtttctttttgtacaaaggttgtcaaatgggagtgggaaggtggtacatctcatagctcatctgtcagaaagtattgcaggcatagcaaggttgaaaggctggcatccacgctagctaaaagcagagattgcaaagaagtttggcctccaggagagtaaaaggggaaatgctgtcacatgctcccctcctgccaccattggtgtggtatttggtagggggattactgaccccttccttcgcttgagaatagtgggtcagcaaggcaagaatagggcagagagttccggaacttgctaagaacattacctcttgtaatagggctttaagtgtcaacgctttttctactgtatgctaggagtactaattgagaagctggcccctacgcttcaactatatacaactataagtttttttttttaatgttgcaaagtaaggttaatttttatggggaatattttatgccctgctttctgttatgtgccagacaaattgagggcgatggaaaactgatgggtgatgaagacaaaagagcggtgttgaccttttggtaaatcattcatcatactgcttcatctgtaagtggttttcaggttgcagctcatatttgctaatcactacacttgactctcatttctgcaggggctgattgttttgttgtggattgccttttctcttttaaaaaaattttggttattgttatagctgtttcattactaatacttcctccaccagagggggcttgtgaatagagttgggaattaataattcagtttctgctgctcttcattctccttagtagctgagatggactttaagcaatccattcacctactctgttttgagtcttcttgtccccagtggaattcaattacaagatggctgtctttgacagtggccacagtctggaatagttaactagtgttaatggtctagcaccaggatatttttagttttcatgttgatcaaagtcccattagggaaaactaaaggggaaagcaagaataacttcttagttcaaccctgggtcacatactagaaa

SEQ ID NO: 32199 - DNA, 1049 bp, Homo sapiens
ttctactggctatttcaaataacttgatatcattaatttttaaaaagtggtaatattaactaatgtccacctgagttatcaatttaacaaatatgtagtgagccaggcatagacattaatgtctctgagcctatgaattgtgtgcatgattttgaacaagcgtctgtaatattttattaaatgattttcatcaccctggataataaacaggtgatttgacttagcagaatgcaggtgctatttttaatacttagtgctctctggaggccttccaaataataatatcatctttaaaagctttggattccccaaggagcaataaaattgtgctgagtattgtctgtgataaataacacatctcccttctccactcttccatactcctacttgagaaagcttcagatttcctgacattatctgagggttgattgcctagtgaaggtcaatacttctttgttttccattactacatgtttctttgtgatcataccaaaatgatgagaatgtgaccagcttttaaaatattaaaaatcagggaaaataaaagcatgaatacatcaacaaggagcgtaacttaagattttagtttctaaagtggaaatagcttaaattctttcctgaccagtggagttcagggctaccaacaaaggactggaggaaacaagatcccagaggaaaggagccacagagatgtaagttcaacatactgcatggaattttcccttgaggcctttttgtacactcccagggagagacaacaaaatataaagctgaaaatatctgatacaggagtaaatggcaaagcagatattgtagcagtctcagtgtctcacagagttcagggctttcaaagaagtaggaccatggaaatactcaaggtccttgaggcccctgaagaactacaacctagggtaagagcaaactggaaatataccagcctcaactggattaagatgattttcctgtactctatctgcctgccagaagaaaatcaaatcatctttggagaaagataacatcattcaaaacttgtacaatttccataaaaa

SEQ ID NO: 32200 - DNA, 1043 bp, Homo sapiens
agcaaatgatcatggtctgtcttgtgacattccttatattgttgcttcattctttacattttttgtggtgtttttcccctcttctttcttcagctacgtcagttactccttagggacagaaaagatgttgtgtttattttttttatccttcttatgctttatacagagtaaatgcacaatgattccctgttgtttgactgatagttgctgttggagatggaatgttttctaaagaatgttgctgaatttatcttgtcttagaaatgtggaaagtagggataaggaagacgctcagtgcatttcagtttaaaatatgcagcttttgagtagatgaatttgagataactctgttctggtcagcatagctcagccacagaaatggtttagtttttcatagcagtgaaacttcctttctctaaacagcagatgaggttgaatcacatgaaattgccagtattggagcaacaacatggcaatatcatgtggctcaatctaataagacagatgagctgacaataatttattcctttgactaagtccgagatggaaatgagctaatgggaaggaggcccctcttctgctgtcacagcttgcaggagagagaacagcggaatgcagatcctgggacagagggggtgatggcaggggcagcaatccctgaatgagcaatgattcttgtcatgagttggcacttctgtggttggcacatccttcctgctctgatgctgccctgagaccctttagtgtcatctaaacagaagtcatgacgggcccagaagggtcaggcatgatccataggagttataacacccatccgctgccagccctgtctgccctggagaactgccagaggaggtaggacatggcagctaatgtcactacttcacaattttcttctatttccctctttgtctctactacacccaataaagtagctcctcctcctttttccctctttattaaaccctgagttttgagcgctttgttcagtctgctgatgtgggaaggttggagaaggctggcattaactgttttttctttaa

SEQ ID NO: 32201 - DNA, 1051 bp, Homo sapiens
tcagcaatagagaaatttgaaatttgggagcataattaggtagaaagatttactgttggcagtaaggaatccagataatcctattaaccaatacctctccactttggggttttatcttcacagttttcttttctatcagcatttcagactgtttacctattcctccagtttaactgaaagatgtatttaccagtattcagaaaggagaatgtacatagaattaaagcaatttttaaaaaggccaagatctattccagcctctgcaacctcttaatctagtgggaggcagacagactaaagaataaaatactaggctggctttgatagtgatagtaattcattggttttcaaagtgtggaccctggactatcaggatcagcatcacttggtgtggtagactgaataatgacccctcaaagttgtccacatcctaatcctcaggtgaaaggactcaggcctaagttacctcttatggcaaaagggacttcacagatatgatcaagttaagggggttgagaatgagagattattctacattatctcagtaggcctaatataaccacaagggtcgttataagggggagacaggaggtaagcgttagtagtaggagttctgaggacagcagtaagaggttggagtgatgcaagagaagggccatgagccaaggaatgcaggcaacctctagaagctgagagaaccaaaaaaatggattctaccctggagcctccagaaggaacagccctgtcaacaccttgacctgttttgggcttctgaccaccagaactgtaagaagataaatttatgttgttttaagccactaagtttgtggtaatttgttacagcaacaggaggaagctaacgcacctgggaatttatttgaaatgcaaaatctcaggccataatttacatttatccaatcagaaactctgggggtggaaccaatctgtggtttagcaagtcttccaggtaattattatgctcactgtattttgagggctgctgttagaattcagagaaggaattgtacccgtctgtacatgagatagagta

SEQ ID NO: 32202 - DNA, 1027 bp, Homo sapiens
cattgtcctgctgctaagccgagctttttcatcacctgccctgcggttctttgccattgctgtggctgacattatgtgcagagctgtttaacttagaaacgggaagtagctttggaaattaactggctcctaagtagtcctgaggtcatcgttttcctgaagagagcagtcaccatttgtttatttatgtagctgactttctgatcccctgaaatacatatttttttaaattaaggtataacacatacatcagtaaaagtttataaagtatgctaatttaagtatatggtttgatgatatttttacatatgtatatccatcatgtaactgccatctagatcaagttatagagcacttttcagcaccctggcaggctcccttgtgctctttccaaatgttttccaaatacggtcccttataatgttaccactgctttgatatctaccaacagcagttagtttcacctgttcttgaacttcatctaaatggaattacacagcatgtagtctctcctgtctagctttcctcaatcaacatatttgtgagttgcatccatgatatcaagattcatgttcctgttggtgagcatctgaattatttccagtttttccagaattctgttttggtctagattctacctaatgtcttcaggacattaaagaggtgacatttgtccaagggcctggagcacagagatgctctatgctgatggaaacctccatcctgtctcccataagtctgtattctcacctgaatgatcagagtagttgctgagtgctttaccttatgcttctctttcttcttcctaattttaataataataataataataacaacaacagctattattatatgtatcaagtactaggcactaacactactctgtattatgtgttatatctcatttaattttcaccaagactctgggaagagttattattatagttttcacgtgaagactttagtaagtttgatggagtccctaagatcacatggcatattgatggcagagcaaggattcaaacct

SEQ ID NO: 32203 - DNA, 1003 bp, Homo sapiens
attacatgggattgttgagtcacataaatgaatgaatgcatgtaaagcattttgtaagagcttaatattgttagccattatgattatcagtaggtctgcaataataccctaagtggaaaatatggactaatgggctaatattggatcagttgagttaaatgtatttacagtttgatacaaatataagatcaccccagatccaataaattcaatcagttgtttaccatttactttttttttttttggtaatcaagtgtaggaatgctttgtcatcaagtatatttatagcatagacatttttggtaataattgaagatatgcgcagagataccatgcttcaggtgatgtgattattcttagaacattgaggcttgttgttatttaccatctctttctagtttcaaggtgccacttaggtagatgaaacttctggctgtatgaaagattgttaatgtaaatcttctgcactagtgactattagggtaggtctaaaatatcaccttgtcatagaattctctccaaaatagaaaagaaaccttcaagctcttttcgttatttcctaaagggtatttgtaaccacagtaactatgaaaggctacccaaatattatatttcccatttttgtcaaagattaggttaccttcatgttgtaatttcattatttatttattagaagttccatcagacaggatatgtatttttcttaataataccaaaaaggaaatgaattaatcgttaatcttggatagatgaaatattttcaaacatgtactccattctcaaatcataataaaaggagtccttggtagtgagattgttaggaagcacttctttgagtaggttgatttgggagcagtggggcaggagtaggcattattattatgtagtatctatataataactctagtatatgaatttgatctgtattataggaatatgattttacagcaaccagttaaaaaacaatttcattgactttcactaaggcatcagtttaataacc

SEQ ID NO: 32204 - DNA, 1043 bp, Homo sapiens
tgccattaaccaggacctgaagtgtaaactcatgggatctctcccttgtcatcccatagcacgttgtatctatcagtgctgtgccttttatattataggtttatgtgtttgtcctccctgctcaactgtcttggaggcaggaaggagccatatcttacttctttgtatgtctccatagtttttgtgaattgtagaaagctatcttgactttccctaagttgcgtttccatagaataaatttttctgtaataatggtggaacttgaagctatgagcctacttcatcattgtgcaggataggaattgccaacatagtatatttaaatacaatgatctaatttggtagccttacctgaagctaaaaccatttataacccaaccttagtgatttgaagatgagcctagggctctgcttaagagcttctaggttcctcttagtttaaaataatggtcaatttagtggtatgctggtaaatgtttaacagctggctctcaaggaaaaatatgtgtatgtgtgtgcatgcatgccctaatgtgcatgcttgcatgtgtgtttattattaattttactgatataaaggacatgtaacatgtaatttataaatatgaataaaataatcactactcttgattgtaaatcctggatagccagtagattctcacacactgctttggttgatttttgccaaattcttatatccatagccagtctatgtttgcaactgatgaataatcatctttctgtcatacatattgtatgatagtttataatactggaagaatgggttctccatttgtgtgtgtgtgttattcagaatataacagccacagatatggcacactttaagttaatctgcatattctccatcactctcaagtcaacgaaatgatattgagtcttgatttgtggcatttgccagtttggctgatttcaagctaccaatgtgaatttactgcaagtgaattaggaagagatacatgtagcactctattatgtagtgtttccactctacaaatacaataggtgcaaataagcttaaagag

SEQ ID NO: 32205 - DNA, 1049 bp, Homo sapiens
atgtaactttttcattgaaactaccagacctgccatatttaaaattcctgtctttccatcctcctgatccctctaaggctgctttgttttttaatttttgtccttagccttgaactgtccgtccaacataccatttaactgagtcacttatgtttattgtatctgctttcccaccactagaatctaaactttgtgagtacaaagatctttgtcttctttgttcagtgatgtgtccaatagaagtttctgtgatgattaaaatgtatatggcagacattagccacatgtgctaattgagaacttaaatgtggttagtgcaaataaatccttgaattttaattttatttaattttaactaactgaaatgttaatagtcacatttggctagtggctacataccataaatgacactgcagatctcgcaaacgtattgaatgaacgaatgaatgtctctttagagcattgcttctaatactttaaaggaattacctggggttcttgttaaaaatgcagattctggccaggcatggtggctcacgcctgtaatcccagcaatttgggaggctgaggtgggtggatggcttgaggccaggagttcaagaccagcctaggcaacatgaagaaaccctgtctctactaaaaatagaaaaattagccaggcgtggtggtacatgcctgtagtcccagctaatcgggaggctgaggtaggaggatcacctgagtctgggacgcaaaggttgcagttagctgagatagtaccactgcaccccagcctgggccacagagtgagtccctgtctcaaacaaacaaacaaacaaacaaaaatgtagattttgattcaggtctagggtggagcccaagagcctgaggttctaacaagctcctaggtgatagctctttacacttttcatagcaaggctctggaagactaatattgccttgcttttagtttgtgtgtttattaaaatagaccaagcagttcctcttttcctggacaagagggattactaagaataacctgttagactcaaataacagttggtaggccc

SEQ ID NO: 32206 - DNA, 1029 bp, Homo sapiens
tttccttattttcatattcaaacaaattcaaacattatattacatatgttccttaagtctcttaacctagagaaatcctgcctccattcccactgtagacttgttatagaagcaggatcttttgttctgtaggaagtcacacattctggtttcatatgctcttctttaatgtgttccttcaccactcttattttttcttaagggatgctgtctctaaatttgatttaacgtaaatgtttttggcaagaatgctttgcagagggtgtctttactacgtttattaggaagcatccactattcagaacctgttttattgaagctgagattcatcattggttttggcaggtaacagactgactattccattttaaagttccatattaatttttcatgtgattgtttcttcaattgatgattgttacttaaatcaattatgtcattaagtaattgcaaaaatcatgatttctaattctgttaattattttccatttgtcaactagactttttctgtaaagaactttccctgactgactaggactgtttggagcgcacttcttttccttgacttagatttgtcctacgcaataattttagtgtggtgttttagtcccttttgtgctgctataatagaatatgtgagactgggtaacttataatgaatagaaatgtatttgtctcatggtcctagaggctgggacatctaagatcaagggtctgcatttggcaaaggcctacttgatgagtcatccaatggcagaaggataaaagacatgcacacatgagtgagggaaaaaggcctaactcattcgttttatcaggaatccattctggtgataactaacccacttctctgataacataattaattcattcatgaggccagagccctcgtgacctaattgccccttgaaggacccacctctgttgcactgggaattaagtttccaacacatggactttgggtgacacattcaaaccatagcatttgatgtgctaattatatatattttaatatgctgggaattaaac

SEQ ID NO: 32207 - DNA, 1044 bp, Homo sapiens
agccttctctcaactcgtcaaattcattctccatccagctttgttcccttgctggcgagcagctgcgttcctttcgaggagaagaggcgctctgatttttagaattttcagcttttctactctggtttctccccatctttgtggttttatgtacctttggtctttgatgatggtgacgtccagatggggttttggtgtggatgtcctttctgtttgttagttttccttccaacagttaggatcctcagctgcaggtcttttggagtttgctggaggtccactccagaccctgtttgcctgggtatcacctgtggaggctgcagaacagcaaatattgcagaatggcaaatgttgctgcctgatccttcctctgaaagctttgtctcagaggggtacttggctgtgtgaggtgtcagtcggcccctactgggaggtatctcccagttaggctacttgggtctcagggacccacttgaagaggcagtctgtccattctcagatgtcaaactccatggtgggagaaccactgctctcttcaaagctgtcagacagggacgtttaagtctgcagaagtttctgctgccttttgttcagctgtgccctgcccccagaggtggagactacagaggcaggcaggcaggcctccttgagctgcggtgggctccacccagtttgagtttctgggcctctttgttttcctactcaagcctcagcaatgatggatgcccctcccccagcctcactgctgctttgcagttcgatctcagactgctgtgctaacagagagcaaggctccgtgggcgtgggaccctccgagctaggcgtgggaccctccgagctaggcgcgggatataatctcctggtgtgccatttgctaagacagttggaaaagtgctgtattagggtggggttgttatgattttccaggtaccatttgtcacagcttcccttggctaggaaacggaattccctgaccccttgcactgcctgggtgaggcaatgcctgccctgctttggctcacactccatggggtgcacccactg

SEQ ID NO: 32208 - DNA, 1024 bp, Homo sapiens
gtgtgtgtttgattgaattacttagcattttaccagatgctccagagccttattgtttttgtcatcattatcatcatgagcatcattgtcagtcatcacaatagctcttgtttatggaacactttttatgactcagcactgtattaagcactttgcatacaaaataacatttattttataattacaacaatattatcgaatggattctaccattatccccattttatagtttaggaagttgaggctgagaaccttgctggaagttatacatctggaaagtgatgtagcggtgatttaggtttgtcacactccagagaaagattatatactcttaagatctgtataataatatacaaaagtggtccccaaaggtgttacatattcttagtttgttgttctctttatgttggatgtggaagtgggatagagataacattgtggcttttggaaagttcaaactctatttctgttggcttaatttcattatcatttctttcatgtatagaatattgtttgtggggaatcaggcaggagagacacaagattagataaattgtcttgagaaggcctctttgaagaggtgacattgaaactgagatggattgacaaaagtgaggcaggcatgtgaagatcagggacagggtgttccagggagagggaagaacaaatgcaaaagcactgatttgggaattaacccaatgggattagaagaacagaaagtagatacatatggtgggagaggagtgaacaagggagtgagtggtaggagatgatggagggaaaggctatgtctgtatcactagaatcttataggacatagtacagaatatggagtttttatcagcacattagcaaattcaaggaggaagaataatatgatttagtttatatgatgactttatttagttataggatgaatttctgcttctggtaatgatagggtagctaataatccaccaagagaataactagaaaagccagccaaaataaagagaagatatttgtttgaaggtattgaagggct

SEQ ID NO: 32209 - DNA, 1044 bp, Homo sapiens
gcacattgtgcacatgtaccctagaacttaaaatataataaaaaaaagaaaagatgctcagcgttatctgtcattagggaaatagaaatcaaaaccacaatatgacaccacttcacacccactaaaccagacaacaataacaagcatcagcaaggattcgggaaccttcatacattcctggtgtaaaatttaatacttgtagaattgttcaattacttggataaaaaaagatcaaggaatccagagctgttttttgaaagaattattaataataaaatagaccactagctagactaataaagaagaaaagagagaagattcaaataagcacaatcagaaatcacaaggaggatattatcactgaccccaccgaaatacaaataactatcagagtatattataaacacctctatgcagataagctagaaaatctagaagaaatgaataaattcctagacacgttcacccacccaagactgaatcaggaagaaactgaaacctagaacagaccaatagggagctctgaaatttagacaataataaatagcctaccaaccaaaaaaagcccaggaccagatggattcacagctaaattttaccagatgtacagagaagagctggtagcattcctgctgaagctattccaaaaaattgaggagggactcctccctaactcattctatgaggccagcagcatcctgatatcaaaacctgacagagatacaacaaaaaaaaactgcaggccaatatccttgatgaatattgatgcaaaaatctttgacctaatgctagcaaaccgaatccagcaacacatcaaaaagcttactccctgtgattaagtaacctttatccctgggatgcaaagttagttcaacatatgcaaatccataaatgttattcatcacataaacataactaaagacaaaaactgcatgattatctcaatagatgtagaaaaggcttttgataaaatttaatacccatttatgttaaaaaactctcactaaactccttattggaggaacatacctcaaaataataaga

SEQ ID NO: 32210 - DNA, 1049 bp, Homo sapiens
agccttttagggttgctctgcccttcatttccctcagccctatgtgctttacttccaggaacttgtacagtagggcttgctctctcatcttcttggggtttttacaagatttccatgaggcccacaccattcaagttggaacctcctccaccacccaccctggtactctccccacgctccttccgggctttgttttctctacagcacctatcaccagctaacatgctaaatactttactagtttattttgttttattgttgatatggttcggctctgtgttcccacctaaatctgatcttgaattgtaatccttataatccccatgtgttgagggagataccagttgggaggggattggatcatgggagtggttcccccatgccattttcctgatagggagtgagttctcacaagatctgatggttttataaggcagttttccctgcccttacctgctctctctagcctgccaccatgtaagatgtgcctcttccccttccgccatgactgtaattttcctgaggcctccccaaccatgtggaactgtgagtcaattaaacctcttttctttataaattacccagtgtcaggcatttatttatagcagtatgaaaatggactaatacaattgtctttctctctcaactacaaagaagaccccaaaggcatgaagacaagttttttttttacttttgttttctgtcttgtttcctattgggccctgctgcctaggatggtgtctggctcaagtagatgcctgataaatatttgactgaaaatgagtgaaaatatagctgtcagactcatagatgccatagataccaaccagaagctgcagtatgaagtcaagtggctggggctttggaccacagaggtcccaacccagccccagctccacactgttgaagacaagacttagctaagcactggatcttggtcacttacttaataccctgagcagcaactcaccatcctgttacctatctataaaattggataggtaatacctacttcacagtgtatatggactggagaagattctatatgt

SEQ ID NO: 32211 - DNA, 1025 bp, Homo sapiens
cttatatctacttgatatgagtgaaattggatttaagaaaagaatatcaggccgagagtggtggtttatgcctataatcccagtactttgggaggcctaggtgggcgggttttattttctcctcacagttgagctcaggagctcgagaccagcctggccaacatggtgaaaacccgtctctactgaaaatacaaaaatcagccaagcttggccgcatgtgcctgtaatcccagctatggctaaagcaggagaatcacttgaacccaggagggagaggttgcaatgagccaagatcacgtcactgcactccagcctgggtggcagagtgagactccatctcaaaaaaaaaaaaaaaagaaaagaaaagaatatcacaagccattctgtgaaatgagtacaagaaatgaaagatgagaggtttgagggatactagaataaaagctaacctttggatacatattaatagtaatatacatgatgagaaaaagagggaaataaccttagttgaagtagagctaacatgctaagataaataatgcagttttgaggtagagaacataggcaagtatgccattcctggaaatgagtgggacttacttaaaagggtagctgcagagtcattccctatattatgaaaagggactgagtggtgttgaagaatcacaggaagaatacctctcatcttgaaatcatgtcttatgttgatgcatacatttggtctctagttcttaaaaagcacttcggtaggccacagggaatagggaatggattggaaaaagaagcagtaatataagaagccataaagaagttgtgtgggagacctctagggacagtttcactgtaagactgagaaacaagaagcaaatccaaagtaagtaaataattttaatcagtaattttcacagtgtagatttctcatcattgtgctacagattttttttaaaggtatgtactgtggcagtaaaatgaaatataaaaaaaatgctttccatgaatgcaatttggtggtatccttgactttcatg

SEQ ID NO: 32212 - DNA, 1027 bp, Homo sapiens
gctgtatttcttgaggtgtttaattttttgtgtgtctcacacagcaagtttcctggtggcagaacaacatctagccttgacatgtggtgtaaatctttatgctctcttcagaataaaatgattgcagcacttttctactatcagtggggcatgaattgctgatatgttatttgatggatccaagcatatcagttgtctttgtcaccaagagcctcaatggctcaaactctggagatagttattcaaggaagagtttcagtacttggccatgggatgccccacaacccagagaaacctgaaacccacgtcagcctttcgattctgtatgttcatcagttatctatttacttattgccactttgttgaatgctctgagatactgatgtttgtcaattacgatttgcttatgcaaagatgagaaaagatcttggctactgctttatctgtctacttccaaggcatgtcaaaagcccactagttttggaacttagattagttatccattgtcttaagctgtttgtgctgctgtagcaaaatatcacagacttggtcatttgtaaaccacagaaatttgtcacagttctggaggctgagaagtccaagatcaatgcaccagtaggactggtgtctgttgagggctgctctctaattccaagatggtgctttgttgctgcatcctctggagggaagtacaccatgtcctcacatggcaggagggacacatgggcaagagagtactccttttgacctcaagcccttttataagggtgctaatcccagtcatgagagcctcgccctcatgacttaatcgctacccaagggccacatctcccaatactgttgcactggggcttaagtttcaacaatttaattaattattaattaattaaatttaagtttggaagggacaccatcattcaaaccatagcacctatgttgtaaggtcaagctgagttgatagtatatgtcatgtgttcactatttaatgaagactttcctagagctcagtctggtgactttgatgggg

SEQ ID NO: 32213 - DNA, 1068 bp, Homo sapiens
cccaagtagctagggccacaggtatgcaccaccacacctggttaatttagttttttataagagacagagtctcattattgttgcccaggctggtcttgaacccctgccctcgagcaatcctctcaccttagccaccaaagtgttgggattacagatgtgggtcactgtgcctggactaattttatataataaatagaatcatacggtatgggcttctttgtgtgtggcatattttgctcaacattgtttgtgaaattcggaatgatctttttgtgtttaagaaataatgtaggcttggctgggcatggtggctcatgcctgtaatcccagcacttcgggaggccgaggtgggcagataacgaggttaggggatcaagaccattctggccaacatggtgaaaccccgtctctactaaaaatacaaaaattagccaggcatggtggcacatgtgtgtagtcccagctacttgggaggctgagacaggagaattgcttgaacaaggaggcagaggctgcagtgagccaagatcgcactgctgcattccatcctgggcaacagagtgagactctgtctcaaaaaaaaaaaaaaaaaaaagaaaaagaaaaagaaataatgtaggcttgtggatgtcaaacaaaatcacgtggtggacaaatactttggaaactttatagtgccttgcaaatctagccatggcatggctgactgagtaatctggggtgttttcatgttggggaaaaaattggtgtcattgaattattactgactgtcagccacaccatttgtttgtgcaaatttgacagtgatttataccagataactcatttatatcctaatagataaaatggtaagattttcagatactagggttccaaaggtcatcttagaaatgtactccctgaggtttattcttgtacaggttagtggacaattttttataattgactaattaaatggaggctagagtatatttgaacctaaggctatatcttaaggtttctacctttttctatttaattgcattaactgtgtgaattaacctataattacaacgtttttttcttcag

SEQ ID NO: 32214 - DNA, 1055 bp, Homo sapiens
attgaaaagtatccagtgtagatgctccaggaacagagttttgcttaaatgtgaatgactttttaagtctaaggctatctgaggtctatgtaatgatggaaaggtaataaatgaagttaaacactgaatatctggttttgccttccttataaatggattgttttaatattgcatctgcaaaacatcagtttctccccaagatgaacctctttttctcaaattcaggctattagagtttgggagaggacctgtgctattgggaacagagctatttgacttaaaatgtcatcccgttctgagaaaacatactggggccatgttagggcatccctgtgcaaatgccacattgtcagaatgtctccccctggggttagactagccatggcaccttccagtcctgttggggtggcacaatttactgcttacccattgcctgggcaccaacccagccagggtcagggagccaagctccctgagatttcatggaatttgatttgtctgtgactctatgaattttcagatgctaattattggctgattggtattctgctcctcagatgtcacctaatgattttccagagcttctgctacttggtaaatttatttttctgatgcatggcaaatatgacagcattgaatagatgtggcaagggcatgtcgtgttgtgtgtatgtgtctcaggccatagaagggtaggcttcagtagagagataacttattgttttgtgaaagcatggggtacaaattaagagaatgaatgaaaaccaagaacaaaactcaaaactaacctttccttaataatttgcaatcaattttcattcctagtaatagtgaaaacttataatattcttttattaaagaaattttacggagtatatgtgccagacagtgttctagaagatgtagatttaatatagaacaagacagatgtggtccgtattattgctgaacttatggtcaaatagaaagactttcacctacattttaacaatattgattagctccccaggtaaataacaaaagtaagaattattctggtcacctccctggactct

SEQ ID NO: 32215 - DNA, 1066 bp, Homo sapiens
tatcagcactgccctcatggagtctagtgaaggggacagataacacataggcaaacacctgtaataataatatgtcaagtacaagaaggaagattataagatactgtgatagaaagagggatgagtaacctattgagataaaatggccagacagaaagagctgagaattaagcagagacctaagtaaaggatgagagggagctggccatatgaagagctggtattaatagaatggggtcccaggcagaaggaatagcctataccaaggccttaaggtgggaaagagcttaacaccatcaaagggagaaaagaaggcccctgtggctgaaccatagagagggaaagggagactgacatcagatgaaattggctgtatagatagggcccaggccatacagggccttgaagtcaaagtatggaatttggatttttttcccatgggtaatgctcctgtccctggatctcagtattgtggttggatccatgctgtttgctgtctagacctctcttccactcatctgcttctccactacttctagactttttttttcccctccctttggccagaacatgagttacagtcctggctgatgcttccctaatgcctactatctccacaggctaatttgttacctgttaatacactctctggaccctaggttccatttgtataacccaattccttctcatttccttcactaggttctgatcagagcatctgcgatacccacttctgccccctaatgcggtatcacatccatatccctcctgatttgacttctctgccaaatggcagtgaaaatcaagaacaaagccctagcagtagtgaggcagatgaatacaatgaaagggactgacagtttgggatcttttaattggtggaaagaagaggagatacataatttttatatgttagaatcatggcttcaagagatttttaaaaagagcttgaaagaagctggttggattcatctagtctactctcctttatttgcatatttgaaaaactggctgtaaagaggaaaaatgacttggtgtgggtcacagacagtgcaattggcagaat

SEQ ID NO: 32216 - DNA, 1032 bp, Homo sapiens
atgtgacaaagggaagtggcagcgactgtggacagtggtggtggtgacatcagcagcagtagctttagtaggggaagaggaagaggagaatgatcgtaataaataatagttaatatttatacagttatataggacctgttgaatacttgcatagctcatttagtatttatgataatcccatcagatgaaaagggcctaattgaggctgttaataatgaaagaaaaagcagtcagttttaaaggaaccaatctaaagaaatgaaccggctctccgggttgcatagctgttaagtctaaggtcaggatggcgcccaggcaggctccatccactgtcctccccggcactctcgagcagcgcagcaatggcagtgcccatgttcaccagacagtgtgaggacagatgacacagagctggcacactgtgcagtgcctggcagagagctgcagcaggagtccctctctgcagcatgtaccctgaatcagaggaggggcttcataccaagtctttgtcgctgtcctttgtaaacgtcttctccttctcgtcctcattcttggtccagctgtaggagatcatgtagttcatgatgggtgggtggtagatagtctccggctggctccaggacacctgcagtgccgtctggttcagaggctgcaccttcatgtggatgggtggagagctgcaaactgaagatacacagggctcagctcagggagctttcagaacaatgcgccattcaatccgtgcccctaaggactgcagcctcaaaaagttgaaagagtaatacaggaagcacccatgctcccttctcctgggtcctcttaacattgtgtgtgtagagagagagggagaacattgttctccctctctctcacacacacgtgcacgggacacagatgcacacacacgtgtgcaagggacacagatgcacacacacgtgcacgggacacaaatgcacatacacatatgtgcacggggcacagaggcacatgcgcacacacacgtgcacgggacacagacgcacacacgcacac

SEQ ID NO: 32217 - DNA, 1026 bp, Homo sapiens
tcatttcatttctgtttcgtccccaatatatattgaagcaaatctcaggtgttttagtcataatttagtatcaaactctaaaagataagcatttaaagaaaacacactatcacacctaagcaaattaacaactttcgaatttttttttttttttttgtgacggagtatcaccctgtcgcccaggctggagtgcaatggtgcaatcttggttcactgcaacctctgcctcccaggttcaaacgattctcctgcctcagcctcccgagtagctgggattactggcgcctgccaccatgtccagctaatttttgtatttttagtagagacggggtttcgccatgttggccaggctggtcttgaactcctgacctggtgatctgcccgccttggcctcccaaagtgctgggattataggtgtgagtcaccgtgcccggccaattcttgaatgtttttaatgtagctacagatatacggtaggttttttccttcatcatatttccaaaactgtatctcttactaaactatttattgcttaaattttactatcgccttctatttgcttttaattccttgtactttttgttgatttctctggtgctttttctggcttgagctgaatgcttggtttgtttatttttaacctttctaatatgtagagtttacacaggctgtttttttttttttttttaagtacagtttggctccatttcaccaggttttgaaatgcagtgccttcatcatcatttagttttagacactgtgaaatacttattttggttacatctttgatgcatgaattatttataagcaatcctagatgtaaggatttcagtttctagttgtttctagttataaggatttgggatgttatttcactggtggtttctaatgtaagtgggttgtaatcaatgaatgtagccttgtatggtatctgttttgggggaatgtattgaaattccatttatggcctatgtatataaataaaccatttgtgtttgaagagactctaggtctctctgtgcagtc

SEQ ID NO: 32218 - DNA, 1096 bp, Homo sapiens
aaagcttattttcatgaagtgtgttccataaaagtagacttcaaaatctgccatagatatccatgcatgtacatttgagatcgcatttttctttcctttgctttgcattaaaaatatatttttacatctgtttaattcacaattttagcttgttgctttctggggtgctaaaattatgtttctgatggtatttatgagggaaaagaaaagcttgtttgattatactttgttctcatctcgtggtctcagctcgttgtgtactgtcatttctatagacttgtagagtgcaactgtttcttgtttatgaacaccatacatttatgtggtatctagcaaatagtacaaaaataacttaaagtagacctaaggagtctcatctgacttgtcagatagcttaaaaaaggaaaggatgtgatatgttttaaaaatgctttattgtagattttatatgaaataacttaatccttttgagaggactagttgatttgattctcatttcctatatatagcaatttatgctctgagtatctgtctgaatagtggattagctcatacatggcagctgatgccctgggtgaagggacttgctctccacttttgtaagccctgtgaagttgtaagaaatgttactgtcatgcataaaggtgtggaggtgcaggtcaccctactggaaactaggaccttattggacacctcagatcttggagtcagcatttgcctaaatgttcagtagaatctccaagagttcctgtgcctttagaattatttacctggactccaaactcttcatagcagttattgtttcataatgggttcttcatggatgctagtggaatatatttaagttggcaaaaggataaacactttcttttctttttaaagcaacataaaaagtcccatgttactcaaaaagtaacgtaaaagaatttatccatttatttttagagaagcttctagtagaattctataagaataaatagagttgctcacttccaagattgttgccttgcaagaataaaaggtgctggagatgctgattttttttttttttttttttttgagacagtcttgcactgtcacccaggctggggtgtag

SEQ ID NO: 32219 - DNA, 1045 bp, Homo sapiens
acattttggacacactgacatctagacagtaatttttaaaagtaggagtaaataaagtcactatactaattattattattattattattatactttaagttctagggtacatatgcacaacgtgcaggtttgttacacaggtatacatgtgccatgttggtttgctgcacacatcaactcgtcatttatattaggtatttctcctaatgctatccctcccccagcccctactctatgacaggccccagtgtgtgatgttccttgccctgtgtccaggtgttctcattcttcagttcccacctacgagtgagaacatgcggtgtttggtttcctgtccttgtgatagtttgctgagaatgatggtttccagcttcgtccatgtccctgcaaaggacatgaactcatccttttttgtggctgcatagtattccatggtgtatatgtgccatgttttcttaatccagtctatcattgatggacatttgggttggttccaagtctttgctgttgtgaatagtgctgcagtaaacatacgtgtgcatgtgtctttatagtagcatgatttataatcctttgagtatataaccagtaatgggattgctgggtcaaatggtatttctagttctagatccttgaggaatcaccacactgtcttccacaatggttaaactaatttacactgccaccaacagtgtaaaagtgttcctatttctctgcatcctctccagcatctgtttttcctgactttttaatgatcgctattctaactggtgtgagatggtatctcattgtggttttgatttgcatttctctgatgaccagtgataaccaaaacagcatggtactggtacaaaaacagatatataggccaatggaacagaacagaggcctcagaaataacaccacacatctacaaccatctgatctttgacaaaccttacaaaaacaagcaatggggaagggattccctatttaataaatggtgctgggaaaactggctatactaatattaaacataatttgagggaggctgtgtagagtagaa

SEQ ID NO: 32220 - DNA, 1015 bp, Homo sapiens
cttttaaaaaattacaaactacagaaatatataatgtataaattaaaattgtccacgattactctccccccattgactattcctttggtatttgttgttaggcatatgctgacacatagataactaaaaacaaacaaaaaaaaaagactcatgataatgttttgtaatttgttttttcacttaacgttatacaggttaggcatcccttatctgaaatgctaggggccagaagtgttttgtatttcaggttctttgtcagattttggaatacacacatacctcagagatatttcatgttcagttctaaaacacctcaatagagcagatatcacaataaagtgagtcatgcaaattttttggtttcccaatgcatataaaagttttgtttacattatactgtagtctattaagtgtgcgatactattctgtctaaaaagtgtacattaatttaaaaatactttattactagaaagtgctgttgatcctctgagccttcagtgaataatgtttttgctggtggagagtgttgcctccatattgttggctgctgactgatcagagtagtggttgctgaaggttggcttggctgtggcaatttccaaagataagacaacaatgaagtttgacacattgattgactcttcctttcacaaaagatttctctgtagtatgtgatgctgtttgatagcattttacccacagtagaacttattacaaaattggactcaatcctcttcaaccctgccactgctttatccactaggtttatgtaatattctacatcttttgttgtcatttcaacaatgttcgtagcatcttcaccaggagtagaatctatttcaagaaaccactttcttctctcatccataaaaagcaacaattcatccattcaagttcgatcatgagatggccccatcttcaggctccactcttaattctagttttcttgctatttccactatacctgcaatctagaacccctcaaagttatccatgagggttagaatcaactttg

SEQ ID NO: 32221 - DNA, 1120 bp, Homo sapiens
gtacagtctcagtggcaaatacccaactctgatgttgtaatgtgaaagcaggcattggacaataggtgaacaaatgggcatggtcatgtgacaataaaactttacttacaaaaacaggaagggggcctgatttgaaacacagacccctgatttagagaatctatctactttatattggatggctaagagaagcctctctgcagaagtgacatttgagctgggactttacatggaatgatggcttgattacccagatttggtctgcctcgtcccgtggttttcaaaacgaggttcccataccagtagcactagtatcacctgggaacttgttaaatgtagactcttgggacttgccccagaccaaataaaccagaactctgaagatggagcccaacaatctgtttcaacaaagcttttaggtgtttctcatgcatgacaaagcttgagagccattactgttggctaatggaaaagccacattgctaggaatagatgaggccacatctagactccatcacttaactctgtaaccttgggcatctcaagcatcagttttcttagctgtaacacggggatgcttctgcccaagtctaaagtagctaacagagaagaagtgaattcatctttgtaaggatcctaggacaaagcagacaccaaataggtcctcagcaaatggtagctgctgtcctcatcagaatcattatttgaatctccaagacactgaagcagatttgcgtgcagatacggatgaagggtgtgccccagaagctacccaatcccattcctgtctttttgcctttgactggcatgccctggatatcacccaaatacaaggctgattgttaaaggaaaactcaagatgcttttaaaagtctttcattggccctgtttcttcagctccctttctggcctgttaacctagagcatgcgctgataccttttactgcaggaccgtgaattatacagctgtgactcaccaccacccggctggggccacagtgccaggcgtccagctttaccgttagctttcaggctactgacagtttgctcttttatgtgagaagctatttataccaggagggacaaaggctggcagatgctgggggaagggagagaagaa

SEQ ID NO: 32222 - DNA, 1079 bp, Homo sapiens
tagggcccagtgtgtgttgttccccactatgtgtccatgtgttctcatcatttagctcccactgcatgagaacatgcagtatttggttttgtttctccattagtttgctaagggtaatggcctccaactctgtgcatgttcctccaaaggatatgatcttgtacttttttatggctgcatagtattctattgtgtgtatgagtctaatatgtagactctataaggaactcaaacaaatttacaagaaaaaccaaacaatcccattaaaaagtgggcaaaggtcatgaacagatacttaaaggaacgcttatacattgttggtgggagcgtaaatgagttcggccattgtggaagacagtgtgacaattcctcaaagacctaaaaacgttaataccatttgacccagcaatcccattactggttacatacccaaaggaatataaatcattctattgtaaagacacatgcacacgtatgttcattgcagcactattcataatagtaaagacatggcatgagcctaaatgcccatcaatgacagaccggatagagaaaattatttataataaagaagaacccaagaattcactcataacttaagagtagtgatactaatataaactcattgattagccattgctcattttcttctaattttgaagttgcaaattggcagatgaaatcagggacacggtaggatttgtttagccagcaaggtattgttttaaaatttaattagctactaatacttcaaaattagagattttttcatgtaaaagtttatgtcttgaaattttgaagatctggaatctcattcctgtaaggatataattggttggagttgagtgatggccattccttttagacaaaacaaaacttgattataccgaatcatccgagtctctacaaagtcctttttattcttttgtgttaccttcctgaaacctacaggcacttccgttttgtgatctctgttctaattctcactacaggggagaaaatgtcttagaatagaaacactcccagaaaataatctccatgagaattgaaggcaattctctgttgggttattaacagga

SEQ ID NO: 32223 - DNA, 1027 bp, Homo sapiens
tctctcccttttcccagcagctggaatgtggctatggtgctagggagccaccattgacctgtcgatgatggtaacactgtactggtgtggtgcactcgggatgaaggaggctgggttcctgaaactgtgcaatttccaaatcagccctggtctgcatatactcagctggtacacaggaaagaaattagctttctcttccttaagccactgttacttttgtctttgtgatgactaaagatcttgaaacttagacacacacaaaggtaatgccaaccctttgtgattaagggttttatttggatctataactcatgtggccagacgttgctgctgatatatcatgggagcttttggccatgtgtggcttgattcctaaggcactgtaaaaagacagaatttggaattagagaaaattggattcaagttttggctctgctacttatgagctgtgtgaccttgagcaaattaatgaacatttccgagcctcagttttcccatcagtaaaatggaatagtaatgcctaactcacagagttgtgagcatttttgtaaagcacttagccagttgcctagcatatgtgaattatcaataaatggttagatacatgtatctgatggggctatccttagcgaagaacgcagaggtggtctctgcacgactgaacaaaaatttcagatggctgtagggttttgagtgttggttgtaataatgagtcatcaggcattctttgattctttgattgttgtgatagacagaggcatgaagcacccagccacaggtctggaggaactctgcaaacggctgtctgtgttcttctttcttctttcagcccatctttgcttcgtgtggtcagcaccccaaagtcattcattaaattatgaattcctttacatattcctctggtcatgccaaagctcttctgttgtgctagaagctagggcagtacttttttaaaaaaacggaataaccccaaacatatttgaattctatcttatggatttcgttttataaaattatgattttccaa

SEQ ID NO: 32224 - DNA, 1052 bp, Homo sapiens
aaaatgaggctaatatagtaccttccacatagagcaggtgtgatgattaaatgagatgatgtgtgtacagtgctctgcacagcagctggctaatagttagtgctgatatatagcacttaatatttatatttatatatttaaaagagcaaatatttgttaaccatttatgttcattcatttagcagttgtttgatttttttatatgctaggccccttagtagacatggcataaagatgagtaagataaaattcctgtattaaaaaaatttgtggtttcttggtggagacagtcgtgggaacagacaatcaaagataatggttataatcccatgtggtccctgggattatgtggtccccagagctgtgtacagccaaaagtaatttcaaactagttcacatttctaggataccatgaaggagaagcatatgttctaccaatacttaccatcttctcttttgttctctcatcaaccatccttagcccactcagacaagcaagtcactttgtgtcatgggccttgctggactcttctggcctaccccagccatgccctcctgccaagactccctgaagatgccattctgtttcttacctcaagttctctatagccatttttctctgcccaaaagactctctttatctcactgtaacctgactaacatctaattttcctttaagactgagccggagtgtcaccttctatgataggccttgctggtcttgttagatacctctcatctcctccttgttcccccagcacccagcgcaggccaccgtgacattgtttaaccctctggtattgtaattgtcagcatccctcaaagccttcttgactgttgtgtgtggattacaagctgatcctcccgaggggacatcatgatttcctgtattccttggcaccctagcaccatatggaatggaggtaggaaagaaggaaagtggcccagaagccatgcaaggagtcctccaagtttggcagtcatctgtggggcatttctaatgtgtctccacctgtaacctgtaaatgatgatttctggtctaggttatata

SEQ ID NO: 32225 - DNA, 1021 bp, Homo sapiens
tgagattctataagttggcaatccaggacttcagatgagaggaaagagcttgatggaaaattaatatccagtgttctggtacagagaactgttaagtcacgtggcaatgcaatttcagaggaatttaaatttgtttgaattcactgttatctaaaactgtgatctatgaattttatgaagagactttacaaaaagtgttgttgagtgaatgaaaaattcacaaccacaaaatgcatatgttgcaagaaacgtaaaaaagaggtggagcccaacgtaagacgtgacttgcttattgcttacacggagttcacaattaactttgaaaaatttatctcggttgcaggtagcctctatctataaagacccaagtattggaaatttaattaatattgttattgtgaacttaattgtgattcataatgaacaggtaataaagtttttttcttttttcttctatctgtatccgaaatggcatatctaattgggatcggtacaacagattaaccataattcttctctgtatttaggatgggccttccatatcttttaatgctcagacaacattaaaaaacttttgccagtggcagcattcgaagaacagtccaggtggaatccatcatgatactgctgttctcttaacaaggtatatggatttcttattcctcagatctttcagtctcaggtcaagttgatgggatgtggtcatgcattcctaatagtcagctgctagtggagggtttctcagcttaggcactgttgacattttgggctggacaattccttctgtgcattgcaagatgtttaacagcatccctggcctctgctcactacgtattagtagtactccctcccctcaggtgtgacaaccagcaatgtctccagacattgccactgccccccgtggggagggcagaatcaccttggttgagaaccacgaacctatagataccaagtgaggaataaatgtgttaggcagacctgaaaatacatgccttatataacaggcaagggcagctgctgt

SEQ ID NO: 32226 - DNA, 1053 bp, Homo sapiens
ttttttttttttttaattgaggaagatttctgcgtggcaatgagtactctactctttttgttgtcctggtttattttccaatcaaaataaatgaaaaaaactttttttttttttttttttttttttgagacagggtctcactctgacgcccaggctggagtgcagtggcatgatcgcagctcactgcagcctcaacctcccaggttcaagtgatcctccctgctcaacctcccgagtaactgggactggaggggcatgccaccatgcccaaataatttttggtatttttatagaaatggggttttgcccttttgcccaggccggtcacaaatgcctgggctcaagcaatctgcccaactcagcctcccaaagtgctgggattacaggcatgagccaccgtgcctgtaagaaaaaattattttctcactctattaaaatggggaagaaggccttttaattatgaatagtatagtacatactattcaacaaaatactacacttaaccattgctgaggaatatgaaaccaaaatgctgtgctgtgaaaactgagacaaagtcatctctaagtctaacttcaggaggtagatgtgtgtggaattagatatactcccaagtcacactagatacgaaagttaaccattctcaagtgacctaacgttcgtgggggtggatcaggtagtgttgaataactttccagtttccttcacacagtttttggttgttcctttttatgacttagtgtttggggttttcctccagaacctaatctcctgggcgttcaaaaggcattttgttgaatagtaggccttcctccaacccatctcctttgctgtattttgctttgtcaccaggatggtaattatgaactctgctcacttccctagtatctcctttataaaagatggcatctcaaagtggtccctggcttaaccaacagttgaagctgtttgtaaagcccttatgtcatgcaagttctttgcctgccataaacagccacaccaaatgtgcagagactcaattatgccgtcaggatttttccagctgggggcaat

SEQ ID NO: 32227 - DNA, 1013 bp, Homo sapiens
aatttgttttcaaaaatcgcttggaaatagttggaattaggtctacacgctcttaggtatttttgttttttctaaatttaaaaatggcttgcattctgtgtagttacttttgccatagagaccacttaccaaaatggcagatgattgcattgaaaaaataacagcactgcccatgaattaatgggattctatgtttatatagtttgtctgcatctgcaaatcaactttcacgtagactttggtaactaaaggaggaagagaaggctgttttataacctagcactagctgccggtagcacccccgtctccccagttttaacaaccaataatgtcttcagacagggccaaatgtcctttaaagagcaaaattagatgtgcttgagaaccactgctttaaccccttcaacacccatttggttttgcttcttagaaactctgtgttctgtttgtttaggtacaaatgaaatccacttctgggttattttttgttgaatatggattgaagaaattttattggagaattccccacttcttcttagtgttgcctctgcatctcctcagtaacggagtggcagtgtagtcagctgtgagggtctccagcgtgatctctgctgtcacccagcagtgcagcctgagccagccctgggctgtgtccatgagcctccagattatcatctgaagtatgggtaggactgcacccttctcagcactgtcatgacgatggaataagaagagggcctgttacaccttcagcgctgccctgttctgatgaagagtttcttattttctggccccttgctctgtcatattgaatggagcttaagagaaaagaggtggaggagaggctgaagcagacctcctgttttcagtacctttgacttagttgtctggagtagagaaaaggttagggaaggtgaaaaggaagagcctggaaggaaaggtggtaggagatgtgttccttttggtctgtgacagcacgttccttcagtaaacaataatgagaaaaaccagga

SEQ ID NO: 32228 - DNA, 1057 bp, Homo sapiens
tgcaaattggacctgtcttgcattttagtagcttatgtctcctacaagtcaaagacttctttaaaacttgctaaatgttttttctttttgatttagaagaaaaggggggaaaacctgtctctttgtttgcaaacaagtaacatgtggagcaaaaactatgaaattaatgtctcttgatgtgcagccaaatctgaacaaaacataaactttgagtaattagcctgtatgtgtttgtgtgcatgtgcatgcctctacctcagtctggaactgtttgtggtatatgtaagccttctgccctgatgacatcattatttaaattagtgaccacatgattccttgaattaaacaaaaatctatttcaaatatttcaagtttgtagtattctatcaaagttggtcttaatagctacttctaggactaattattcactttagagtgtggtgttacataagtttgccttgactacgtgtatcagggaagctttaaaattaagttgaataactgttgttctgcctgaaaggattgtttaatgacaaaaaaaacccacaacctagtcccttctttcaccaagtaaaataatatggtgcagtgggcctttccacaacagattcttgttcagacagaactattacctgtttaataaagttttggcctttgatatgaaaccttaggaagttctgtagagcatggttgagttttcagaaaggcacatacatcccccagtgccattgtaccaccacatttaaagaaataaaatcatccgccttagatagtgagctcttagggatcaggagctgtgttactgctttcacaggttaagtgctgagaaagatgggccagcccagagatagcaattgagtgatagttgtgtgcagttcaaaaacccaactgcattttcattaggaacaaggagaagataacatgcagattttattttatttcaaggagagcaaaacaacactattgtactgaaaatgaaacattaattttcatccatttttgcttgtgtaataagatggcctaggaacaaaatgagaaaaccgtaaacatttaagat

SEQ ID NO: 32229 - DNA, 1032 bp, Homo sapiens
ctgcactagacagggcagctggcattcatcactctttgtcagtaaagagcctacgtactttacaaatattgtttggttagttgtaccatgatgctagtggtagttattactgtcattacatatgaggtaaagggggagcagagaggctgagtaacttatctgataccatgctttctaatttaaaaattgatacctttttttaaaaaaaccaagttgtgtttattgagtatgcccaatgtgtcaggaactctgttaaacacattacttacattatttccttttatcctcttaatcttttgaagtataagctattattatatccattttccaatgaagaaaattagatttatagaggctcaagtgcatacacttacagagctgagtttgatttcagtctgatagaccccaaagttattatcttaaaccactgcattttacagccatttgtactattagtttactttagcacaatggcgtatgtaatggaaaagagaaccactggaaaggcccttccagcaccttcaggccacctttcagggcccattcagcatagtacacttggactcatgccctgcccctgtgtgtcattagcgcttgtcttgttgagtctagaacattcagatgtgatgggctttcaggtgtggtggacctgagaggctggcaggttctaccacttaccagttttgttggcttgggcaggttactcatgcttcctgtgactcagtttcctcattatctttactgatgtttagaagaagtatggacgcacccagccatgagcttgatactttgtaggccctctgttaagactgatccttcttccttacccctttcccttccctttctagcatgacttcccaaacactcttttcagtttctctttaggctttgaggccttatttatatgaagattcttttttttctttaaacaagctaagttttaaaaaactgactttccggcatttgttgagtaacaacccaacactagatgccaggcaagaatatagtgaagattaataattggatgattta

SEQ ID NO: 32230 - DNA, 1051 bp, Homo sapiens
atttttggctatttgtaagtaaagttgctgtgaagattcatctacgagatttttttttttgtggacttgttttcatttctgtcatgtaaataagggtggaattgttgggtcacttggctattgaaggtatgactttctaagatattgacaaattgttttcctaagaggacgaaccattatgcctgctaaacagtatatttgagttcctgtttctctacaaccttgccaacacttgatactttcagtctttttactttttgttattcaagtagttacttagtgggatctcattgtgattttattatttttcctctaatgactaatgatgtctaacatctttttatatgcttaatagtcacatatattccattgtgaactgtctgttcaaaccttgtgctgatttttttggggggtggcttcatgtggcatgtgggtgtcttcattcagtaaatacttgatgaatgattgaatgacctaagattggtttgaatatatgtatttttcctttcggtgacttgaaacagtagatagaataccaaataaaatagctcaaattgggttttattatctatttcaaaatgagcagctgtagctggaatcttatattgaatgtgatattaaagtaaagatcagtagtttcctgccctaggtaggaaataccatcatcttaaccatcactgtcatcctcatgatttactctttttgaccatagggaagttaccatttgaaggcatgagttttgtagctcacgtgactcctgggttgctgcattgtttctctaaggctaaaaatgctcttacctaatttgtatcttgtctaaaaatggaaagacagtctcagcctagttatttttagctgtcattgaagcatctttctccattaagagtgaatgctagttaggttgatctacaagccttctgttgatcctgtagactgtaatttgtgattatgattttttcaaatgtatctcttttctatgacacatttttgtgataatataatatttttagcttttcttttgttctcttaagtgtagagaattgcaaagaaa

SEQ ID NO: 32231 - DNA, 1021 bp, Homo sapiens
ggctccttgaatttttgaattaagacctacttggtctgtgatgggtttatttttttgttctgcttttaatacactggtgaattcattgtgctgccccgttttgtgaattcatgtgagtttttctctgtgtattcttcacaagttctctaataaataattttttctgtgttctgtaatgtactattaataaaactttcaagtggtatttttctggcatttcccccgtttttaaatcaccatttatactttggcagaaattactttgagattgatgactgcagctttccaaattgatttattctaggcaagcatcttctactattcttgaaatttggaggccatggaggttctgtttttaaggctgatatgttgctgtttcaaattatacttgaaactccgaacatatggagcttttcatccacccttccatcacccacgtaaatgaatatcataattttattttcatttggcctcatgaatctcagtgcccacacattgtgattgagactgacagtgtggttgaagttttgttggggagatcagagagcatctggtcagaatgtttctcctcctctaatttctgattcctttatcttacgagatacagcagagccagccccatgaacacttggaaagtgcagctctggaatatcaatggagccctctctcctgtctgttgggaaccaggagcaaaggcaaattgggaatgcatttttcagtgtctacaggaagtttgaagtgtatttattaacacaaaatgcatctgttgggctgcagtgatgagattaatcctcatttttaaatatttgatctgtaattgattaagcccttgaagcttttgctgtagtacaaatttagactactgatgtgcctgggaagtgcaccaggttctgaattatacagcgggttgcatagtgggcaaccttcaaaccagagaacacctggggccagcaggagtgggaatactgaaaaagtgaagggcgcactggaattttttaaaatttattttggtgatgactct

SEQ ID NO: 32232 - DNA, 1084 bp, Homo sapiens
tcaggttgattctaaagattatttttcaactccaggaagtgggttacatttataggggtgattattttggtaaataggacatatgtagaactatgtccaattccatactttttgatggtgagatgcttttaaagtgtgtagacattgataccttatccaatattacctcattctttctatgtgccagttttatattcttcacacagttacagccgcaggttggattggcatggccatgactttggatttttagcgacctcctaattttattggcttgctttcctctctggttcagctatcaatatagtttaaaggttttactgagaaagaagcttgagagggtgtgtaaaatccatagttggtgaaatatctttttatctttgtggcttaataattatcttttctccagggattcttttgccaactttttttttttttttttttttgagatagggtatcactctgtcacccagtttgccgtgcagtgaccccatcatggttcactgtagcttcaacctctcaggtttaagcagtcctcccacctcagcctcccaagtagctgggcctacaggcacgcacaaccatgcctgactatttaaaaaattttttttgttagagagacagtgtctcactgtgttgcccaggatggtctcaaactcctgggctcaaacaatcacctggctcggcctcccaaagtgctgggatagggagccgctgtggctcaggccggttgccctggcactcggggaggcgaggctgcacgtccaaagtgctgggattacaggtgtgagccactgtgctcttttgccatctcaattgcatggtttgattcttgacaaagtgcttctatgtggcatagcatcaaccctgaaacatatcagtcattaaatatttaatttggaagtgtgaaatggcaggttcactttttagattacacattagagccctgccaatcagcactgaaggaaagttgcctacatctaaggtttggtcagactttgggaatagaagtttatacaacatctacagtaactacggcaaacacattcgtgtttgatcaatgagctgtcattccctgaaatct

SEQ ID NO: 32233 - DNA, 1035 bp, Homo sapiens
gcaacaattttgccaatttcttacatcagttttttttttaatctaattaaaaaacgtatttcccatggtgggagttcatatcttattggatgcatttctgattgtttgaagcagtccatgttctgcccttccaagcacctgttcactgggcctgtttgctgggttataaagactatgagactggacaattggactcactgatacacaatgtctggttttgctaaggtttccctctaactctttgtggggataaaaaagaaattcacaattactaaaagatactcttcagtgtatagaaaatactccaaggggagggaaggattgattatatttaatatttaacatgccacccctaaaactttgcttgctcctacattgaactaccctgacacctttaaatgtaagaaccacaaattaatgatgaagaagaaaaagaagctgatgatcaggattagcacttactaaaggcttgccacgtgccaggcattattctgaatgctttacatgtgttaagtcacctgttcgccactagaaccccatatggagcaggtattattaggctctccatttatggatgaggaaactgaaacttgggaggaaagtaacatgcccaacgccattcagcaaagtaagtggtagacttggaattaggcagtcggaaccttcaggaagtctgaataattgggaaacgtagtattaacttattttaaaatggtacattatttgtgtttaaataatatgcttgcttgttttatctatttttttcaacttccagacatcttctcagctgaagaatatttaaatgtaaagcgttgggtacaattattaatgtgaggggaaaatgtgcaatacactacagagttttcaaaagttgtggaaacatcagcccaaataaatattttttaaaaaacacataaatatgagttttgtttgcatattcatttaaaactacaattaactgacatgtcagctgctcttttattatgtgtagtcctcctttatctgcaggagatatcttccaagacccccagtgga

SEQ ID NO: 32234 - DNA, 1073 bp, Homo sapiens
agagcacatcgtcactgtctgtgctgggaatgctgtgtgaaacctttttacgctgctctgctgtctgtgtgtagcatagtatttcagtgtaaatgcatttcttaataacctacccatgggccctgtggaccataatcattggctgagttctcctttggaattcccaatatccaaatatttctctcagattaaatgtctgtactttagattattcacactctgagtattactctcattttcccagcgtaaatctccccttatttcctttcccttttagattacccatggagacacatcattgctgtacctcacatttcccagcagagttttagctgagaagttaattaatgttcttgtaagaggagaatgcactttaaaaaaatctgcttttacttaaaatgagatataaaaagctgagacccatgtaggtcctgtgtgcggtgcaagtcctcttgagtgacggaagagcagaatggtccccaatttgtgaggtgggtggagaatgatgttggagttctgttggtgtcgtgaaggtctcatcatgcagtgggtcccacgggtatgtaacttgtgtcagttcctgctgagagcgtgctggctgcttacattaatattgtcccttgacccataaaatcattgtgctggaagtaaatgaggctcagcagtcagaccagtttcattttatttatttacttttattttatttatttgtttttttgagacagagtcttgctctgtcatccaggctggattgcagtggcacgatttgggtgactgtaacctctgcctcccagcttcaagctattctcctgcctcagcctcctgagtagctgggattacaggagtgtgccaccatgcctgcctttttgtattttttaatagagacagggtttcaccatgttgacaagggtggtcaagaagtcctgacctcagctgggcgccatgtctcatgcctgtaatcccagcaatttgggaggccaaggcgggtggatcacctgaggttgggagtttgagaccagcctgaccaacaaggagaaaccgtgtctctactaaaaatacaaaattagctgggc

SEQ ID NO: 32235 - DNA, 1019 bp, Homo sapiens
tggaaatttttcatcactgaaagtgttttttttttggatagtcctgttctagagatttctaaaaccttgtttgttcactaagcgtcctctatgaacgtttaagttctactccaaatccttctagatggtgatttccaaccatgactctacattaaaatcacctggggagtgtttgaaaatgccaattagaatcagaattgggagggggagggggctcggacccaggcaccactatttgaaaaaatgccctcagtgattccaatcagctgccaactttcacaactaccattgtagacaataatactttattttttaatatacaaatcagtgtctcctgaacttagtacctttcttttcctttgtcctcctttgaattctgcttagagagaggcagtggagtatgttagatctctgcgttggggagtcagttctgcctcttactagctgagtagcttttggttagttatttagccagtccaggcttttgttacttcatgtgtaaaatgtggacactggtacctgccttgaaacaagtgaggattaattaagataaggtatatgaatcactggtgacagtctctggcacataagcccttaataaaaatatattttatgatataattttaatatttcaaatgtatatgacaagtaataaaatatattttaaaatattacatgtttaatagtatagaatatgctattttaaaataacattcttgctaagataatactatatgatttgacttcatggattttgctctgcctgttagggaacttttaaatattttctttaatatatccaatgacgaattaaggtgggaatttaggcactcctttcaagtgagctgggggaggggtaggtattttggcgtaggaaggcatctatagagtctgctcttatctaccagaagttgcttgctctgctttcttggttagatccttgaaactgctcagttggaatgaatgaaaatgcccttagcaggtgttttctcttgagaaacagctaaggctggtagtgc

SEQ ID NO: 32236 - DNA, 1093 bp, Homo sapiens
atgtcctcttctggaatgcttcctgaaggacctgcttgaggctgttttacagtcaattaaaaaaaaaagtcgaaggaatacattataaaataatgatataaagtataatataataaatacattaactgtaacatttatcgtaattatcaggtatgcactgtacataattgtgtgtgctgtacttttctatgtctggcagcacagtaggttttttttacatcagtatcaccacaaacacatgaatagctagaatcttatgatggctacagtatcactaggcaataggaatttttcagctccattgtaattttatgggaccaccattgtatatgtggtctgttgttgactgaaatgttatgcagtgcatgacttaataaaggactcatctagaatttataaagatgtctcagaactgaacattaaaaaccaagcaattcaattataaaatgggcaaaagacaacacagatggcaagtaagcacttaaaaagatgttcaacattactaaccattagggaaatgcaaattaagaccatgatgtgttattactacacagagaacagctgaaataaaagatagtggcaacaccaaatcctggtgaggatgcagagaagctgagtctctcatacattgttggtgggaatgtaaaatggtacaaacacactggaaaatgatatgtccatttcttaattaattaaatatacatttacaacaggaccccagtcatattcctaggcattcaccctagagaaatggaaacttatgtccacacaaaaacctgtacatgattgtccatagcagctttgtttataatgttcaacaactaaagtgtgctacaacagctgaatggtgaagcaaactgtggtacatccatgccatggaatactgttcaacaataaagaggaacaaactattgatatacacaataacttggatggatctcaaaggcattatgctgagtgacgaaaaaacaatctctaaaggtcatatattgtatgattctatttatgtaatattcttgaaatgatcaaattatagagatgaaaacataatattgccaggcatgttgtggagaggtgtgtatgcactaaagga

SEQ ID NO: 32237 - DNA, 1162 bp, Homo sapiens
tcaaccaaaatgttgaagtctcactgtgttgcccaaactggactcaaactcctggactcaaggtataccccaaccccagtctctcaagttgccgggactacaggtgtgagccaccatgcttggttccaaaactacatttaaatcccagctctgctatttctgtgacgtgagacaaattccttagttaggctgagcttcagtgtcctcacttgtaaaatagtgaagagcgtagtacccagtggaatttcatcatcaaaagcacatttaacttatacaaaatcatctctgcatccttagcataaaagaataaataaacgattgagaggatgaatgaatgatagttgaatgatgtgttggttgttccccatgatgtgtaagctcaagagtactctcgggattttaaattcatgtattttgatatttatcatacacattgataaatatatttaagaaaatgcactagagatgagactatctccatatggataaaaataaaatttgtttaatatgttagttagaattatatgaatatgaaattaaagatttcttccgtggatcactttgacaacaagaatgctgtccagatcttaattttatggcctgtgtggacttagattttagaggaaaaaaaaccaccaggtggtgccggccagaaaagaaatagaaacctagctagggtatttccatccaggatacccttaacaatttgggaattctaaagcattgagccatctgcctcagattttatgttattaagtacattgaaattcttgagctttaaatcctcatgtagaagactctgtctctgatttgtgatttgtcatgctacattcttttagctgataggatttttgtatttataagaaagaaaattgcctctagtgatcagctgttgctttttgcacagtcatttcattatgttggcagtgttttcataagtaccgaacttcagggtagtaaaaatttggtttaggaaataattgtcctaaaattggtataaacaaatgtgcttagggttttttttttttttttttttgtaagacattgctattctttgtaatctgaaaggacaagtcaatgtttctttcctttgtttgggggagtaggaccccagaggatgaaagcaccagataattatatttgtcaacccatccatcctttc

SEQ ID NO: 32238 - DNA, 1044 bp, Homo sapiens
ccatctctagaaaaaatacaaaattagctgggcgtggtggtgtgtgcctgtagttccagcttctcaggaggctgaggtggaaggatcaattgaatccgggaggcagaggttgcagtgaactgtgatcgcactactacactctgccctagatgacggagtgagactgtgtctcaaaaaaaaattttgtacttatatttatatgtgtatgagatggagtctcatctcaatttattgcccagggtggacttgaactcctgggctcaagtgatcctcccaccttggcctcccaaagtgctgggattacaggcatgagccaccatgcccggcctgaatatcttttcacacttgtaggaacatataaaagtcttagtctttcttcatttccttttcattctttcttttttttttttttcactaaaatggtaaaatcccactatgaacagtcctagttttccttcttctctaccctctttcctaccccccccaccctgcctctctcctgtctttctctgtcttccttcccttctcctctccctccctccttctctacttgatttgactctcttactgtcttcctttctgcctccctgtcttcttcccctccttccctgctctctttctcattttagtgagtcactgccttggtccattcatggagccggggccaggggatagatagaaagatgcattaagacacacccttgccctctaggtcctagagaagagatcagggtgcatggggagatcagaatgtgaatagctcattgctacacaggctttccctatcatttggacagtctttctctttcacttaatgaatgaaactgaagggttgttggaggcccaggcttccagtattgaattgacgttggatcctgggaattaaaaaaaaaaaaagtatctcagtgctcaggcagcctattaaattaagttcagtccctgcccttcctgtgtttgtttactgatcattacgcacatttgtcaacattataggctcctgtctatgatagaaataaatgctcagcatccgtgtagaacaaatcg

SEQ ID NO: 32239 - DNA, 1045 bp, Homo sapiens
acatgacccttgtgttgtgtgtgtcagtagttcatttttattggttgtataatattcacttgcatgtacatacaataaaatatttatttttctattcatatgcatctgggtagcttgtagtttggggctattttcaataaagctgctctatttattgtctgagtgttttggtagacataaacactcctttctttcatttgtttggctttagaagacactgccaataggttctgatttgtatcctcttctgttttaatctcacactcagctttatgcttagagtgtgtgtttgtggcctccagtgtgtgcaggttagggacaggaaagagaaagagaaattgatgaaggtagaatggagaaggggacaggctaatatgtattaaagaaagggaagacagtggagaggaagagttggagacaaaataattattagttgggtacataaatttttaatatggattcaaattctagctctgccatttactagctacttaatgttagaaaacttaagtcaactctaacaagcacctatattatagggactgtgagcagtatatgaagcattgcctaaaagtaacagctcacatttaccaagggctttccattgctagtcattgtgctaatgtaattatttaatttgatctttacaacaaccccatgagctatgttctgttaattttcccagttttcccagttaggaatttggaagtctgagagggtcagtccccaggttacacaactggttagtagagcgagaactctgataagttgacaccagtgtattgactgcagaagactgggaggcagacaaagagaatgtctttgcttatagacaggaacaggtggagaactgttaccgacccaggcagaatagaatagcagccagtgattcatccagggctttctgggctgctccaataagggacaatgactgcgtggggttagggagaaaggaaagttggaaattttctttttgtaatatttagccttatctgaagggcaaggttttgagtttctgtcccagcattcagtagaaaactttgca

SEQ ID NO: 32240 - DNA, 1096 bp, Homo sapiens
agccacttgggaggcttaggcaggagaattgcttgaacctgggaatcagttaaactaaaatacaggtgactgttttggtaggaaaatattttcccaccttcttcttaccttactgatttcatgtctgagagctaagacactttctccaagtgtcttagaggcatgctgtcttcttctggattcaaattgaggtcatctctggggaacctctctacgtggatacaagtggagaaaaacacattaaaatatctgtgggtgtttgagagctgctcacattttcagggaggctgccaacatttatgtttgtgccctaagtattgtataagtccatgccctgagatgttactcatcccagtttcgtgtttgttggtaaagagggagttgtaccttgtagagtttcatttcttctctcccatacattgactcatattggtgattatgtcaaaaactacttaatttgtataaaggcatctccaacagcagtttatataaatcccatatgggaaaaggtcccataagttggaccacagagtatgttgatcacagcctggaatttggactcacacttgcatttgagtcccagcttaaacttggataaggtttttgttttgtgttaatttaatttttacttaaaaattagagcataggccaggcgcagtggctcatgcctgtaatcccagcactttgggaggccgaggcgggcggatcatgaggtcaggagattgagaccatcctggctaacatggtgaaaccccgtctctactaaaaatacaaaaaattagctgggcgtggtggcaggtgcctgtagtcccagctaatcgggaggctgaggcaggagaatggcatgaacctgggaagcggagcttgcagtgagctgagattgggccactgcactccatcctgggcgacagagcaagactctgtctcaaaaaaaaaaaaaaaagcatgatacatgcagataatcttaagaaattcaaaagtactttaagatttatcacaaaaacattaatctttaatatcactgctgcccattcttcagtgtgacatcacagagggcaccacctttaactctgtaagctgttccttctggcatttc

SEQ ID NO: 32241 - DNA, 1149 bp, Homo sapiens
aggtcattatacattatatctttgtaatattatatttgttacatatgtatacatacacacatatataaatatatacataaacatacacacatatatggcatctgtatattatagaaaatacttttactcacatttttttagcgcacagataatttctggtgtacctgtagaatcccaaaccccttggaataaccattttccatctgtcagattttgtggttcatagtttttgggagcattgaattggaaggtcttgggcatcctggccagtcttctggcttttttcttttttttagaaaggagaaattaaagcttttagttctttaaactcagtatttcatttttgagtgtttaaaaaaaatcttaaagattcttaaatgtgtatgtacttgtgtatatgtgtgtgtttaagacttgtgaatccagttgctagttttaattctaaatctcctttcatttctaatgtcattaaaaattttatcccatttactacttgtataattttattttcttaacatctgccagtggtaacttgcaatgtattccaacatgtttttcttcttaacgtagcctcataggaattcttttggacataaaggtttataatgggcctcttgaatactttggttgccaatgctagacatatactaattccctgctcagtacttcccttggctctgactctgaagatgaaagacatagtcttcctttctcaacctctccttgactattcttgtgcttttgtaaagttattgagatgggttctgatgcttcatatggcttcttagattttaagtcctgtcaccattaggaaaaatctgttctaggaatgtttgaagttcagggccttcacacacaattatgtagcagctttcttaccatcaggttggatagtgggaattgttttcacagtagagagaaggtaatttcgctaatcaactgggcaccttttataaagattgggttttgctgatctcaaaaaatcttagtttggtgataggttctttatgaaacacagaatataccatattgaactaatatcaacttgaatgatacagtcagttattgagagtgtaatatacaggttctaatagttgctaacgatgaatatgatgttaatgtttgttttatgtgcatgatcatttagga

SEQ ID NO: 32242 - DNA, 1033 bp, Homo sapiens
cagttttggaaacaccccgggactaagactttgaaccttatcaggtttttctgtaggtatttttcatttcctgctgaatgcgctcttacttcattcttctgttctctcaaaatagactgatctgcttcccagagcctggctgtccacactcctagcatatacttcttcctctcaagggttcatccagactgaagctggaatctcttagttctgattgtaaataccagggagaaggattctcaatggttcataataggtcagatgtctgcacctgtggccagcgtaatggcgttctatgcgaaaatgatggctgaaagtatgtcttttgtaacctataggggtaagaaaatggctagaagactggggagacagggtattcatctggtaacctggtggtgttcaccacagttgcctttttgtgtttctttgtggggcctcttactaactccctcttcacgccaatttcaagttcatcaaaacctagtcaaatggtgagtatttatatgtgtggtgttggacagacagatatggctaagtaattctgtactagtatattatgattaagtgaacatttattgagtgcttaccatatactaagccctttttcaagtctaacactaggcaaataatacatgactcttttaatttttgctcacacctttatcacctcttcccaattataacactgtgttttctgtctacctcttacacatcatgttcattgtagtgagtgagaagttatcttgaaggttggttagtgatgttgtgacttttaccttttatgtcctgggtgatggatgggatttttaagagttaatgagtccaaggatgcctgacataggaaagacacgatgttgcgtgtgtccttgcaataacgtgcaaagcaagacgatgggtgtatactgcctatctcttgtccccaagacaaatccattagtgtagaaagctcgtttttttttttgggtccaggtaattgtaatcatgggacacatgataatgtaaaagctaatctgaaattcttttggaactttga

SEQ ID NO: 32243 - DNA, 1033 bp, Homo sapiens
cccacattgatgtctcccatccttgaattcacttcagaccatcagtctccctttcctagtttagtcctatttcgagtaatatattctttttattattagatgctaccattttcaagatgtgccttcatagtaacagtatattttcagggagaagaatgacacacttctgcattattagctaatggaaaacacatgctcaaatatagtgatgttaaagaaaccaagtgagcaaaagcaaggttatgtttttaataagagaatgccttaattgtggataaaccatcccagaaactcttttatttcggtattttaaaaacacttggagaactctttcttatatccggaaagcaccacaaaaatctgtcagatgaaaagtctgttctgatctgtgtggtgcattcctgcctagatatgtagtcatttactactgtgtagtataatttgagtagagtgcagtcctcaactaagttgttagactacattttgtcctttttctgtaacttctgagtagtgtactctaaatttgctctgtagacctgagctgaggtgcaaagtctgtttttgttaacctgtgcacaatggtataaatatagaaattgagacttagaatttagaaatgtaatagtaattggctgagtgtgtaatcctagctccttgggagactgaggtgggaggatcatttgagcccaggagttcaagactgatgtgggcgacagagtgagaccctgtctctaaaaaaataagaaaaagaatttttttttttttttaaggcaaggtcttactctgtcacccagggtgtgtacaccacaatgcccagctaattagaaaaaaaaaatatttcatagagatgaggtctcactaggttgcccaggctaagaaaaagaaatgtaattgcacaagacagttgtctatctgttgagtttaataattaaaagttgggtcttgtattttgtagggtgtgcttgtgttttttctggtcattaatttttattatcttttgatactttgggaaataagaaacagctggtccttt

SEQ ID NO: 32244 - DNA, 1068 bp, Homo sapiens
ttatcttgcttggaatccccacatccctgaaataaagcgggcagcagctaatttacattcttttctttttacatttttttaatttttggggatacagggtctcactctgtcactcagtctggagtacagtggtatgatcacagctcactgcagccttgactttttgagctcaagtgatcctcctgcatcagcctcctgaatagttgggattataggcacccaccaccacactggcctaattattattttttgagacagggtcttgctttgtcacccaggttggagtgcagtggtgtgatcacggctcactgcagcttcaacctcccaggctcaagccagtcctcccaccttggcctcccaagtaacttggactacaggcatgtgccacaacacctagctaattaaacaattttttttttttttgtagagatggggtctcaactttgttgtgcaggctgatcttgaactcctgggctcaagtgatcctcctgcttctgccttgcaaaatgttgagattacaggcatgagccaccatgcccagactatattaactccttaaaggtgggctatggaaataatgttgatactagcccttcagtgatggtgtcagtacgggaagagaaaatttatatacttgagtacattttgagggtagcttcatgaggcactgtgagcaaaggcttctggtaatgagaatactctacctggtcatagacacaccttaacttgattcccaattgtgcatggaattggcattataaaagaccatccctagaaaatgggttatttgatcacaactagaagtcattctctatattttagaaccataaatttatgacttttattaaaaaattgactcatgtcagcattacatgctgagaataagcagacttctgagtgtctgccccactgtgttgcagattgaaatgtagactatgagtggtcattatggttaatgaccaagagagtcctctaatgataaggcatgctggagagctgccccaggagtctgttagaaaggctgatccacattttccagaggggaagtcggccagggagtcctaatat

SEQ ID NO: 32245 - DNA, 1049 bp, Homo sapiens
ggaggaccagaggtcacttgcgttatcatcttggttttggtgggttttggctggcttctttaccgcaacctgtttaatcagcaaggtctttgtgacctgtttcttgtgccgaccaatctgatcctgtaacttagaatgcccaacctcctgggaatgcagcccagtaggtatcagcctcattttacctagcccctattcaagatggagttgctgtggttcaaacacctctgacaaagtgatctgcctgcctctgcctcccaaagtgctggaaccacaggtgtgagccaccgtgcctggccacaagtggacattttgataaatacgtctccatcttatttggggaagttagtagtaaagactgagacacaatggaaagaccttggtttttcctttagatacaaataacattttttttttttttttttttttttttgagacggagtcttgctctttcgcccaggctggagtgcagtggcgctatctcggctcactgcaagctccgcctcccgggttcacgtcattctcctgcctcagccccctgagtagccgggactacaggcgcccgccactgcgcccgactaattttttgtattttcagtagagacagggtttcaccgtgttagccaggatggtctcgatctcctgacctggtgatccacccgcctcggcctcccaaagtgctgggattacaggtgtgagccaacgcgcccggcctagaaatataatttttaatgtgatttgcccttctaggaaagctgtgagatacacaggggaagtattttcctctttggctgataaaggaaactgcaacttggttcaagtgacttgcccaaagtttcataactcttagtaaaagtcaaagaatggattagaccccagaatttctccccagcccactctccattccacaggcctttggtgtaactcagcttcttaccctgaattattaccatggattgatttgctctttgaggcccttttgtttgtgggcatttgttggagttttaaacttttatggcttttgtgccccgaaagggtctcaagttatt

SEQ ID NO: 32246 - DNA, 1050 bp, Homo sapiens
tagataggaaagtttaaaaacttgggaatttagatagatgtggaggtttaagtttagatcctaccagtaagtagactctccccatgtagcacttgtggtatatcttagcactttggagagaaagttgaactcttttcagccttagaaacttggaggcatgtctcatacttcagctgaatgctggacatgttgaatattatactgtgctagggcttgtgaccaacaataaaaagtacatttccttcttttgagggattgtagtcttggtaaaatgaagcagtaaacttggtcaagtctaaatgacgattgagacagaagataacatttgtcagtgaattctgttttgttttcttaagtctgcacctaacaggaacttagcaatttccagccagctagtagtaataacaacagaaatagcaattgacctttaacacctcgtccaacaatgtttagtgggtggttactctgtgttaagcattattctagaatatagggacacaaatgttggacacagcttgcacaggtttattatgcaggtgatgggaaggtttctgatatgacacgtgctctggaccaagggccttgcattttaataagtggagtgaataaaaatttatagccaaatgtcatgttggcagcaatggaagtgtgctccggaggtgacaaatgctttgaggaatatagagtgtctgacagcacaatgtgaagaaatgacagctgccatctttgcctgtctttttctctgtgctgcatttgctttgctcttgtcacctttcttaggctggttactgggcagttggaagagactgtggagaattcaattcagttgtttggcttagggacataaaattgaactgcataattcatggataggtatctgcagcatcgtcttcgtgccctgtagaatgggttgactgccaaaggattttacgattctaaaatcctaacagattttaacagttgcttaaatattatttcttggcatatatagctttttaagtctgtgggtcaaagatagatgtactcatttgagacttagtgatttgtttt

SEQ ID NO: 32247 - DNA, 1122 bp, Homo sapiens
aagtttccatttaaaatatatttaattacatgaaaataaagtggttttaaaaagggtaacgtggaatagtagaagtggtacccatatgtggcaaaagtcaggaggctgggatgcaaatgatggaagttcttttgaacactgaattaaatgatcctcggagtttgtatgtctggtctccattgacaatggatactctgggcagatggaacatttaccaaatagttgcatctgttttgaaggtactcagtggaaaaccatttatactctacatctgtttcttggctaagaaaaatatatgcagtagattctggccacttaggaaagttttagagcaaggctaattatgccttggggctttggcgaatgtgcttgtctttatgaaagagtccttggcatcatcagtacctagaagtagatatgcatatgcatatagtttccgggagagtttcttattgaaattctttccatttcttgtgtggcctggacatccacaaaaaggggactgtgtatctgttggacttgggggtggcttcctaaggctgttgaacataaaaaaggggcatcctcagggaatcccctgaaagtgaacctaggatatgcctgaggatttgcatgattcctggggattctggtcagggagacaaaggtgtgcagctgctcaaaaaatctgtctgagtggagttagtgctaaacaacctgaagtttggagaggagtggaagttaagggcgatagccctgccttgaaaagagaaccacatactcaccggtgataacttgtggacagttcatggagctatgagaatgggagcaaatgaaagagatggtggttccccccgcccccgcactacccccaagatgtataaaaggatatacctttctttctatctcaataagaaaggaaccagtgactcatgccctgttctatgaagtgttcttctctctatgactcattcactctctgacccacagatataagtccctgtttggagtgtcaaggtgatttcagatgacctttctttctcctttgtagggtctgattttgatatcagtagggaggtgatactcccacagttagggctgccatacctcagcaggtgagtggtttggcttctctcaagtctt

SEQ ID NO: 32248 - DNA, 1049 bp, Homo sapiens
tggtgatgcaaaaatcatctttctttattattttattttatttttaatttttatctatttattattttgagattgggttatgagactgtctaatttttgtatttttggtagagaggggattttgccatgttgcccaggctggtcttgaactcctaggctcgaacgatccgcccacctccaccttccaaagtgctgggattacaggcttgagccactgtgcccggcctaaaaaccatctttcaattcagacttgggtaataaggcattctagaaagtattttcttaaattttatgccttatataaaatgtcgaagaccccagcatttcaatatgctggtatgaagactagaaatgacagattattttgtggtctaaattctttttcctttaagtttggcctgtgctccataaagagacagacataattttggaaattcgctttcttggcactgatgtgtttgctgagtcaagtcttgaatttttagaatgaaaacgaactattgccatgagttgaaagttgggcaggaagaacatttcaatcatttttgggttaggaagaaaatccaagttgacatttctcatggatatttactgtttttttttttttaaatagctatttcccttttaatctttgcaacataatatgaatgatttgaataagtttttgcagctgtacaaaaataaccctgcctatggtactatgttaatttgttactggctttgcaatttagaagatttgattatttcaaactccacagcctctatgatgtcctccaatgatccctgccttcttgtatttacaccttcgtgcagtctgttcccaggtctgtgagaccaatagcctaatgatggcgtttcacttccaggataaggttataaaaatctgccttctgtcctagtcatcctttctatttccctctctcttggatctcttgctctgggagaagctatgctgtgagcagtgctgtggagaggcgcacacagtgaggaactgaagccccctgctgacagccatgcgaatgagcttggaagagtatcctttggaccag

SEQ ID NO: 32249 - DNA, 1047 bp, Homo sapiens
cagcgggcagagggagcagtgccaacaattcaccgaggcggcaaagaacgtggcaggtttgaggaagaactagcagatgaatgtggctcaagtcgggcacaaacaggagatggaggcctgtagggcctttcaggtcatggagatgaggtttcttttttttttttatttggtagtggcaggaggatggagtctcactctatcatccaggctggagtgcagtggtgtgatctcggctcactgcaacctctgccacccgggttcaagtgattcttgtgcctcagcctcctgagtatctgggactacaggtgtgtgccaccatgcccagctcatttttgtatttttagtagagacgaggtttcactatgttggccgggttggtggtgaacttgtggcctcaggtgatccacctgccttggcctcccaaagtgctgggattacaggcatgaaccaccgcgcccggccgagttttgattttattataagggtggcaggtccagctgagcggtggcgtgatctggtttcgaatacgctgttctgggacactgaaagcatacttacctgtacctaagtgtgttttcaggatgaagtcaagtggagtcctcgtaggttgagggtgacagtgacaacaaagtgatgatgttgacaacctttcacatatgccactgcgggatggtggtggggccaaaggattagactccatgatgacctatggtctcctttccaatgttgagatgcctaaagcacaagttagatggaaagaaaacctataacatcacaatcatttataagtaggtattgagcatcactaaaaagcccagggtgctttaattgacattttggtttcctggaattgggatttgaaagattacctgctgagatggtttccatttcttgttaacttgtaatatgtgcacaatttctgcttgaaaatacctgtaagagacaccactgagagtgaagctgtcatttgaggatgccttctacctgttgtaccttttgaacaaagcaagtgtgaaagcatgtaatttgaattagggcaggtaataa

SEQ ID NO: 32250 - DNA, 1023 bp, Homo sapiens
actgcacctggccgggaaattaaatttctaattctatttcattttaattcatttaattgtaattatttagatttaagtagaataaacattggacggggtaagctctacagcacatatataatctgtggctgtgcttgcactaataagcgagcattccaactctcaggccagggcctcttccacaataccaaacattaggggacctgtgtactaactagttctcttatatatacccatcatttaaccagtctgcacctcagctactgataagcaactctgtgctaagtcacaatgacttctctatcttgcctttttttttttttttgagatggagtctcagtctcttgcccaggctggagtacacagtagggcgatcttggctcgctgcaaccttcacctcctgggttcaagcgattctcctgcctcagcctctcgagtagctgggattataggcgtgcaccaccatgtgtggctaatttttgtatttgtagtagagacggtgtttcaccatgttggccaggctggtcttgaactcctgacctcaggtaatctgttcaccttggcctgccaaaatgctgggattataggcgtgagctaccacacccagccattacctgtttatttttcatatacctatgtgctatatttcaaatgatctccaaaagtatggcttagagaggctaagtaatttgtccagtgtcacacagctaataaggggcatgacccagaatttaaaacacctaactttttggccccagctttttaaaagctggaccttaaagccaccactgtttgcttgtataattaatcccaccactgttcacttgtcccaccctcatccagatgtgtcggttgcccagggacaaggccatgtgctgaaggccatgtgctcagcagcttttccgggaatgatggtcagtttgtagtgacccactctagaggccagttcctctttaatcacccgcacatactttcaagatgactctctggagtccagggtgctgcttaatattggaatattgc

SEQ ID NO: 32251 - DNA, 1097 bp, Homo sapiens
ttgcatttgttatttatgtttttgcttatctcagcacctttatggaaatgtgtttcttgttgtctgtcttcaccagggagaagccaaggctgagtgactcatcagaggatcacggttccttccgagttttctagagcctgcagtatgggcaagagttgagggtcagtggggaacagacaatgtttttgtccccgagaaacttatatgtggatggaggagctttctgtctaagaactccatgcccctcaggtttagcacctgaccacttaaccctttgtttctttcccatggttaagggaaacaatgagttaatttcctctctgcaaatgactggtctttgtggaggacagaggaaagaggaatggagccagtgattgaagtttgttcattcattgatgtgtgtaagttacagtcagctgttggctagatagcctcagtgaaacccacttcatgtgcctagagagtcccctcctgttgaaggtacacagggcttgtgcaccactttaagagtgtggtagaagtgatgatactgtgattccagctaagcaatttgagccagcacccagctgtctgagccattctagctgggaccccagatggttcaccccaacagatagctcagggagctgagacagaagatactgcattccctgttcacattctaaatgcacagagttgtaagagagatgaaatggtggttggttgttctaagccactaagttttgggtagtctgatataaaacagtagataattgaaacagatacattcaagaagtctttagtcagcacccagggtggaccgactgggttgcctgtctacctcagggggtgcttagcatatgaggaggggagatactaataagcatttctaagttgaaagtattttgaaaagggcactgagtctctcactctttgctgtgttctagagcattgcatcttggaaccactcactttcatgctttagtcatttaccagtgtttttttttttttttttgagatggagtcttgctttgtcgcccaggctggagtgcagtggtgtgatctcggctcattgcaacctctgctttccaggttcaagtgattctcatgcctcagtc

SEQ ID NO: 32252 - DNA, 1047 bp, Homo sapiens
atgatttgttgtcagttagggttagaactggccttaaggggaaggtagtatttgtctgtaggatatttatagagatggggtggaatgttattctaagtggaggcaacagtgggagcaaaggcctggaggcaggaaaattccaagtgtaccatggacccagagtgtcttaagttaacatttaagaaaatgacggaatgagatagcatgtgtcctttaccagcctggcagaatttcacaagtgtttattaactcttggtcttgaaatgatttgataaggcctctttggagagtattgagaagaacctattaaaaatggtaacattttgacctagcctttctaccactagaaacctattctttggaaatactcaaactcataaaagatatatgtggggctgtgttctctatatagcattgcttgtaaagacaaaaatttcaagttggcttatatgtgttgtgggtggttgaaaaattatatggtatctccctacagtggcttattctgtagtcagttaaaaaagtgaggtggatctctgtcctgacatgtaaacagatgatgatatattaaataaaaaagtaagagacagcatctataggatgatcccattgttatatcacagctactgctgacctggttgggtatgcttgtgtgtgccttaaaaataaaaaaagatctggaacaacaaggatatgttccctgtggctacctctgagaagggtgaccatatgtctcggtttgtttgggaaatatctggtttacacctgttgttctggtataattattaatagtaccctctttcagtgtttggtgaactgctttggatggtgaattatgtgtttaccctaccttcctctgaggattggaattggggcaagagaaatgggaaatgggctgtgacataggtgactcgttggtgtagtttacagcaagcaggtattatttttatgagggaaattgaggaagatggccctgatacattatgtagtggttcactgcggagccaccattgcatggtctttatcaggggagaagttaccttttttctt

SEQ ID NO: 32253 - DNA, 1013 bp, Homo sapiens
ttttatcttcccactccccttggaagcaggtggagtcagattttcttgatgtcctgacctcctccattctgcttttctttcttgctcagttttgcctgactttccctgggtctctccggagcaccacttacccaaagtctccagctccggtgctggggcacatattgccagagtagagccttgccagcaacgtgtcctcgtcgcttctttgcaaagggtgtgtgtattggtcagctgttcttcggtcccgccatcagctttgacccagtcgacccttccacctttctggcttggaggctgtatgctcagtaattatgtgcacaggatttgaatttcatgtagtccgggttcaaatctggtcctgctgcttccttgctatgtggccttgggtacatgtttttacttctgtgaagtagcagtaataagagcacatatcttatatgattgctacagggattcaatgaaatgatgcagtcaactctcggcatggaacacagagcaaaggcaacactgaatgactgatagttattaccatattaattttgtcagttttcctcctttgaatctgatcacttgattctaggcttgtggaggcgctgaatagacttcgtaattgactcaaaacacttctgttttaacactctgggtttttatcttctttcctggcaccactacctcctttgagattttatagagctgaatttgttggaccaaattatatggagcatatttgatagaaacacattctaagtatactgtctttatgtcctcatgttatttcctttcgatttcttgaagtctcaatttagtcaccactctgtaggaagctacaaatgatgatagagcaattaagtgatccctgagtctttagtgttctagaatgattgatgtacagatagaaagagagaaaatgcgtatagacattttccaataaactttatgtcagggtagtttcctggtttggtcaatttttctttctgttgattattccagtgtagatgggataaaaatta

SEQ ID NO: 32254 - DNA, 1028 bp, Homo sapiens
gaaagggaactccggtggaaagacagcattgactaatagaactttctgtgatgatggaatattctttatctacactgtgcaatattttattccctagccacatgtggcaattgtgtacctgtaatgtggctgaggaactgaattttacattgtactgacacacagtttaaatctatctgcttgtggctagtgtctaccgtattgaatggcacagaagacagtgcctccacaaatagtgaggacagttacagatctttggtgtcacatccagctgctccaagacacggttggagtgatacgttgggttgatgcttcttaactttgaaagcttggggtagatcatgttttagtgtcctttggcctttttctttttaatcggtacatttaccgatgacagttttcttaagctcagcatatggtagtgcgctcattgtcccaggtgaagtaggttaggggtgatgttttctcctgttgactgctctgtctccagcacctgtaatgagtgaatataatggatgactgaaaagtgatttcaacttgagtattttatgcagggtgggagactctgtgttaccccgaggttgtatagttaaactgttgtatcacttgatgcttttggttataattaatttaaaaaatgcaactcaaatggcttaggtagcaaaggagatgaactgatgcatataacttagaatttcagaaggatggagcttcaggtatggctcaatcagcgtatgggtccaatttctctgtaatttgcttcagagctgccgatagtctgtattgactacctgtgaagatacaacctacatatctgtaatggacagccttgattctctcagagctgctgttttcaccctcctcctgtcttgagcctcaaaatggctcttctttttgagatagagtctcgctctgtcaccgaggctggagtgtaatgatgtgattttggctcattgcaacctccaggttcaagcgattctcctacctctgcttcccaagtagctgggattgtaggcgtgcaccaccat

SEQ ID NO: 32255 - DNA, 1033 bp, Homo sapiens
cgcccaccttggcctcccaaagtgctgggattacaggcgtgagccaccgcgcccggctggatactgagtagtattttaaaggacaattagggagtggtggggactaggattacctggaagggcttattctgttcaatgggaaaagctgccattctgctttggcctcttgctgccatgtaggaacattggcccggtgtttctagtgtagatttttcaggttttcaagagaaccagaagcctgttctttttttttttttttttttttttaatgaactttgccagttttaaagcactggttcaaagttttcttttttttaaaaaaagggtgaaccaaacaaaacacatctgggagccatatttggtcctcagatgacaagcttgcaatgccttgtttatatatttgtctctcacttggtttctctcatacttcatctctccaaaagcagtaattgcattactctttctgtattctcagggcccaggatactgaccaactcacaaaaagggtcaggaaatgtgtgttgaaatgaatagtacattttggaagtggtctactttggcattatagtccatgtaggtttatttgaggcccagctggtgacagctttccaattcaagttatgaagagctggggagagagcatattttgacagctgatcataattcttggaatattttgtcccagggccctggtctgccgggtcttagaactgggtgcaaagtcacatcttgaaattgatgttcacgtgaatttgagttcttagtacaggaatagaatctattctctgccctgaagtgatttgattgtgaaatgtgtagctttaccaacaagaacgaatgaagtttatgtataccatttagggaggttttaaatttggcaggaaagttcctaataatacaacttgtttggacttttctatagataaattgggaccctaacctttaccccaggagtggacagtgtcagaacatgattaacctctaagaccggtagtcatctgtttttcagtgccagcattacatggtagaattt

SEQ ID NO: 32256 - DNA, 1071 bp, Homo sapiens
agaaagaaatgtgtctaccccatagcctggagccctcatgtcaatgtagagacaccggtcttaggctggcccttttgctgccagagagacatgcttggtgaccccacggaagatagtccgataaataaaaaatggtttcccaaagtgtttcctgccaaaaaacggtgtgctgctatatattttcaagcaattctgcttaattgccgccatctcctcttctctctgatcagtctcaccaacactgtccattctttcctcccgtgtgccctctctctatcctccatgcacttcattatttcaaagagtcacaatggtgccttgtaactatagttttgcccaactgtctcccatactagattatgtgtttcttgaaggcaacatccttattttatggatctttgtagtctctgccctctgtaggtactcaggaatatctgttgaattgaattctttttgagggtaatgagtaggcaaaattaaaaaaaaaattgtctgagatcttgttggctagaaaatccatgtcttatttttaaagcatattaaatatacttagccatatgtctgacttttccgtgatgatttaagatggttgtctgccagttgttgtagcattttgaactatagagaaaaatattgaattaattatgttgaaggtcttagagggcctttattctggccagatgtgtgcatctgcttgcgcctgttgcttatgtaatgtggccgtggaaggtaccaccttggcctggtttaaatagtattttaccacctggattcttggccaagcgttagaatttacatctgatagggagagcatgttcatttcctcctccatctatcagcctgtttaagtctgtgtgagttagttaagaattcagaactcaagatcaagttgttaaaaaaaaaaaagctttctccggtgttgcagcatgtgtttttttaacattttattttataaaaagcgtaggcatctagattttggtttctaatcttttaaaaacttaaatagtatcgtgaccttatatgactatcaatcactatctaaaattggtctgtgattccacagcttatgta

SEQ ID NO: 32257 - DNA, 1076 bp, Homo sapiens
tggccatctttgattttgtttgtcttttgaattttagccgtcctagtatatgcttcggaaaaatgtaattaaggaaactttgatacaggatataagatgtcgctagtatgtattaagatcttgccttagaatataataggtgcttggctaagctgatgcttcgtgggcattctctttttcagtccttacaattggactcagatgttagaagctgaggttcagagaatttgggtaacttttccaagggtcataccacagtggcagtagagctgcaacccagctctgtctgattccaaagcctgtgctcccaattcctgggacagtaggtctccaagtgaggtcctcagaccagtggcattagtatagtaacctgggaactggttagaaatccagattcctgggccccaccttagttctaccaattcagaagctttgcgggggatggggttggggttggggggtggggtaacaaccatggggtgttttaataaaccctcaagggattctgatgggcttattaagggattcaagggttcagttttaagaactactgtactagggtatagaccaaaattgagaagatgacatcagatgagacaggtgacctgggttctagaataagctctgccagtcacattcttggagcctacatttctctatgccaaaaataagtgggtgagcctcttcaggttatttgtgctcgtgaaatcctttgtttccatgaatcacccagactccaaaggtttaaaatggtatgattgtagtttcccaaagtggtgtattacaggtcatgcttacatatttttgcaggtgaattttgtggtttttcaaattacccaggaactgtaactatccctctactttttgtgtatgtgtggcagtgtggagataataaaagagatacaatttaaaagccaaaccaaaccaccaccagacccttcccctcactgtaatgagggaaattgtgatcacatatggttgaatatagttctttgtgtggttttttgttttggtattgttttgattcattggaatgtatgacaataactctcattttaaaacacagggccttgtct

SEQ ID NO: 32258 - DNA, 1024 bp, Homo sapiens
tttcagttcaatgggtgtaagttgatgggtgggagaaccaaatgggatctgctgtagcaaggtccctggggttaggtagtctcatggggatgggacattgggtcgtctttgcaaggagttaatggaagctgtttgttgaagacccaaaggggagggtgaccctaaaggaagtgaacgggttgggaggttggttgacacagcccagtcctgcctttggagaggttgaccctgcctggcggaggctgtttatcccgccactgggctgctcttgttttttatccagtctccacctgaataaacagatctggaacgtcatctgcagccaggctgagaatctgccaaaattccccagggaactggtgattcaccagcagcaggggaagagagagggaacaagcaagagagagagacctgcttattctgattctcatttcctgtccagcaaataacccaggctgggctgtttcttacgagacagcagttctttgagtaaatgatcaatttctgcaatagaacaaatgattttgattttaatttttaagaagatggatgtaaagcaggctagagggaaatggtttcaactgtcattctgagaagggagacttttattcaagttggattaggaaagctcttccgcattcacttgttcttgaaaaatgtctcatcttaattttcaagttctgtatgggcattggtcctggcacaagtgcattatcgtaagctgtggactttagcatcaacattatttcttgccaattttgagacttagaattattcttttttttttgtgatcattaggccctcacttattttaaaaaattctactggacacctgaagaagattagattgagcttggccatgttcggtggccccaggctatattcctaatgtgttttttggggaggggtcagaaaggggacatatgagggcagtggcatctgagaatgtggtcaaatgaagcagcatgaaacagggcacttggagctaatggttttcagattcatttcaaccctgggggacttg

SEQ ID NO: 32259 - DNA, 1031 bp, Homo sapiens
ttattaatgtctgggtttaactcaaatttatttgtaattaattaatggtccaacctagcttacatttaatcataataaatcaaaatattttaaaggaacatttaggcagaagacaagatctatggagcagtcaaacacacctactaaaaatgtgaatttgtaaacactgactcatctggtctttttgatgattacttgtagaaaatgcattaattaaaatgaatagtgttgctttcttaatggcaaattattttttcatggacatgaaactttgccggaagacaagttgcactgggagaaaacatgtttctgtttctatgaattcatcagtcatttcagctcctgttcctatgagaactactcagtatgcagttactaaaaagctatgtagagcaggtgctgaagacattaaatggaaaggaagtcagggaacgattacactgtggagcaaacaaggttgcaatggagactagctgaatagaacaatataatgtactgtctttcagaaacattgcacagactttgaacaccctcatgagaaggaaccaatttgagctctttgctcaatccagtaaacactgttaggaattacgatttcctcaccaaccaaatcccaattttctgaagaaagatttagatctcaggcctcttttgacttgatatatttgtaaggtctattttattttcctttattttgccattgcttagaatgagaaaacatatcacaactactgatgtcaaatactatcaatgtcaaacatctttcatccagggctgagtttcctgctgtctttgggctcctccccttggatggtggcttgtcataggtgatattttccaagtgaagaagtatatcgcataatgagatcttgtaacacaggtatattttttccaaccagcctcccttcaggcggtagacttactctacataaaattagatcatcaccaaattaaagacgctctgattttcctggtcatattaaggcatcatttctcaaccctcatttcgttctcccaaataggaagtctca

SEQ ID NO: 32260 - DNA, 1060 bp, Homo sapiens
agcggactccccattacttcagccattgacctggaggatgcagccaagaaggctgtggccagtgtggccaagaagtgatgtctttgtcctgatccaatggagaaagaaagccatttttccgtaaaaagggatggttcatcattgtgaaagaaatggttatctcattggggaagaaaaggggagggggaaggcaagaatcactgaaaaatcttaaatctgtgttttctggaataagatatctagacagcctaaatctgattttggtctttataaaaataatatcttgtgttctcatacttttctgtcactgtaagcctgcccagtaggcagtgttttgcagactttggggagtggtctatgtggccaaatattgtgtgtatagacagaatttgaaatcaagtcctgcttcatttacaagaattttggtgggcatctaatcctacataatgaaaaagaaaaacagaccatttaaaaactcagacaagattatatttaatatattaattactaaaaaggcataagattacactgaacatattagctactaaaaaggcactgctaagacattcaagcaaatagctattacacactactgcagattttacaggtttctaattctaacatatgtttgaaaaatccgtgagtattccaaaatatatttaataatggaatatctgcattaatataccatccatgtgtttttaccatttgccttaatattgaatatactgtttacctcacactaaaaagaaaaccagaagccttatttgtgattttgggagtggaagcttccatttttgtgtcaaaaatgaatcctgattcttatggaaatctctgttattaagatatttcaagatgagacaacactgaagatcaaattgtgtttagtatcactatcttctctcctcgtttctctcttactcctcatcctcccagaatctaccagtttatggtagaaagatgggaaccttatttgaatgtgttttttttttccatgatgtccaattttgttgtgggaaaggatttggataaaatttttgtttaaattttggtagatttt

SEQ ID NO: 32261 - DNA, 1044 bp, Homo sapiens
caggcatgagccaccacgcccggcccattttcttacatgttgtagtgtgattaggacaatgttcctatttttaggagatgcatttgggagtgaagtgtcatgatgtaggccactcagtatgaaatgcttcaacaactatccatctatctatatatgtatagctacatatatctctatagagatagatatagagaggaagagagggagaaagcaaatatggcaaatcgttaaatactactaaaggtaggtagaggatacatgggtaggctgtataattatttcaccttctattttttttttatatatttgatgtttttcttagtttgaaaggtaaaaaagtattgccttgtaaccaccagtgcgaccacaaccctatcctttactctgttcctggatctcaaaccaatttttcatattatttattcaacaattactctatataccagctactgttccaaatcctggagatatataaatgggtaagatgtcgtccctcgtccctgtacttaaagagctcatgatttagaatgtttcttttgcaatttttgtgcagctctgtcaacttcttatccaacattgggaatgaacataaaaatttacatccacttaggcctaagaatattttaagcaatttatattgatataaggctgtcatcagtcagcctattaacttctaattttcttgaaaagttttatgtaagaacaataggcagtaatggaatatttaagccatttgcacacacatacacacacacaaaatgcacgacaacgacaaccttgggggtttgcccaagtacatcgtggcattctggttatatctagatatatttctggcatacacagctagaattatgtttcaactggatggtcacatttgtaactgatacacatgtgaccagtgaacacagtagttttcaagaggcattgccttcttgggagccaaaggcttgatgtggcccctctattaaggaatatcaagagtttcccactacttgaaaataactgcattggaagattgttttcttacttcctgatttgtagcct

SEQ ID NO: 32262 - DNA, 1035 bp, Homo sapiens
aagtcatccataattccttagctcagaaataacaactattaaaatttgacttatctacttccagtattttcttttcatttctgtataaatgcatatttttaaaaattaaagtctagatcatactgttttttccacttaataacatactgaagtcattttatgacatcattaaatatttttctgaaacaagatttttagtggccattttattttccattatatgattacacccttatacttttagtcatttccccatgtttaagatacttagctgccttcctgtctttttgctgtcaccatcatcttagatacgtttagtagtatacatttataaatggaatttgaagtatatcattatccccactccagcccgccttggagacatgggactacattgaatgtttgtttttttaaccctacacctacaagttggaagaattttattttttgctatccttccctaaaatagtcctctggtgaccatttagttaattaagattgattggcttctgtcatctgctgaacaatgcattttgctaaatgatcccaaatattaaataaaaacctattaacaagtataatagatatttagacattaacagatggcttcagagggtctgcatataattaaagtaaataaatctaagtgtaatagtgacagttgggtaaaaataaattattttcatcaagaatatttcattataagataacccagaaaacagccattgtgataaaatgtaaaaattatagagtaaaatccagtatatcatgtaatatgtctatgattaccagattcctaatctagatctaacacatgacactttgtggttgctacagacttcattcacatccagcatgaaaggaaacatggtcttgttttttaaaaaaatattttttaatgtacaagtcagtagtaaaatatggacatgtgaattttttagacatcaccttttccatgtatagaataaatgaacatcactgtgttaacaatgcctcaaattagagtccaagaaagaagttgtttgcttgttccta

SEQ ID NO: 32263 - DNA, 1032 bp, Homo sapiens
tccatttggagctttaacccttgaccttctaggtttcacttgctcgttaatcccaagtagcacatttctctgagagggagacaaaagtgacttagaatcttccgtgtgtcattatgatccaagagtcttggcatttgggtagcaggtgtgagagaaaacaccaaaatcacctcatatttagatgatttctgatattttctgtgttttataacctgtgatcagtagttgcatttcatgagtggagccttcttctccattaagctgaacgaccaaatagttaatccaaatgctgacagtgctgaccaaattccaaagaatagatatttggtattcaaataagaagggtgaatgaagctaaagtaaaaaaatacaaaagtatagaaacatgaagagaacttatactgaaagaacaaattctttgattcagtttttctatacaggtacttccttaaaggcactgccaattgaaagttgcaccaatttatcctacagtgtgaaataccttaaataaggtataggacggaaagtgaagccccatcagcatactatatttctcttctagtggttacagcttggtatttctgcatccagcctgcaatcaacaattctttcttccttccctccctccctctcttccttccttccttccttccttccttcttattgagatagtctcactctgtcactcaggctggagtgcagtggcatgatcttggctcactgcaacctccacctcccaggttcgagggattctcctgcctcagccttctgagtagctgggactacaggagagtgccaccatgcccagctaatttttgtattttttagtagacacagggcttcgccttgttggccaggctggtctcaaactcctgacctcaggtggtccgcccgcctcggcctcacaaagtgctgggattacaggcgtgagccaccacgccctgccaacaattatttcttgagcacctactatgtgtcaagttaggagctaatcgagaaagtaggaaaccatccgatatttgatgctattgg

SEQ ID NO: 32264 - DNA, 1025 bp, Homo sapiens
tgtactgttaatatctcaaattaaaataacagccacttctctagggtatttcttaagtgacacagtttcttgaggaaggacaaaaaagaagattaaagtgggaaggttccttgaggcaaacgaaatacctgtcactcgaacaagttaatgggatcaaaattaaggaggtgaaaatgggcattgtgtgcaccatgagagcagaactctcaaagctctgcaaactcactccctgggctgtaagagcctgaaaatgaagccatttgattcgtgtagcaagtttgtatagatttccaagtagaaatcagcttaatgctgaattaatttgactttcccactaatgtggtaggtgatggttgctgaagccttggatatttccagagaaacctacctggcaattctgatggaccggtcctgcaatggccccgtgctggtgggcagcccccaggggggcgtcgacattgaagaggtggctgcttcaaacccggagctcatttttaaggtatgtttaaattccgggctacctgctattaattgattgttattgtagaagctgttaaatatttaatggggagtctaaggccaggagcactaaatctgtctctacaatttaaggtaagaagatgctgagccctttttctttctgggtatccagttgaaagttgggtggaatcaaggtattcagtgttcaaggactttttatctttgcttttcccacccttccttctttacttcttcctgccttttcttcctccctgattcctttccatccaatcttcctcaagaattaaccaatgggagaggactgctatattttcatttcttatggttaactctctttcatttaatattatatatgatccggaaattctctcctaggagatgaatgaattctcttttagcagatgtgaactagaaactgtcttgagttctctcagtactcttgatgtaaactagaatctttatgaagtctagattctatcagtttttttcaatccttgaaatcttgactcatttattgatattaa

SEQ ID NO: 32265 - DNA, 1049 bp, Homo sapiens
acagccaagggactgattgttattttgcaaactagtgttctgcaagcctaaggtcactcttggtagaatcagtgacagtgatttttcaggggtgcccaaacttgcctgtgcatcaaaaccctctgtggaactcttagaaacactgaactctgaatctaattcctgggattttgattcatttgctttggatttctcaattattaagatgcactacaagtgattctgatgccgctcagccatggaccatggaaaccactgatttcagtgatatatcatacagctctatatatttaaatgataaagactacagctagtttgtgttcagtttccctaatgtggttcctaaccttataacagaataaagtaagttcaaataaaaacatgaggtctgcaacttcatttggtaagcccagaaatagtgaacaaataatttgatgtcatctgtgctttttatgaaatttgttagtttatgggtctgtctccttgggctcagtgagggcactggctgttttattcaccttggtggtcaggacgtggtaggaattcaataaatgtttatggaatataaatttgaatatgaaaaggagcaaaaaggttattctcttcattagaaacatcagaacgatctctgttcatctcaaattgatgctaagagccatgttacgtctatgtaatatgtgatattagtatttcttaaaatgtcacctgagtattgtagaggtagagttgcatgcatttgatactaggaaggagattcttcctatcctttattcctcttccagtgagggagaagtctgcaaacattaagttatacttaaaagaaacatgtctagaattctagttgggagattcattgaccagacttttggaataaacactagtcatcatgctagcgacaggtggtcttgtgcatggtagaaaggcagtccaagcctatgtctctgaaacctgctctcatttctgttttctactttacgatttatgttatctcatactccccatgttgcctgttctccagtttttttacttgtgttatttccattcttcta

SEQ ID NO: 32266 - DNA, 1029 bp, Homo sapiens
ttttatttagtaactcatgtccattttggtgaatgtagagtttatacctgtggcgttttgtttctaactagtttcactaatacagtttgccatgctgacatatttccttctctgttttggtagattactttgcaggttgctgaaagtctaagtcaaggtaaagtgtgaggtaaagatcagagtgagtactattaatagcgaggggaggggggaaagctagtgagccctgtagatcagctcaacaaagtgtatatgctggaatccagtactttggagataatcttccaagtggaatgcagtccaaaaaatggacactattacttcctgtgctggcagccgctctgtttacagaaggaaagagtatgttcgattggtcaaattacattgctgttgcagatacacttgatttttctagtaggaaaaattataatattcttaatgtttttctctttttatccctctccctctattctttcacagatatcacttaattggcaaaagagagcttcagggacaactagtacttcttttctttttcttttttctttttttttttttttttttgagacagagtctcactctgttgtccaggctggagtgcagcagcgagatctccgctcactgcaagctcgcctctcgggttcacgccattctcctgcctcagcctcctgagtagctgggactacgggcacctgccatcactcccagctaattttttttgtatttttagtaaagacggggtttcaccgtgttaaccaggatggtctcgatctcctgaccttgtgatctgcccgccttggcctcccaaagtgctgggattacagacatgagccaccgcgcccggccaactagtagtacttcttttctagcatatgctaaagttcagttgcaggctccttaagaagttaagtgagccccattcagcctaaaagggagcatattgtacattgtgttctgtactttgccattttttcactgaacaatattttagaggtcagtgtatagggaacagcttcattcttttcaaac

SEQ ID NO: 32267 - DNA, 1022 bp, Homo sapiens
atcttggaagaaatgccagctctttttcaacattcatttgtcacttttaaggtttcactgaattagccaggctgaatgcagaacgaaaagaaatgccacggttattatgctgactgcagacgcaatatgggaattctgtatgataggccctcactcatgtcttaatactttatttattccaatgtgcttagcaagccagcttggccttgtttgtctccaggtagatcagacggctagaaacagtcctacctattttcatttgggaagcttaaatatttttaagatgagtgataatgccaggcaaacagagccgagtgtcaccagttctgtctcagcctctcagtcaccgagggaagctaggagacgtaatcatttttagctcagttccccattctgtaaaatgagttttatgacattttcttccctagttcactggaatagcattagaaaaatgaatggatgtggtgactgtttattggatgacatttgctgaatgtggctttttggtgttcaagactggatacattaataacagttttaattgttatctataacatggctgtctgatagtgatgatgatgatgaggaggagcaggaggaggatagtcgtggtggtgatgggtgaacagtaacagtaaatgggaggcagcttagggtactgactaagcccataggagtcagactatcttggttgagatccctttcatgtcaattactacttgtgtgaccttgaacaagttacttaaatctctgaacatagtaaatgtcacatttggaattggaacctccacctgtcccagtctgtgttcctaaccaccatactgtgctgctttaagccaaaagcaacgaactttggtctagagcatttcaaaaggtcatccaacagaacatataaaaatagaagaagccagcaacatccttaatcttctttatttagaatacttactttacttacttttaaaaaataccccataggatcatgaacatcagaccaattgggaagggtagattaattgactgcc

SEQ ID NO: 32268 - DNA, 1102 bp, Homo sapiens
atcaaagatttgaggtgagggaacacttaaagaattggcagtagccacagcatgaaccaacggccaactggacatgactttcactgtgtgcttagcacaaactactgccctcagcgtttcaagaatgctggagaaattgtgaaatgtcattgcctttgcagagtgggctttgggggatggtgttggaggatggagtttcctggtattctgggttcagactttgaccagtgtactgagtatggtcagcttttaccctttctagaaatgattccaaaagaataggacttaggcagtagccataaatgcatagatttctaacatttacctttgaattttatttttattttaaaattcgagggatttgacataatatatgaattgttaatggagacatggcaaagcacaaggcatggtttgtgtaagtttgggtcctgtgggttggagtggggggactagcatcttttttctgctcccatccatttctccctgtgcttgctgtatttccatttgtgggctgtcttagtcccagagttgtgacttgagagccctaaggaggttcaggagggctgccttgtagagtttacggtgagaaatgaggccagagacaagagcaaggacaagatcgctgatcctggtaggcctggtaatgaagctaagcttgttcttgaggagggcaatagggagccattgaagggttttagacagtgaagtggcaagggcagtttaatgcgtagagtactctttctggatatagtgtggagagggttggagaaatgcaagaatggagatcatttgggcgactttggcatcgattcaatgctgtgagtcattatgccaggatactagacgtacaccgtgagtggaatcagactgcccgggtttaactcttgccttcagcactccatagctttgtgatcttgtgacaattacttatatttctttgtaagataccttttttttttctttttcacatttcagtgtctctgaaagctgaatttatttatttttatttatattttttcagacagagtctcactctcttgcccaggcttgagtgcagtggtgagatcttggctcactgcaccctccatcttccaggttc

SEQ ID NO: 32269 - DNA, 1052 bp, Homo sapiens
aggctggtctcgaactctgggttcaagaaatcctcccaccttgcctcccaaagtgctgggattacaggtgtgagccaccacgcatggccctgaactttctctttttaggaataccaaagttttcaactttttcagctttagaatttgtaaatatttttgtagaatatcatatgactgtaattccagagtgttccaacttgtttatgatatatttgggtaaatttacaactgttcttttatttgccataatctggttataacactgtttgtggtaggaaaggaaaacatgcaaaacatacacacacacacacacacacacacacacacgcagagttgtgattctcagtaccaagctataggaccatgttatagatcagcgtttagtcacctccaggttatatgcatcgagaacctgaataaatcatgccactatattaatttatattacatgtttcatatttaaatcatgttttcctaaaatgtagcaactacatgtgataaaagcaaattagaacattctgtaggactgtcttgcataccttctgtctggtttccactgattccttcttagccatggagagcatttgtgattaattaatttatatatgaaataatggtttccattttatgcgagtatttgtaactgcatataccagtgcgtgtgcgtctacctctgtcagcatgaaagtattccagtctttaatttcaaaaacttcaaattagcctcatgaagagaatttttccctgtgaaaagtaagaccaagaaaaaacaaactaaagacatgtgacttattcaatgaaagtgaaaaagaagctctaaaacagtgtcattgattaaaaagaatatctggaatgtagccccactctttgagtgggattcatttcttactgcttatgaactttcaatttagtagtcagaaaccatggatttattttactgcacaatgtgaagtttacattttattaacacttgagtagtctgatttagagactagttacttctattttttaaaataatggagtaacaaattacagaatagctaaataatttt

SEQ ID NO: 32270 - DNA, 1055 bp, Homo sapiens
aagttttcatcttacatctttatttttgagtccttatcacttcaaaattctgttatgcttattagtatgtcaatttgaaaggaatattttcttacattaacatgtatcttcacctcctttgcagatagatgtgccaaaaaaactaaatgttatggtttttcttgtatcagaatttgtttttacatgtttacattatttgtagcaaatattaaatgataatttaagattttaattattggtgcttttctgttattagtattttcattcatatataaggagtatatatccttatattgcttcagtttgttttctgcttatgttatttttgagatctcctattgatagctatatttcacatgaacgagaaagagaaatgtctaaggaacaaaagcattgcttaggagggacagattgcttctacctaatacatgtgaaaggaaagtgatataaattctttgacattaagtcctagttttggtttttactgtgacttttagatatacaaatttagttggatctggtatctttaatagacttctgagatgtaggatgtcttgaagaaatgtcctgtaagtgccatgtattgaattacttaattttttaaaaaagtgccagattctgttaatcaggttaaatattcacaaacaaaatgctgtgcaataatatttcaattagtaatagctatatactgtaagatatataataggagtttgaattcttagaaaccagcactaattactatcagatatttttgaatttcagtgtatttaagaaggtaagtgatttctaagttcatctaaaccaaactcaggtaagactatttttttgagtccaaaaaggaacccttcctactccttttatactcaagtttatcaccatttgagtaggacctaaggaattagacattccaagcattactttttgtttagctttatactgatacattatggagatttaaaaattcttatgggttttctaaaattacttttagtgtggatggatgtatgtatgaatgagacagggtctctctctattgtccaggctagcgtgcagtg

SEQ ID NO: 32271 - DNA, 1031 bp, Homo sapiens
acttgattggcttttcacctaggttactgaggctgatgcattgagaatagactaagggaagagcagagagggggaagaaacagagagactaattagattattatagtcctctagacaagagacaacgtgacttgaaacaggatggtagcattggatgtggtgacaggtggtcagattatggatatattttgaagatggaatcaacaggattagctgatggattggtggtgtgctgtgagagaaaggaatcgaggatgatacaacaaggtttttgctctaggggcgggcacctggaaagatggagttactgcaatgaggaagttactgcaatgaggaagatctggaaaagaacagatttggttgttgtgagcaagggtgatcaagtttggttttggaaactgttaagtctgagatgtctgctagatggtctatatcttacaagatggtctgagatcaccagaacaaagcacaaggctactccgaattctggccagtaaagtaggaagaaaactgaatgaactggaaaccaatttttaaaaagtgtttaaattctcatgagtgtggtgaccaactgaagaacatgttttagggtggaggaagtgacccacccagcctaatacctcagaaaggtaaggtcagatagattgagaattggtcattggagttagcaacacggaggttattggtgaacttgacaagtacagtttctgtggagtttgagaacagtcaggactttgaaagcacaaatatggataagtcttgaagatctcttggtatatagggggacagaaaaatgaggaaattattgtcaagttatttgatcatcgaagtaaactgaccaagaccagaaaagttagttattgagacttatttttttcagttttttgcatctgctgctaaatttgaatgtggttgtactgttcagaatgcatggcattattatggaaacctaacaggttttttgttttttgcctttccctgctttttaaattgcatgctcttgattcaatatcttttaagatactcctttt

SEQ ID NO: 32272 - DNA, 1049 bp, Homo sapiens
ttggctcttaaaagatctggaaagaggttgttgacttcaaacagcctatttatcccttttactacacaccctatttcttatcagatgcttaattctatgctggtgagacagatttaatcgaagtgttttctaacctggccagcgccacataatttactcccctccctgcctgggcagggaaaaaatactcttgcattggttatggtgagtttgtaaatttccgtgccgattcccagtagcagtgctttgatctttatgtgtgtccctcagttgaatttcagctgcaagaggaccgggatgacaaacttaatttcacattctttcctgccttttatttccctcccacttttacatgaaatcacaattaaacattgcttaccatatcccacgtactgtactgagtcttctgtgtgattatctatatcctcatggctgaaagaagtagctatgaacggcctgcagatgaggtttatgtctattaagtaatctgctcaaggtcacagtgctgttaattgtggaacccaacacaactctgacatcaaaacgtatggtttttattgctaggcaatacttcttggtcccttttgtaaaaattggatattactaatatatttgacggtagaaactgtggagttataggaaattagaaaattaaaaataatcacaaccaaacgtgaatcttaactaagtataaaatagatgaattttgtagaggagtcccaccttattctgttgtatgttctaaaaggtttgtagatgtctatctgtggcgtaattgtaatctgaaactttgtgtttagtggcaagaaaagccgtcccacagcattaagagattctttaaaaaattaagacctctgccaggttcggtggctcatgcctgtaatcccagcactttgggaggccgaggtggacggattacttgagctcaggagtttcagaccagcctgtgcaacatggcgaaacccgtctctactaaaaatacaaaaattggctgggtatggtggcatgtacctgtaggcacagctacttgggaggctgaggcaggagaa

SEQ ID NO: 32273 - DNA, 1049 bp, Homo sapiens
gggaagcagaggttgcagtgagctgagatggtgccactgcactccagcctgggtgacagagtgagactccatctcaaaaaaataaaaataaaaataaaaaaataaagaatcaacaaatagatggcaaaatggaaacattttagaatgtgaaatcaacaagacttagccatctcccctgcttaacatcttagccagccccctgccagctacggaggaggtgcataatggggtggtggggagtctggccttagctctatactgggcatcgtacttacatttttaagcctttgtttcatcaactttaaagtggaaataagaagtttctacctcaatggatgagttaatatatatgcaaactatataaaagagtgtctgacagactccattttgctatttatatttttgctattgttaccactgctattgtatagtaagccccttgacaggacatgcaagccctggcttatcactctaggctctttgcacactcaccctgcggtcatactgaaataactcctccttccctgatgatgcatcctagtctttctcaagcctccatgcctttttgatatacttgtctttctgctgaatgccttcctatctccctttactttcctttggcaaatttccactcatccttttgaattcagctctagtctctgccccttaagaaattcttttttttttttttccttgtctaccaccaccatttcctacagggagttaaattctttcaacctccaaaacaccctttaaatacttcttctaattcttcctattatgttgaattcttcctttatgcatcagtcactcctcgcaactgcactacctcttaagacccaggttcatctttatctccccaaacactggcacagaacctggcatgcactataggcccttagtaaatacttgtcaagtgagcaaaataaatgtagtttacactggtaactaaattgatcaaattttgcaaaatagacttgtgaaaagatcaagccaaattaaaaatcaattctgagtaacaatcataaaattagacattttcagctttc

SEQ ID NO: 32274 - DNA, 1038 bp, Homo sapiens
aggctgggaggctaggccagtcttgtcttttcacatttttctgcctgctttatattctggccacagcggcagctgatcagatggtgcccacccacatcacgggtgggtctgcctttcccagcccactgacttaaatgttaatctcctttggcaataccctcagaggcacacccaggatcaatacttggcatccttcaatccaatcaagttgacactaagtattaaccatcacatgggggtagagtgattttattggtcagtcttgaatcacatattcatcttctttatatggggatatggggttcccccctacccccagttatttggatggtgtccccaaagaaaagcggggatcctgtttcctaattttttttcttttttgagatggaatcttgcttgctctgtcacccaggctggagtgcagtggtgtgatctcagctcactgcaacctccggctcccaggttgaagcaattctcctgcttcagcctcccgagtagctgggaatacaggtgccggccaccacacctggctaatttttgtatttgtagtagagatggggttacgccatgttggccaggctggtctcaaaccccttacctcaggtgatctgccaacctcagcctcccaaagtgctgagattacaggtgtgagacactgtgcccggcctcctaattttaatactcctggtagactccatctctatgtgttctcacaccataacctgagcttacccagcctcccccctaatttggtctgtcaaccttcatctggccctcaagctgccctggcctcctggttttagccttgcctaatctagcccaacttgctgctgaaactggctatcaacattccgattgtccttcaacagtgaaaacatttttaccatacaatcagaaatgtcccactagttctctcagtcgactctccaacccagtaagaaaaggtaccatgtattgagtttttactgttatatattaacaaatagaaggttctgtcaaataaagtaatacaataattccccaccttccaaacaagaa

SEQ ID NO: 32275 - DNA, 1043 bp, Homo sapiens
tcccttcaatgacttcccaactctgagaaacaacctggccttactatctctacaaggcccctgtgtgtctgtgtgatcagtattccttctacctaggctcctcccaactcctgcctcagttccagcaaacacacccaaactctggtcttaactcccagcacccttcccctctttaacgcttctccagcaaccctggcctccttgctgtccctcaaacctgccaagcacattccagcctcagagttgtagcccacagaatgttgtctgcctggaatctcattcctgagaagtctacatgatgcttaccccatcacttcctgtaggtctcttcaaatgtcaccccaaccagggaggtgactcccaaccatgtcttagcctgctttatttttcactgtaatccttttcaccacaccacctgactctatgaatatatttgttcatatgctcatttcccctgccagaacgttattcatagctgaaggcatgcaggggacttcactgttagaatcctcagtgcctggaacagcacctggaaccaaaaatgtgcttcagaaatacttgttgattaaatgaacaaatgaatctactttacactttaagaagcctgctccagccactctagggagaatgacttaaaaggcataagagcggtcaggaggccatttcagatctccagctgagagacgatggggacccgggcaagggtagaggcagcacatgatatgagaagacaccaagcatttggaggaggagaaagcagcattagcagaactctgcccgaaggcaacgtttgcattccgtgaagctttagaaacctcatgtggggaaaaagccatgtatgttgaaatacatttgtatgtgtgggtttattctttttcattattgaaaatagcccacgccagtgtaagctgattgagaatacattcgtttggcttctctaacgaccatttcatcagaaaagcattgctttagatagcagagtagcttatttcctctaaccctggtgccagtgggctccctcaaggacaccagcttgtgtgtac

SEQ ID NO: 32276 - DNA, 1032 bp, Homo sapiens
caggagttcaagaccagtctgagcaacatagtgagaccccatctctacaaaaaatttaaaaatcagccaggtatagcgtcatgaacctgtggttctctctgctcaagacgttgaggcaggaggatcacttgagcccaggagttcaatgctgcagtgagccataattgtcccactgcacttcagcctaagtgacagagggagacctcctctaaaaaattaattaattaaaatatttaaagcattggctatcccaataaccctgctttgattatatgaatgtgtcacattatcacatgtacccccgaactatgtacatctaatatgtatcaatgaaaataaataacaaaggcttttatgaatacagaatcagaagaaaatgatctctaagtttaatatttcctgtgcttttgcaaaaataagattttcaaaaatattttcagcctttgaatattcttaattgtgcaacataatcctttgcaaaggaagatcattttttaatgcttttcaaatattaagtgaaaaagtagtgacttaattgtgtagaactaaaagacagtaactgcaagttaaatagacaagggagttaatccagtctttgcctatgtatgaccgtgggtaagttaatcttactatacttcagcttcatcatttataaaatgagaaattaatagtactaatcacagagattgataaaagaattaattgacgtgagatatttagcacgctgcctggagtttagaaagcatccaataaatgttatcttttccatgagttaggattttttttattataatagaaaacccaattcaaacttgcctacagagtaaaaagaaatgacttttgtcacagctgaaaagtctagcagtagaatgaactttaggtattgtttgatcagggtaccatgctttcagacctggtcttgctgatgtgttggctttatcttcagctggtttcttccctcacaatagcagataatcacagcagtttcaggccttatatccacacatccagaaagaaagaatttctcatatc

SEQ ID NO: 32277 - DNA, 1024 bp, Homo sapiens
tgagtctgtaaggacatacacttggaggtgcctttggttgtggttttatacccttttgtgatagcacactcaacagaatgaatgacacgtgtaaaggaacacaccagagaaaatgaatgaactgtgtaaaagaagcaatggcaagagcaaggagaaagaaaacattcttggcatctacaaggtctgtttgaccctgcctattccctagtttgtcatatgagccaataaattccaggttgcttaaattagttataattatgtttccatcattcgcgagcaaagagctctgatgaagactttatagcccctgtatagttggcacctcacatttctcttctaggctattggaccaagtttttaatctctttcattcctgcctgttatttgcaagcactgtgataagccctgaggacacagttgtgaggaagacaatcaggatccctgccctcctggtaaccatacctgagtataacaagatctcttgcatcctctttccattcctgtggagtctggggttctgaaccatctgactgtcacccttctcagtgtcttcttgattggtgtcctcattccaagctgctcacatgaacttgctttctgtttgtcttgacctacttcatttatgcccaactccacccagtaccaagcacgaaactcacagttctgcctggattattgacctctggatacttcagagtctgaacctaacccatcaactcccttaacctaagtttcagctttaccataatagaagtaataataataaagtaaaatagaggccataataatactttatttcataggtcattgtgaaaattaaatgattaatggctgtttcatgaaaacaaatcaacaaaaagtagctgaagttattatttgatgcttctaactctaataatcacatctcaaagccagagttacattttctatccttaatattcaagaaagtaatactatgaaagaatcctctggatcagaaagcctgtgcatttatttaattttattttttctgaattctgttatt

SEQ ID NO: 32278 - DNA, 1048 bp, Homo sapiens
atatgttctccaagtgctggtgggttattggattaagtgttctgtggagacggctttacttttcaacaagggctttctggagaaagcgtcaattggcggaactttcagactagcaagatgatgcctttgggggcacttggctcttgaaccacacttgataggcagcagcctcttggttgcatgtggaggagcttatgattgcattacagactattaattgaaaagaacctttcaggcctcatgacttcaggattcttcatcacttcagaagggagttttcaggtttgctcctaaattcctttctagaaacaaattttcccctgatttcaccttcccatttcatctatgcattaattcctacccatctctctcacgatctagattggggttggccatggcctgttttgtaaataaagttttattggcacgcagctgtgccatttgagtatgcattgtctcggctgctttcccactgcaacagcagagttaagtagctacaattgagactgtatttttaaaaagtgtgctgagccggatgacctaggtcagtaaacgccacagacgcttttccgtgaccccctaactcctttttcccccacatggccaggaataaaaacctcagctagccctggctccacgaggaaaaaaaatcaaatgcctaatatttggaaaggaaaaacacaatacaaccctcatttccctctcaatgaaagaaatgggtgacacttctgcagccgcgtctgggcctatggcagatattgctgatcaatcatagcactctttcccactgggccttagaatccttctcgaagcaatgcccaggcagccactaccaatcaactggacttggcattcaagtggaaaactactttccatccctggcccagtggacaccatcagatcagaaaatcacaaagacaaaaatcctgtgtaataagtaacccctgaacatcgtttgggttgccatgtcagacattgcacctcttgttaagtccggagttgaaacttaattcactgtttctgtttcttagattaagcaccagataaa

SEQ ID NO: 32279 - DNA, 1067 bp, Homo sapiens
gctgtgtttgcttgaagttgattaatgatagaacctcgcttggggtcgtcctctggagagttctttcacaggttctgcatgttaactagcaaagcagaacacacagcaagccatgattagcccagcctcctctgctcagtggtccccacaaactgccgttgcattacagattcttatttcgtgtaattatttgaagatgggtattcatccacccaggatgccactacgggacctgttatctggtactcagtgtggttctaggaccaccggcatcacttgggggcttgttagagatgcagagtctcaggccccaccccagacctgaatcacacactgcatttcaacaaggcccacaggtgactgcagcgtgtgttaaagtatgagaaatgccaccagggaggagaggcccacaccagtccagagactagtgattcagagcatcactacccaagagaactttacgcagtgatgcaaatgttccgtctgtctctgtgctggccagaattaaccgctagtcacatggggcctttgaacataaatgtggctagcacaactcagaaactgaatattaaatgtagtaagatttcgttcatttcaatttaaagagccacgtgtggctaatggtaacaatactggacagagttctagttctagagtgcggcttttctgttgccccaaacttttcagtgcacctgagctgcaatgggctgggaagtaccctcactgaacctctgcatattttttccaggcatcctgtacacgtcaaagaagagcccctcgatccagaggaagctgaagggcccctgtccttagtgacaacagccaaccacagtccagattttgaccatgacagagattacgaagatgaaccagtaaacgaggacatggagtgactatcggggcgggccaaccccgagaatgaagattggaaaaaggaaaaaaaaaaaaacacgtcaaaagttagcagtgaaattgttctccatttgttgtacagtctggaggattttcactacgttttgacaactctgaaatgtgttaactcttagtgccatcaagaaccccatttg

SEQ ID NO: 32280 - DNA, 1107 bp, Homo sapiens
gtgttttttaaaggaatcatcatcagcataactaattcttcctaaaagaatgtagggtattttagcagagctggttcacaggtgtgtgacatgcagtcacataggatctcatgcctaaaaggacactgcacttgattttatgtgcttttattacctttttatttagagataggggtcttactgtatcacccaggctggactcgaactcctgggctcaagtgatcatcctaccttagcctcccaagtaacttggactacaggcacacaccaccatgcctggcatgtacttgctttaatgccatttttgtcttgaaattttaatttttgagccaaagaccccagattgtcattttgcactgggcttccaaaattatgcagccagtcctaattcttactgctgaaacactaatacagccattaaaaaaaaaaatccccatccgtaatgcttaatacagactgctgggagggtgactccccatgcagccttccttgcactgatgtacaactgttccttttaaataaaaatatccggcgagccatggtgtctcacgcctgtaatcccagcagtttgggaggccaaggcgggtggatcacttgaggtcaggagttcaagaccagcctcaccaatatggtgaaacctcatctgtactaaaaatacaaaaattagccaggtgtggtggtgggcccctgtaatctcagctacttgggaggctgagccagaagaattacttgagcctgggggttggaggttgcagtgagccgagatcctgccactgcactccagcctgggtgacagagcacgactatgtctcaataaataaataaataaataaaatagctggagagccatacataaaatgtaatgtaatgcaactttgctacattttgttttgcaaagtttttaagaataaagaaattatttttttagcagccgggcgcagtggctcacgcctgtaatcccagcactttgggaggccaaggcgggcggatcacgaggtcaggagatcgagaccacggtgaaacctcttctctactaaaaatacaaaaaaatttagccgggcgcggtggcaggtgcctatagtcccagcttactcaggaggctgaggc

SEQ ID NO: 32281 - DNA, 1070 bp, Homo sapiens
tatttttacaagttgtttttctacctttttttctttttcttttcctttttttttattctaagacctattttctgtggtagggcaaaatagcttgttattatctttaaattatattagatttccagcaaaattattcagaagtcatagggagacgtaatgatctttgatcaggtgtagttctgtgtgtctgtgtgtttactttttatgctccttggtttgtgttcataatacacttactgtgggttgtgttataagtcagggacaaatggcatttgtgtacatatgctctatgaatgtaaattgataaaatacatgaatatacatcctgatggcaatatgaaatgaaatacaggcctcttgtgtgtatgcatgtgtgtgtgtgtgtgtgtgtgtgtgtgtgtgtgttcttgtaatcatcattcattgtgcttgaagttcaaagtcaggcagagacagtcgagtaagttgcaaaatagcccttcccgggaagggaatgcacttgagtacgaaacagaactctcaatgttagctttacatttctatctgatggaatttaaggttatggaaacaactgtaaaaataatttgtctgaaagaagtctggatgcagaaatataatagagaaaatatttgagaatatggttcatcggtgagtgcaacagatactcttccccgagcaccacatggtgcggatcaaagcatcccatgacttggatccgtgtggccagatcattacgtattgattggaaccccactggaggattaaccccttcgtgttcatgccaaattttctctcactgttggtgttaggaattttaggaatataatcttcttgccattattagcttttttaaaaaaaacacgaatcatctgcttggatacatttgtcttcctaaattattttggtattattccaaattatttaattgtactcctctttgctggataaaattaacttgggaaaaaatatgtgattatatgaaagcagtttctgggggaagggaagaggagaaaatggataatattccttgtagatgtagcaagaaaatctcaaaatcaagtacagatttt

SEQ ID NO: 32282 - DNA, 1047 bp, Homo sapiens
actcctactctcctctttaatttgtcttacacaaggaaaattataattaaatcattcagggtaaacccttgagtgtagagaagggaaaaaacacactttggtaaagattgccaatagaaacccacttccctgttgcgcagggtagagacatttatcaatattcagcactattacgggaggagcggcccatgtgatttgtgaggcggatgccagcgttcaaatcaaggcttgttaagatcctgtccctgtgtaatcatggacattcagcatcattagaattcagtactggcaccatgcttcgtgctttgattttctccgacaatttaataatgtttattgtgctgattgtatataaattcattggtgcaataaacatgcctgtgttgtcagtgcctgagaaaagtgtggtggggatcaagttcaatggcgcagctaagggggagcagcaagaggaagcaggtgcattcaagcctcttgctgtcattttattccatagggacagagagtctcgacttcttagggaaacagacaaaactcaggcctgggataccggtacatatgaagatactgtcttgtttccctgtctaattgtcttgctttagaaaattccaggttttggtgtgggtaaacagaatcaacagaatgcaaatgaaacatctattaaaatgctaaatttagtaaagccctttgagcttcttggatcaaagcagctatgtaaatactaatagcaattactacttaagtaattgcctaaattaaaatttgaaatatcacattacattatggtgcactagggaaagggacaagaactcacatttaatcagttccttctctgtgccaagcactggctagacttttgcatatggagtgatgtctcattttatccacctgaccactcaggaagcagtaaggatgattatacccattttacagatgaggaaatcgaataatagaaattaaataactaacccagggtcatagaactggtggttagtggcatatccaagatccaaattcagatctgtgttttagtctgcaaaatagtac

SEQ ID NO: 32283 - DNA, 1044 bp, Homo sapiens
aagtgttgttcagaagaagacagcaaacttgaattaaggttttggcctctgatcacacagttgatttttcaccccatgctcgtatcctttctctagttatttccaagcagcttctggcaaagcaggcctttcgttggaactgaggaccacgtgggccagggaccattgctgtatctgcctcaccacagggccattcatcagtgtatggaataatgtcctgaggagacgctcctcctgactcttcctttaatacatcttatctccattctcagctctgaatgggcagtaaaacctttcactttcttctgtgttcaaagctaaggctcagcagaaccaaatataatacatgattttagtcccaggtgtgttatttggtggttagagtttggtgtgggatcatagtaatctgttcttaagtgcacagccagctgcacaatggactcatttagcaactgacaggtttcttaatatgtggtgtttgaacaagagctgtatctgttgtgggtgttaggatgtgggcatcaaaaatatttttaaagtatggtatttagcatttcctttactcttccttaaacgttggcttacccctcgatatcccctcccccccaccacaggtattcattttatattattatggctttttttttttataattatccagtatctgcttcctcttggaagcctgtagtatatattttttttttattttattttttattttttaagacagtttcttgctctgttgcctaggctggagtgcagtggtgcgatcacagcttgctgcagccttgaacttctggtctccaagtgatcctgccacctcagtctcccaagttgttgggactataggcatgcaccatcacacgtggctaattgtgtgtgtgtgtgtgtgtgtgtgtgtgtgtgtatttttggagacggagtcccactgtgttgcccagggtggtctcaaacctcaaagcagtcttcctgccttggcctcccaaagtgctgggattatgagtatgagccactgcacctggccatgtttaattcttgggagaa

SEQ ID NO: 32284 - DNA, 1046 bp, Homo sapiens
ttattgaaaatgcgccgacatgctctccccggagagtgagcaaaagaaggcaagatgcccaacagtaatacaggttgttctcttaggtgagctaaaatatcgagtttggcactcccctgctgtgagcgaggaggcaatagagtagacgaatgtgcatttttacattaaaagtgccatatttcactaggggtgtccccctttctccccccattttgtttaaatgtcttaatttatatattccagttaatagttcattacatgtcctttctctgtctggctttaaaagttgtcttttgaataagttgaagtagtcaaaatttcctaatcctggcaggcttgccagcagagggcaggcgtaaagaaggttttgacatgagggtgtgtcaacctagggtcagaggagggtggtgttgcatgggaggaagatgtgtgagcattgttctgagggcaggatgggacacgctccctttgcctctttgcaggcctgctgcacaccacagatctctggaaaagctgactgtactaaataaaggtggtcagttgcctttatctgatattcagcgatttctacataagtaaacgttaaaaaaattaaaatgtaatttcattccccaagagccgtcttttctttccccttcagtgccccatttctggttatgcttaaaaatcgagggtttgcctgtgggtgggccaaaaatactgtcactcttcgggagggaaataacaaattacacttggtggtggtggtggcagtgatgttttccccccgatatctgaagggtacagcactttgggacatgctctactgccccaaaacatgtaccttttcaagaactttgcacacttcagtgtaatctgttctaaccccatggcagaagcagtccattaacaaattttacattatgttaaaacaggggattatagtttcatcataaatgagagagggtaatttattactgtcaaatgcagagttaggaaaggatgttgtcatttttcttttctgtcatgattttgtttacctctgatgcttatgaatgcttttagag

SEQ ID NO: 32285 - DNA, 1028 bp, Homo sapiens
atcaagaacaaaaaataaactatcagattcaggaaaaatgagaaacaaacccatgggtgaggaatcagtgaatcattgtagagtttgtttttgggggaaaaaaaaaaaccacacacactgaaagaattttgagtgaaaacccactggactgagaactcttaatagtatggtcatcataagactttgaggggatttctttattttttttagagggtgaaaatgtcttgaagaaattcccagggcttggtgaatagaagatactttactgaatttcaaagtgatgttgcaggcatacccttgaaagaaatttgtgaattggggtgatcgaaagaaaaatgcacaggtggtgaactgaaacctggtgaatggtgcatggctgggacaggccgtgtacagttggggttgacttggggaatccctcccagaatggcatcagatgaaccaagatttgcaactgcaatggtgtgccttgtaatttggggtttccctcaggcagtgcttttctaggttgtttggaagtgttacactatgaccacttcctaatcttcttgtggaaggaggtacctgtattagtcaagactttttcccatgcaaatgtcaaaacccagctcagactggcaagtgatgaggggttggggtgagagagtgtgtacgctcacagagcttaaaagttcaagggttagcctggcctcagacccagctggaaccaggcactcaggtaacgtcatcaggaagggtctgttccaattgttctgttctgttctgtttctttcctattggctccgttctttgtcaagtttttcccttgctgaggccagagggcttctgagagtccctgcttcacatacttacagcttagcaacccctcagaaagagagtatctcttgctcagtaattccagcgaaatcccttgaatcaattgagtgacttgggtcacttatctatacatgaaccagtcactgtggagaagggaggagatgtgctgattggtaagtgtgttaggctgttcttgtgtcactataaagaaa

SEQ ID NO: 32286 - DNA, 1034 bp, Homo sapiens
tggcaaaagaaaaaaaactgaaatgtaatctcattactcaaaagttctgttagacactcctaagaagtgattcttcttaacgaaaaaaataaaagcagcagcaacagcagcagaagggcggcttcttcttggataggctgtgatcccacaatgaggtcttgctatcaagcctattggttgccttgaagggagaaaagagcttcttggtttcccatggcagtgaatcacccagcaaagatggctcgagtttccttaagttgtttaaaattggttttagtgttctgttaatgtaagcaaataatcatgattttagtcttgagtgactttcaggcctgggcgagtcaggcttgctcagtattctccagtgcaatgggagtatagacgatgatgcgccccgccaatagagaccactacatcattatccccaaagtggtaaaatactcttcctggaattttgagtctttttcctgtgtgaatcttctgagcaaaatctcagaaccaaaatagtgatcatcaagtctaatgtagaaaattaaagcctctctctttttttggggggggaacatcttaagttgatttagaatttttgtacacaatattcgtctgtggttgaaagggggcacgctgaggtcaagtgatgtagtgttttccatttttccatatgagtctcacagtgtgcgataaaagcaaactcctttattttgtaagtctgcaagaatttctgctgaagtgcagaggtcacgttccctgtcaatttgagtagccagcattttttaactactgttttttcttttggtgtgtcttttcttccctccccccaccttgctataaaccgtggcacttttctgacacatgcacagtgaggtcctccaatctgaaactcattagcacacagcattggaccctgtccagtggttagaaaatttcctggagcctagaataacagcatttggtgcaataccatggaccagaagtgacaatggaggtagtcgcactcccctggcaccctgcccggtcaggaaagccagctgacc

SEQ ID NO: 32287 - DNA, 1050 bp, Homo sapiens
tgcctgtttacgggattgcatttgttagcacgctctcttcagatattgttcccccaggaatagcgaaaatatgtgcagcgcgaacaatgatttaacatctgaaaatggtacttaaagagtttctgtctggtagtaatgtgatggaggcttctgaagggaacctggggacttcatttcttctatttatctatatgtctctctggttttagtgagcggtaattgcatatttaacccctcaaatagctttaaccctcacgatgccaactttttaccctgtataaaatgtacttttatcccagcaaaggcagactcagaaattccctagccaaaaaattatttaaattaaaaaaaaaaaaaagtgagtgtgtatttgtatgaatggatggaaggctggatggatggatggctgaaaagaagttatagcagcattttgcagttagttttaggtgaagaatcatgcccgccttcctggtttggaagaagaccagttaaagtacagatattataaagagtgaaaactcaaacaaaaagaagaaaagaaagacggactaaaacaactgtgtttttattttgaattcattgtggctggagctcagagaggaaagagacggccccatggaaggaagttgtagatggacgctgaatcaagagtataaatttgccgcatgcctcagcaatatggttttctcaattagtggtcgttctgggaggcctgcttaacagcttatgcgaaacaaatattaacacaaattgtataattacatcaaaatcccaaattcctcaaagatgcaaaatggttttcagctaagaatacgcgagcaataaaacatcctatagtcaaaagaagcacactccaaggaaaccatgaagactggatccgagcgactttcacagtttattttcatggtatttaaattatgataccagtgggtatttttaattagtgtgcacttgtctacataagccatgttggcaaatttgactcattcatacagtagttgctgtaaaagaggccagcacagcctgcaggaattaaaattaaaagtttct

SEQ ID NO: 32288 - DNA, 1028 bp, Homo sapiens
tttgccacgggtcatttagcaaaatgtttgtatatgtaagcccaggttcttctttttaaaaaaggaagggtggagggcggggattggattttgctgaaatccaggtggcgtttcagtttatatttaattttaattggaaatcaaatacaggcaagggagaaaaaaatctaccatgttttctttactaagagtatcctttggggagaggaaggacactgccagccagattttaagaagcagcttttttattggcatgtctatttttttttcttgctaaattcttgtgcctgcatttttttttaaaacatctacgattttacacgtggcaaagactttcatgtctcaatgttccttgctgccgtctttctatattttccatgggattagtacctagaaccaagacagcaaataattatatactacatataatcagtagcttcctaggctgttacctggtgagtctcttttttaggttctagtctgaaataatacatgattcttgtggcccgtgttgatttctggaaggctgaggaagtttctaaagaatcaagaacaagaaaaacaaaaaggtgggttttttttttaagcaagaactttagaaggtcttccgatttctgagtataagtagctgtaggtgcatcttgtaaaactcccataaaatattggcagagagactatggcataattagagaatggttgctgagtgtgctggaagaggtggcgagacagtcacttcactccaccagtgcctacaaaatatcccatgtgccagagctgagtgaaatcctcagcactggctctgtgtaatgcttgggtgcaattcagatgttttcaattggaaattgaatagcaaataattttgaattttcaacggcacaattaatgacacattcgttgtagaaaaattagaagatgcaactaagaaagcaaacagagaaaaaagctatatcgcttgcaatcctgtttaatggaggtaacaactgttaacatttcagtggataccctgttttccctttcttgtaaaaatc

SEQ ID NO: 32289 - DNA, 1047 bp, Homo sapiens
aaaaacatgaaagacaacacactagttactttgtgactttaggtttgcagaacaaagattagataattcaagcaaggcctggaaacaagagcagctagagaaggttgaggagtttattcacagtggaactccggagggggatatctgttgtgggggttggggcagaccaacacaatttttgttactttctttttagacagagtggaaaattccaataacctgattgttaatcatgtaattgccagaatccacttaggtgtatctttatttttttaatatccttttctcatttccatattttgctttggatatccagcagacagtgttttgctgcactttgcactgacatcacgcagaatttaaaaaaattagctaactgattataagtgtaagatatagataaattaccaaactgtttttcagtatgttttgcttattaaattttaagtaatggaaggaggtttttcacatgtatcaaaattaaattaatggtgttaaagtatctgtaaaatagattgaaactaatgttttaattgccgattgtgtttctaaatatagtatctctgataaggcatgataactttcttgtaacacacagtaagctgctttatgtggtagtgcacatcagggaaatttttagagattaaacgtttcttcttaacacttttgttagggacacaccgaacttattgttcattctgggctttgaagagctaagattttattgataagctgacagaatgaacccctgagtggttacatgggacatcaactgattattttattttttgatattttgtaaggaaaacatcataaactgatatagttggatttttgcagagtagttgagaatgctctgcatctgtttgtgggcccactgggcttaaaggtatcttagaatagaagcttgatatgaggagactggagcattaaggttttccttctggatgaaacattaaagattcgaatctgtgtttgacccatatatttcattgataaaagaagatgagcccaagaaatgaatgcagagttactgaagcatgaaaa

SEQ ID NO: 32290 - DNA, 1056 bp, Homo sapiens
tgtttttctctgtgttataccagtttgctcaattttatgttttttttttaaatttaaatatatgaaaataatacaagaattggctttagttccagattgcagaactggaaactaaagttaaaaaaaatctaatttttttattaatgtatttgatattatgttgaaaacttagtgataatttactaaaagtggcattatttatatcgatttattaaatagagaatatagcccaaaccttaatgtgctggaagataattacttagaatatccgacagctttgcgagaggcctgtattactttaaaaggtataaatgataggttgtgtaataccctacattcttatcttgaactatattatcgggggctctttctgttttaccttaatgtgcccaggggactcctgcttagcttaataggacacccaaaaggaggaaatgcagagttaatggtttaacaaattctaaactttattagcaatttgcatttaggagaagggcagatggtgtgtggtcgaaagctcatgggactgtgaattggtagactttttttaaaatccagcttttgcccctaacttttggtctcggagacctctgttctttaataactagaactgtaggccgggcgtgggggctcatgcctgtaatcccagcactttggtagggtgaggcgggcggatcacaaggtcaggagttcgagaccagcctggcccagcatagtgaaaccctgtctctagtaaaaatacaaaaattagccaggcatggtgacgtgcgcctgtagtctcagctacttggaaggctggggcaggagaattgcttgaacctgggagacggaggttgcagtgagcccagatcaccccgttgcactccagcctgggcgacagagaaaaacaaaaatccttctcaggaaaaaaaaaaaaaaattaaaggaaattgctctaaatatgatacagaaataattaaattacttattgcatgccattttaggaacatgtgaatgtttaacagacttcatcgtaaagtgtaaagcactaccatgtgaaatagttggcaaaaatga

SEQ ID NO: 32291 - DNA, 1049 bp, Homo sapiens
tagcgtttcttcctgatgaataagccttaaatgaggagaagaccttgccatccagcaatggacaaaaaaatcagcatcatctttcacactgcaagaagcatgtagacttcagatgccaggagcttctcagtaaataccacgcctcaaatttgaaacctgggaattattaagagtcagtatagatgcacagaaatatgcctacaaaggtactatgggaataactgattatatacataaaagtcgccaggcaaattcagaaaaccaaatgaagccattttgaaaatttggattctatggtctgaagagtcataaataacagtcatcatactcgggagtgatataacaattttcttccaactagatctgagtgctttacaaaatggatctggttgctggcattcctaagaggtagctggcaattctcataatccccactttacagactggaaaaacggtcccgttgatgataaatagtttacccaaggtcatccagaatgtcaagatggaaactaaagagggatgcactggtcacaattatacagatgtcattctattatggttgccttggtttggtgatctaataaaggtttctgtggcattttttcctgcctcccctcaccattgacaatttacccacatgcatttgcttaaaattcaaatccaatttgtaaaattcatcatcttatattcaattctgaatggcattgagagttgaagataatcatcaaggccatatagattacaattaaaatggttagttttaaacattaggcatctccaagcttcacattttgtgtattggttcagttttttttttaaagtcaggttatttgagagaaaactaaaaaacaatcaaaaggaagttgaatcattgcaattttccccccactccatccctaatttaaggtgttttatgttagatgaaggaactataaatgcatccttgtagataacattcattgtgtcttacctattataaattatttcttggtgaaaaataaagctaaaatgctattcagttatttgaaatataagttcctttaaaagtg

SEQ ID NO: 32292 - DNA, 1046 bp, Homo sapiens
attgaagtggggaaaattcaaaagatgctagtttgtgtgtcaaaatcaacttttgcattctaactgcattgtgtaaatttgctgtgcaggaaacataagtgaagccatttggttttgtggcattggtgtgggttggctcagggggtggggataaggttgaggcattgatatagtaagaggagagccagatggttgtattacacatcttttgtgttcttgtttgcttcttaaagcagttgcagaattttgcccttggcgatattttcttcgtgcctgtgtgttctgctatgaatttacttttgtcagagtactttgaaagaaaagccttgctcagaaaaaaaaaaaaaattacgttataaacttgtgaagtcaacagtgtgttcataaaaatattttttaaatgttaagtatgttagtaaatagttgagagaatcagcttttcttttttcttagcgcagtgatttcgaccatattttatattaattcagggaaagaatttttgcaaaattatgaatgtgcaattggtgatggatggatggatcgagatggatagatgaggagacagacacatggaacagatacattgttattccagtaaggatgaggcctatctgattagagatttaactttttccattacttacagcaagccctcaggttgtggttaacctcttgtgttttatcagcaagcgtaacttggtagtaagttgagtgagagtgggttagggtaggttggtgagttttcgttgacatttggtagaattgctgttacaccaccattgaaatttatatttattccctactaaaaggaaattctattttgcagtcaccagtggcaagggatatttaagatgttctaatgcatgtaaggggtgatattttatcaccgaatgcttttaataaagagttgctttggagctgtcccccctcacccacacacacacacacacacacacacacacacacacacacacacacacacacacacacattgtggtagaatgcttcataataatttaatgtcctttttacagttccagtttatt

SEQ ID NO: 32293 - DNA, 1087 bp, Homo sapiens
gtgccatacactattctaagtacttatgacatgtcaatgcatttattctacaaaagcaaataatgcactgtaatgaagcccattttatggatgagaacactgagggacagagagcttaggcaatttgcctaagctcacaaggtcagtcagcaccagagctaataagaacttgggcacttgaatccatgcttgtaaattctgaactattctagtctaaagtatactgtatagtactatattctgtaatacttagttttaggtgaggcagcccaaggatgcattaagaaatacagatactcgaccgggcacggtggctcatgcctgtaatcccagcactttgggaggccgaggtgggcggatcacgaggtcaggagatcgagaccatcctggctaacacggtgaaaccccgtctctactaaaaatacaaaaaattagccgggcatggtggctggtgcctgtagtcccagctaatcgggaggctgaggcaggagaatggcgggaacccgggaggcggagcttgcagtgagcagagatagcgccactgcactccagcctgggcgagagtgcgagactgtctcaaaaaaaaaaagaaaaagaaatgcagatactcgatctgtacaacctcagccttgcctttataaaaattctttcctaactttcaaaacttgtttgtttttgttgtttttgatagcctgttttcagccaatgaataggtagataacaatcacttgcagcctgttgtactgctttttaaataattagcttggccgggcgcagtggctcacgcctgtaatcccagcactttgggaggcagaggcggacggatcatgaggtcaggagatcgagaccatcctggctaacacagtgaaaccccgtctctactaaaaataccaaaaattagctgggcgtggtggcgggcgcctgtattcctagctactcgggaggctgaggcaggagaatggcatgaatccgggaggcggagcttgcagtgagccgagattgcgccactgcactccagtgtgggtggcacagcgagactccatctcaaaaaaaaaaaaaaaaaaaagaattaaagtttcattgtgat

SEQ ID NO: 32294 - DNA, 1033 bp, Homo sapiens
tcaagggaacggaagagtttttgttcaaattatatctcagtcattcacataaatatcagctgtgacacatttcttatatcttcagaggtatgaacaaatactatgcagacttgatttgcttggccgcgtgttgctgaaccattgtagtagggagaggaacaaagatggagaagagctgattttatgaaggaaccaaagaaggaaaaattgttgccgttaacgttgtttactgaaattcatcagcttttactttattcattcaagatttattaagtgccttttgtagactgggatagagcttagcaagagaaatgattgattaaatagaccattataataaaatggagtcatgcctgtattaggacaagtactgtgtacaaagggaatagataacagggacattgatctaaagggaggttagggaggacttcttggaggaagtggtatttgtgcctgagttatatgggatgtgtgggatttcttaggtgaaagagggcagagcaatacggtggtaggctagatctgtgcagcggcttagagacaagactgtacagggtgtgtatgtgagtgtctgtccgtggtagaatggtggttccagagccgcaaaaaaagtgcaagcagaggaccaagcagcggctaacatccagcacagccttttgaatacctctagatgcttccccttggccttccgggccttagaaagctaagaaattgttcagctgggatgggatgtgcgtgggtaagcatgcaacgttaagcatccatgtcaatgttgagatgcgtcctaatgtcaaaaatattaaggtgtgactggggaagctgtctgggaattgatggaacgttgtacattcacattttgcaagatgagtttgtcttccccgtgggtaggtttgaggagagcaaaaccaaaggcaggaaagagccttcacaagggaattgcagagtcgtgggaggcacccttgtgtgggccggcaagtgttggtcagggtgaaggaaagagaatggagtggatgtcattgttggatgtggtgga

SEQ ID NO: 32295 - DNA, 1029 bp, Homo sapiens
ttctttatttttgttcattcctatggtcaatatcgatgcatttcaaactcaaatgtgtggactgtcatcttctcaaaggatgtttttttctgacatgacgctttaattatatgaaaagttttataaaaacatagaagtgacttacaatattttatatgtaatgaattgtttatattgataagattaaaatcacaagaaagtagaaatgctcttaaaaatgtgggatcattgtgccttagagttaagaaaacctttgcccaatgaagaaaaagtagaaagcaaaggagaatgttaaagtacatatcacacagcattttatgctggttttatgtcagcctgagaagtgatattgtgtgcttcagctttgaagcatagcaggaggaagagttatacatgttattacatgtataagttcatgttttttcttttcttttctttctgcttttcttttgaaacaggttctccctgtgttgcctaggctagtctcaaactcctaggctcaagagatcttcccaccctgcagccttctgagtagctgggattacaggcacaagccactatgtctggcatgttattttctttgaaaggattgtgtcttgtcaaatgaacactcgcatgttaataaaaatcatcttattctgatatcaaatattaacattgttcttgattgtagatactgttttggaacatgtatgctgcgaattcttccagcggtaatgttatcaaaattacacctagacatttccctgtaactcttctcagtgctgtactatagaaagtattaggcctcaaaccatgatcaaattctgatagttgttcttctcatctcacccacctgcaaatgtgtttattgctggctgttttctcccagtgctttaggggaagatcctgtctttttttttttttttcaacattttgctctctgatgccctgggacaaccctgtgttgtgagatttaagaggtctagactttgtggccgggcgcggtggcttatgcctgtaatcccagcactttgggaggctgagacg

SEQ ID NO: 32296 - DNA, 1037 bp, Homo sapiens
tgtggaggccacgtggcaaactccaggtgcatctgtcatacagaaattgcttttccccccaaaatacagaaatgtgaaataaaccaatttgggcacaagtagtgtatgctagatttacttagtatctgtcaaacatctccatacactcaatgtattaggacaaatcaaagagttataactgtctagtttctgcacaaatacatatatagtttctacttagacactgatgctactgattgattatttttgctaacagtgctatggccaaacacttaatttgttccttttcagcagtattgtaaatttgttctagacatatgtcagtgggaaaataggggggcagggggttatctacgcaagcacccatgcacacacacaggtacatacacatatgcatcaaaagatacttcctcacttaaagatgtttaaaagggtatttactttgacatgaaataattcttcagcctttttattattgttaaacatcttttggtgtttatgagcaataaaatagtttagccacgactgtatattcactatgaatgaaacatggtttttcagaagagattttacatgtatgttaaagccattttcttttcttgtcatttatgtgaatggtccatagattggattgctagtggaagaagccatgtgattctgtatcttaactttctctcagagaggaattatcgtctttgtcattttgtttcaatgtgctacctccctacctgctgggtttcccaacagccgtcagctaactattcttgtaccatactgctaccagcattcctggttcacaaatatgaagtaaacagaaaatcttgctaatttgagcccagtaggaaccttaacgctgtaatgagggactaattttgaaagcagagagacatctcttacaaaattagagcccaattttttaatgatcttaaataactaattgagagtaagaatggtatttaagaaagagtgagacactgatacgctgaagagttacaacaaggagaggagactcctccaggagccctagtaattataca

SEQ ID NO: 32297 - DNA, 1030 bp, Homo sapiens
ggttactaatatccttttaggaaaggaaaagatgaaatccagtaagtttcagtcaaagtaagtgaataaatcagaaaaaaaaacattggttagactcatgataaccctcagagtggctaacacccagattttttgcatctctaaaaatatataacacccctgtctccaaatatcacttcagaaactaaaataataattcgtgaaaggggaaacagatccgtgtaatatgagacttgatcaggcagtttacgcgggatgcttgagggcctagatcagcccttgtgctgccctcttctcaataccctggtgcctgaggagcagcggggaagattaggagctttctgagggtttttactttaatgctttgaaattttgctgcatcgtctgagtccaatttggttcagcagtctctcagtgccaggtgactctggctaagatgctctagggctgaattttttaatgccagctttcccaggggatcagtaaaggttttgccctgggtattccaaccaggagagcctgtgtcctgtctttgtccacatctgtccccagtcattaatggtgacacaaaatagtctcccactcctgactcacttcctaaacctggcagtttctttgggattctactcctagaataattggtgcttagaccttcttaggtttatctgtatgtatgtacctagaagaacttgcatttcgtgctgtcaccaatattctgcatgcttaaaaagtagggagaggtggaagtagaattttctaaactcatgaaaaatctaaccctaaaaaatctcaataaacagcagttttttaagagaaacattctagcttttgaaaggtctaccctataatagctacctttactgtctgtatgccagacatgattctaagcctttgatatttattaactcatagtaactctgtgaagtaatcatcattctaaaaattcattttacaggtgaggaagctgaagaatagtgagttaaatgactcacccagagccctctgcttatatggagcaaagtaggatctg

SEQ ID NO: 32298 - DNA, 1030 bp, Homo sapiens
gctacattaattaccttacttgtcaagagtaacaggtaattactacatcaactcaccctcctgcagtatatagaaacagaactttatttgaaaagattcagcaaaccccagtgtatagccactccacacctttgtctttgctacaagaagacagctgtcagagcatttgttttatcattagcagggtagaggtgagttcacccttttctttgtgtctttccacctaagatgcgtgtccagaaacattcataggctcaacaagcatgtggactagcaagaaactttgagatgatcgagttcattaaaccttctcctgataatgtgtttcagagagggtgcatgacttttccaaagccacacaagaagtaaattaatgtccaaaccaggactggcaccagtgtcacctcactatgctgctttttgtgaagcttagtgcattttaatgatttttttataactatagaaaaatcatttggtatagtatactttgaatattcattcacttcatcctcctcacttgaacttctaaccaatgctttggctgccttacaaagagtattgatcctatattctgttgaactgccaggtacaactcatgtcatttggtttcctctccagtgtactagtgtcagcttttatgacaagttgtgttaaaattctactttaacatgttttttttttgtaaaggcgaacattttggagcatataggatgctcttagcaaaatcatgcagcattaactctcctggttgccatggcatagaaagaaaagattttgtcagcttttaggtgtggtccggaatatacacaatgacataatatgggtgtactatcttaaaaggctttgtcccctttttagtcaaacacctgtgacaaaattacgaactgtggttaacatagaatacttacaagtggtttttcggagtcgtccagggtagaggagctcagcgtgcagacaattttagtacctacttttcttcttgcacctggcactgggagtgagtgacattaaaaagaagttcaagaagtca

SEQ ID NO: 32299 - DNA, 1044 bp, Homo sapiens
tgcagtccagtagcatccttggggacatgggcatttctagtctcatctcaacgctatcctagggtgaggctttgtggcgttctgacattatagagcttgagaggaatgtaaaaaaacttgtagtccgtgatttcattcactgggcatagggctcaccagacatgggttaagacaggaggtagaactcacatggtagcctgggcaacatagcaagactctgtctctaccaaaaaattagccgggcatggtggcaggtacatgtagtcctaggtactaaggaggcttaggtgagagaattgcttgagcccaggagttcaaggctacagtgagccttgattgcttcattgcattgcggcctgggtgacagagtgagaccctgtctcaaaaaaaaaaagaaaaaaaaggatagaaactcagatgcttaaggtcaggcaggaaaagcgactttattcataatccttttgcttgctttgctgatccacttgggcagggtctggttgttttacatacatatatgtagaatgtgtgactatgtttgtgtatatgtttataggtgcgtgtatctgtatgtgtttatgtgtatgcatagaatttttttcaccattttaaggagtcccatgataggaacatttgggatgcacagacttcatcttctacacagctgaggacactgatgctcagagaggtgaagtggcccctgtagcatcctgatggaattagaaatcatgccaccttcctgctacttgccctaatattagtctcatcaccttccatgtcactctttgtgtggctagaccattgcttgtcaaactccacaccctcatttttgcctcctctttatacatttgtagtataatatacctaatatttttcctgtaaattgctttttaagttttcatcattagttattttaacatttttcataagaggaaacttcagaatttggctgtaaatggaaaactaatatgatggtgggccagaaaagaaagaacactataaaaataaatacctggtcgggcgcagtggctcccaacactttgggag

SEQ ID NO: 32300 - DNA, 1004 bp, Homo sapiens
tgggttggtcttgggagtgggagcctggagccttctcactttggatgcacgcttggtcttgctctgcgatgcgcttggcaagttgccacaattcttatgtctctctctgcttcctcatctgtgaaatgggcttaatagcacctagggaaggaagaacttgtaggtgctgtgtggattcataaattcaccctcagtgagagctttgaagatgtgaaattgtctctggggacttggaggtgttctaaacctgttgaaccagagacattggcatcttactgggttgcctgtagcagctggagagttggaggcctcagatattgggctgggtgttgggcttcaggcagctctttcctggctcctgaatgagttttagttttctccaaggaaatcttgacttgtcttagcttacacatgggggtttgtattggagttttggtttgtgttttctccatatgaaagaaggggtgtgtgagtgtgtgtgtgtgtgcgcgcttgtgtgtgtgtgtacccagaaatggtaggtaactcttactgagatgaaagaatttcaaggcttacacagccaagagagagggcattcacccctttttttcttccattggttaagtttgtcccctagatccttctctgaagtgtgggagctgtacagcactaccagtgagttccttctctgtttaattggaaggacttgttgcagcttgggcgattattctttttggctttcttttcgattatttccccacacttcagattcatttgaaacaagttttcagccttgttcaggtggaaacctgttttcagttgtgggctctcctgacctcactggaagggtgagaagagaggtgaggacgtgggggagggaccccatgccctcactgctcaaagtgtggtcctcaaacgagcagccgcggcatcacctgagttcttattagaaatgcagggtctcaggccccaccccagaccgactgaatcagtcttttgccaagatggccaggtgattcacg

SEQ ID NO: 32301 - DNA, 1877 bp, Homo sapiens
tctaaatgctttgttgcagtaaaatcaaagtggtggggtagaatgtctaggaaagtgtttcatataaattggaggggcccattggtacaggtgccatatttcccggtggttgtggctactgcgttgctctaaagtcagtgacctgtaaggccttcccctgtggccattcttgccatagaaacatgggcctgccccccgccgcctcccctcccccaacagcccatgagtttgggtgacagacaccataaggcagagtttaagcctcttttccaacgtggcagaatgagatgctttctctctttattttcctagaatctgggcaggtagtttcctcttttagggataagtctgggagcttgaagtatagaagaccctgagattgaaaatttaaaattcaatgttgttttaaatcaaagcaggttaaataaggaaccaaataatttctagaataaatggtaaagaatggaccctactgtaagtgaagtaacatgcggatgactcctgttttttttttttctttctttcctcttgaacttgggatccctgcatatcacagacaagcatcaaaacccaagattcaaatctgttactgaatccattccagaaaagtggggaaaagctaccaatttgtcatctgttataaaatttcataacctttctttttctgatattttgtactattattcattcggcttgcaatactgcaccagatttgcgcctgctcattttactgtgtgtgcatggctgtggtctttattttataagtaaggaccgtcggattgagttagcaatgccgaaatcgctcacgctgcaaagtcctcgagtcaggctttccgtggtatgggctggctattttggggtatggtcaggagggagcctgtaaaaaacctgaattgtctcattcccagggtggtctttctctgtcgaggttgtggtcattgtagcaaggcaatttgagaaaacctctcgtatcacttcctgtgtgagcttggatggaggaaaaaggaatcttcatttccgaaagttgccagtttttctagcttcccagtagagcagaagtagcttggaaagattttgaattttgtttttcactggatatgcaaatatgtttgaggaatgctggtaatgggcttgtcttgaggttttagagtgaggaataaaccacacatcatttttgattgtatttaataaagtgaatgaaaaaagccaccaaccaggtgagtgagatcaggcaccgtggggtgatttagctgtctttcaatgacggtgattcttgaagacgagttcctcggaaagtcttattttgagggtttcaccaaattttagctcaatatttagttaacacagacgaatcattatggaacatgttaattctgtttttccatttttatacaatcagtctaacatttccttttcaaatacaatactctttcaggttttgctcctaagctttttctaactttctatttctatttcaatattttctgccacccagacatcaacagatggacagggacgtttcagtaccccccctcccgcccccccacccccaagttctcacgagcagcacacacaagtgctgagttccgcctcgctgcctgcttcttggcacaggcctttgattcctgaaatgctcagagcaaaccaagaaaaaaaaagtgtttctcaggtgagcctgtccaagaagtttttttccttaaagaataatttcttttcctgctgttcttcctccccacacttcaccaaaaagggtgaagacagacagaacccagaccctcccatagttttccttcagtgtccccttgggaatgatgtcaccttggtctggttgcccccacccatgggcgaggttgtgggtgataactccatgggccatg

SEQ ID NO: 32302 - DNA, 1066 bp, Homo sapiens
cttggccatcaactgctggggggtataaatgaggtccaaaagacccaagggagaggcagtctcaatgtttggagaccaaaattatgtgagtggaggggagcctggagaaggtggccgtaagtcgaaatccctactgtgctaggatgctaaatccttttgtgagccagagtttcctctgctgatggccaggaggatggagagtcagccgagataatggaatgcacaggaactcatgccacagcaggttactcttaaaggtggataaagaagtggaaataggattagtcttgctgttttcacatttttgaaagcaatccaaaaacaccagtactttccggccgatgtagctcatattaaacgaggctgccagaaaatgaagaataagggacaacattcattcattcattcattcagaaatagattttaagagccaagaattcagtgctgagcaaaaccagacacagtgttcttaaagagtctacatgttattccattcctgtaattcctgtgcgtaactgaacatgttagatgcctacattttcctgaaggtaataaattgttcaattattttgtttgcttttatcccattactttcatataactagtagagatagattccagtggtagaatcacataaatacatttcttctggaaataagtcactgttattgtttcaatccatgttaattttctacccctcccatcagcagatccgtgggctctctttgactcaatttcgtgtacacagcttttcttcacctcctggaaccaagcttttctttttgtctgcaagtgcgggtggggccctgtcctcttgaggcagcttgtttttcacctgatcatttttttggtttgggtctcttacgccccagccagaggaacaggctcttaattcctgtccagcagggtttctttttattcccaaaggcattatgatgatcacagactcggaagttcatgctcctccaccctttgggcttgcgttttatgctgggtggagagagaggatggtggagccattgctgagtgtctgtgataccttcttctttggggaacactcagagag

SEQ ID NO: 32303 - DNA, 1047 bp, Homo sapiens
cacacctgtaattcccagcactttgggaggccaaggtgggcggatcacctgacggcaggagtttgagaccagactggccaatatggtgaaaccccatctctactaaaaatacaaaattagctggggttgggtcacgtgcctgtaatccgcagctacttgggaggccgaggcaggagaatcacttgaacccaggaggcgggggttgcagtgagctgagattgcgccactgcactccagcctgggcaacaagagtgaaactccatctcaaaaaaaaaaaaaaaggtataaatatctattgatagatatttatatctattattaatatgccaggcattgttaatttcaatactgtgtaaaaacagacttggggcatacataacacagaaacaaatgggaaatttgaattatagggaattcaacaaagaaaggccctttatatagggcaaattgacttggttgaaagccatggagttcatactaccttagaatcttagaacttcttgagaagctctggacagagctcatttttattttccagaacctttgggaggcagtatattccatggttaaaatgtggacttcagcatcagccccattccggttcaggcaaaacactgctgagctgccatttacattgctggagatgtgtgtggcactcgtttcagttgtgcagtacacctccttcccagctgttcacagcagccctgatttaggcaaaactgagtttgaattcctgcttttgccacttacggtttgtgaagcagcctgtgtttctgtagccctcccacacttggcctcctcattggtaaaatgggggttatggctcttccctcacaggtaccatggagaacactaaggactaaaggtatgttgaagctatttatgtcatgcctgccacgtggtctgcactccagaagtacttgctattgctgttattgaaatgaaagatctcccttgcacatcttcccctgcccggccacattgtgcactttgaaaaggatatccttcacattcgttttccagaaaattgaggtcactgacttattt

SEQ ID NO: 32304 - DNA, 1013 bp, Homo sapiens
acatttaagagttttcattatttgttttatgcagtttgtatcaaaagcagtcttttcttaaacatttaaatttaggacccctttgagagctagtttccaagttttctttaattaaaagggaagggtgtttaatgactaaaagctaacatataatgggttatttattgctgcttgttaaattagttggagttggtttggtcctagacaaagtgaatattagatttaaggagggtgctttccgtctttagctggtctgtttttgtttgaagttgtctatacgtagggatgtactctcagatgtatgcctctgtatttcagacggcgggggggatgtgtgctcgtgtggctatttccacgtccgcctgtcattttctatgaagagtttagcactgaaagcatgtgtgaatgcatgtgttaccgagaatgcacacatttccttttaaaaaactgactatttgtaaagagatgtatatcattcataagaattccagaacactgcccccgcctcattcactttagggcatatacaaagctatgacatggtttttgaagtttttgcagattattcagttaccaaatgtcgatcagtttaacagtatattgaaaccagctccagaagcagcacagaggagatgcacatttgaagttgctcagtggttttcagactggtgtgggccctaggactacctgagtgccagtgattctaattcagtgggtctgagagagatggcgctcagaaagcagttttttttttgtttttttttttaaagaaaacaagttgctttgatgattcgaatccacgtattccacagacttttacatatgttctgaaagttagggaactttcgctaccatctccccatcaagagcagctgcatcatagttcttctagagcacagtcctcctcataccttgaggtgcatggaggtcaagctgcagatcttgtcaaaatgcagattcttgttcagtatgtctaaggtagaggctgggaccctgcatctttgataatgttc

SEQ ID NO: 32305 - DNA, 1045 bp, Homo sapiens
gggtggatctacttttccaagtccattcagctaagaagagttttggtagatcatgaatagacttgtaacatattggaatctgtggaaccttgtagattgtcaggattggtggctcacaaagcacggtccctgtactgcagcatcagcatcatctggaaatttggtagaagtgcgttcatgggtcctattccagacctcctgaatcagaaactcaaagagggagatccaacgatctttgttttaacaagtctttcagtatgagaattactgggctccaccatccctcatttacttagaagattagcatagtaatataaagttttgggctaattggcagtctttgtcattgttgccatggtgaccaattaacctggctcaggaaaaggaaagtttttttagccacaggctacccccaactatcttataaagacgttttcttcctttaatacaagagctgtcgtggcatggctgaggacacaccttgaacaatagtaaggaggaagtccctggataaagggccgccgtgtcttagaataatgtattaaaatcattttcatcagtcatttctttttggggagattccatttgtccaccacccacccacctacccatgtatccttctattaacttgtcttttcatccatctacccatccaatcatccaacaattctttgctgaaatcctacttcgttccaggtactgtgtggtgaatgaagcagaaggaagaaatttatcatcctctgaacgttactggtatataggtatatatgtgtgtgtatgtatatatgtatgtgtatatatatgtatgtgcataggcataagtatgtatgcatgtacgtgtatgtatatatacgtgtatgtttgttatatacacatacatacacacacacgtacacacacatataataatgtttcctttttctcaagctcgcaacatctgtggtgcccaaagcccaagtacccagtcacctccttcagcatttttttctttttgtttttctggccttgggctggctccccaacccactaaattctcctgcagtaa

SEQ ID NO: 32306 - DNA, 1050 bp, Homo sapiens
gagcacaccataaatggcagctgcagagctagacatatcttggggagtttgaataagtggggttaatatgtagactagttttctctgttctcactttgggggaaaaaccaactagcgtttccattattctaatctacttctcttatggactagaatagttaaaattaacaaaatgccttgttaggagtaaaatgggagcttggattctctttattatttgttttctggactggggtttcctgttggagttctgggctggtttcaaagtcccagatgctgggcagaataagaagaggtcttccctcagggttggcatcatttacttcattgaagtgaaatagcgtgtatcagagcaagtggaaccgacacccaaaatatgacttgaagaatgtaatttaaaatgtagcatagaaaaaaaaaaaggaaaagtatgattttacatattttcagaacttctactgaatcctctcggacccataagatttttcattttttggtcaatcatttttgtatggtttgtgtcgagtgtttattgggtatgaacagttctgtaccttctgtcttgaaagtctaaatctttattccttaccaagaatgatggaacacagttaaataggggaattcacataatccagggtgagagtggtcctgaggaggtaaaaacaaacaccctgacaaaaaggtatgtcctctgcaaaataagaattccttacttataactcctcccccaacaaaaatatgaccctaaaggcaatgaagcacacaaaacataatgaaaaactataaaacgtaccttctagcatcgacttttagtgactcactgacttcataataaaatgtaaatgtaattacatttggccatcttctaccattaggcaaactggaggaagaagtacagggaacctctcccagtagggctgtagaacaaattcagataaatctttaaacctgggagtcacctggtgttatgctgccgggtctttcttggtctgctcagatggaaccactttgaatcatcagaacatggagttatcattttattcacctggg

SEQ ID NO: 32307 - DNA, 1033 bp, Homo sapiens
tgtaatcttttcagataattcctgcggtgatctgaggatttataaaaggcataataggacataggataacttcctctgttggcttgtttgttttaatcatactctgaaggatggactatctcagttttggtccatgtgcaacgttgaatgagtaattgtttttttggtcccattacaacttggtgataacatgagccaccaagaaataagacaacaattttttcatcttgagttttaggggaaatttgagtctaatttgttccttgagagagtcctatcccaaactttttgtatgatcaggacttatgagaaagccaaaggattggaaacttgggattttcaaagattttttgaaagacttctggaaatttttttgtatcataatttacctcattaggttattcattgactttttagggggaggttagaaaggacatgatgatatttttctctaagtgtgttttccatccatcctgttcctcagcaatcaatgactcccctgtagtaatgaacactgtgacttgtcattagcagagacaatgattggttgaggccaggcattttgggtgacaactctgacatcatttgtggtagccttgccattggatgaggtcagtttcatggagaaccttatcatttcagggtttgtattgaatagcatttaattggtaagaccctcatctttttctgtcttagtgcagtagtattggaagcaaattctaaataatggagagaagtgtagtgaagcagaaagggcactgtattgggagttgggaggcttaatagtaacctggcatggggcaaattaggctctctctttgattttttttcttttttttttttggagacggagtttcccaattgttccaggctggagtgcagtggcgcgatctcggctcactgcaacctccgcctcccaggttcaagcaatttttctgcctcggcctcccaagtagctgagattacaggcgcccgccaccatgcctggctaatttttgtacttttaggagagacagggtttcaccacattggc

SEQ ID NO: 32308 - DNA, 1091 bp, Homo sapiens
taagattcagaaagaatggagatactggtccacatagcagctttccataccgcgttgtgtgaagcattttggttcgatgcagagggtatgggatagatggcatgaatactatagccatggttatatattcaacagaaaggcctgttttggttatgagagggtctagaaatgccagtttgtaacgaagagaatggaggtctgtcgtaaaattcacaaactaaactttttgagttaaacttgaaagcagatagcctggctatctttatgctgtttaattaaaattttgacttctataaaaaatggtagttttagtatttttcttttgaagttgcctgctgtgagtctaattaatttttatttaataataggtttgcatctttgaactgtttttcttgtcttagggctgggtatcttgttagtgagtggaaaggaatgttggaagaggagcgataaaggatgtttcagtcccttactgggcgtggtgtgagatgaattctgaggttgtgactgggcccagtgggcgagagcattgagctgctcacctgggtcggctccacatgcaggtcacagaactgtggtgtacgtgctgggtatttgctgagcttagacaggtctgttttttcaacttgtatgaaggagaaaaaaggaggtgaagagaacatacccttcccaacaggggggagagccttcacagaatgtccactcctggattcattcatctattcaattgttcagtcaacagatatttaccaagtgcctgttttgtacatgacactgttccaggcatgtgggataaatcaatgaacaaaacagacaaagatcctggccttgtgggcactcattctggggagagaaaggatgcagacagacagacataataagtagattagttaggaggttagaaggggtgtgcaggagaagaaaaaccagggaatgaggttggcagttctgtggagtgagagtgggctgtgcttttgattgtgacgccaagtagttctttttaaaggtgctgtttgagtaaggacttgaaggaggtgaatgagttagacttgtagaacattccaggcagagggaacagttaatcaaagacc

SEQ ID NO: 32309 - DNA, 1021 bp, Homo sapiens
cactctcctctgtgtgtctgccacacttctgctctccatttcatcaactgcagatgtggcacacagccgtcttagaaaagtcatgaactgtgtcgtctgtgcggcttaacagccaacatctgctgcagcaggctgaaggaagaggcagggaaatcattttcgggaatgcactcaagtgcctcaacttagcctctactttggcctgtgcagacaattattttacactaattgcatcaagatagcagctataaaaacgagatttcgatcgctctgctcccccacccctcttgtgaaagttgcagttacaaaggggtagttcttttttctttttattgtggtttgtttcttgttctcaaaagcttattacattgggtgcaaacaacaacaaaaatgccataaaaaggcaagaatcgtaatatgcttaagagctaaaaagacctatggtgttggtttaaccaatgaaaatattcctgcaggtattgtaaaatttatgtgccatatgaaaaacattaagggtgttgtttttttcacagaggaaaatgttcattgttgagccattttgtaaattattttaatgctgcatttctgcttaaacctcatgattttgatatataagccagtttaatgttttctatacagaccctggcttttcttaaattttatatattggaaagcccatgtttgtattggaaactgctggtttctttcatactgaaaatctgtctcgcgcggcgtgatgccatgtggcaaaggagtagtttgaccagagtcaaacctcgagtgttgacttttgagtcctaaaaactaggcaagaccgtctgaataaataatctagaaggtgtttttttgtttgttttaaaaccaggagtcttttgacagcaataagaatagcatctctgcagtacagtatggactttctaatgcattggtctgtttcaacttttcatcttcttgtaacagaggcaacattgtgttcagtatctgagccttaactttttttttttaatgctctcggagtaaa

SEQ ID NO: 32310 - DNA, 1026 bp, Homo sapiens
tgtgttcacattcttctctgccttgggccccaagaacagcaagttgccttctaatgtcatagaaggaagaaaatacatgcattgccccttaagtgtggctctgagtggcccttgctgggtgacattggttccctagtggtattcagagccctttaaaaagaggtcaaacggggcccaaaggagcacagcaatccgtggagaccatctgggcctcgccctagaggccccacctctaccttctttttggataaggcctgatatggttgtttacctgccaagccctcctttcctcaaagaagagcgttcttgctgggtttccacaaacctgctgtctagtcctgcactgtttgttccttgatctggtggttggggctgcactggttgcattttggtaggcaggcagacccctcacagtgttaaaatgaaggggaggaaagggtaacctttcctaaactacctaagaagaatgctaatcccaactgtttcagaaacctgtaatttttagtttatgtaaaactcagatagattgaattcccccttgaacctttttgtatttcataagagttttatttcctaaaactgacagcagtgacagttgtgttagaattcagccctgagtatttatttctagatttcacaatttgttttgtcttcgtagcaagcaattgccttccttcctttctctcttcctctctgtgtctctgtctctctccccttcctttctttgcaatttccttcttttctcaagctcatgatgaaaattgacccttcagttttattttcagatgaaagctcaagcaacaagccagcgcttgcctccattagtggctctgggtagtccttgcaggagaaatcaccatcagcaaatcatcgtccgtttagagtgggctgcagaggctaggcagctccctgacttcactgtccaggagcctcttagaaatgagcaaggagtggcactggtgctagtgccattcagcaaggctttggaggtgtgcttcgctgcattggggtacctgatgaacagca

SEQ ID NO: 32311 - DNA, 1030 bp, Homo sapiens
cccgagttcaagcgattctcctgcctcagcctcccgagtagctggaactacaggcacctgccaccacgcccggctaattttttgtgtttttagtagagacagagtttcaccatgttagccaggatggtctcgatctcctgacctcgtgatctgctcacgtcggcctcccaaagtgctgggattacaggcgtgagctttttatttttgacagttttcaaggtgaaagatggtatagaattctggaaatgtgctttctttaataactaatgaaattgtccttttcacaccctttggtttctggccatttgcagtgcttttgtgatttacctatttgtattatatacagggtttttatatgtgatgtttgatttattagaagtctttttacgttatagactttaatacatattacatatatagtgtgtttgcggaaaattaccccaatttttatgttttccttcctttcatttatgccttataacattctgtaagacagatttttctacccatcccatttattttcttataattgtttaattttttttccttttcttccttctcttcctcctcctcttctttctcttcctcctcttttttctttttccttttttagtatttaactctatcttaattgtatttcagtgtatggtatgaggtaagagtttgatttgattattaaaaaatcgcagttctagaattattaaataatacttctctataatggattttaaaagctgtagtatacgctaaattttaatgtagggcttatttccatgcacttttttcggtttcactgagaagcaatattaagtgttgattatatgcatggaccctggaacacgttccacccactgtaaacatctaaaggcaacattttcttacatgaaaatgtggattatagtagaaccatctaatgggggtgccatgggcagtaaatgagataattatataaagaagtgactatttatgtcagtttatctgggacagtgactcctgggttagcattgtctcagatttttcattttatgct

SEQ ID NO: 32312 - DNA, 1067 bp, Homo sapiens
agttttgattctcaaagtggaaatacccatccctttgggtccaggaaaagaaaactcagctcacagtttcagaaatttggactgtttttttcccccctctgtctttctatttgaaacgtctcacaattaaagagcaagaaaaatataaaaaaggaactcaactagttaccattcaaaaggtgtcagctaaaatctcactgcaaagggaaaaaaaaaggtttaacatcttgccactggctgcatcccccaccccccttagactttggattagtcattgtatgagagagagggagaaaaaaaaaatcactttttttttttttttggaaaagtaaagtaaacagcctccaactgctgaaccttgacaacccaaattaaggaagcaggagagatcaaacagaactgctgctgggtggttgtcaggagctgctacacggagaaccctggactattcgatcaagcagcaaggctatatgttcacttatgcagaaatggaccattgcagatgctaatctttgttgtgcaagcgaaggctcacttggaaggaaatactcagcccctctctgggcagcatttgagttccttatggatgccgagtcgcgaaacaagttattttttttaatgtatccttctttatgaggagaatgctacccaaaaatgtattaaaggaatattaagtcgtccagagactgtcttgctaccaagaactgtgcaatggaattctttttaccaacattagactcctacactagagttagataacgttttctcacattgagtttagaagatctgccttgtcagggaagccaaggttttgtatgtgagagtttaaatctgatgtgaagctcaaaaaaaaaaaaaaaaagaaaaaagaaaaaaaagaaaaaaaaaatctctggtgatgaagttttgtgtcagcccactcttggaatttaaaaaggcgagagagagcagtctccagattagacaacctctttttttagattgacattcaacatgaccacgttgctacttttattcaagttctctgtaacttgtccttgcttgttgtctaggaaaatttaactact

SEQ ID NO: 32313 - DNA, 1048 bp, Homo sapiens
ttgtgatgtatttttaaaaatatatagcaggattttattagctaatattttgctgaggatttttacagctacattcactagggtagttttgtactgactttgtctggttttggcctcaggttaacgatggcctcatagaatgagttgggaagtattcccacctcttttattttctggaaaagattgtttagaattggttttgtttcatctttaaatgttgggtagagtttgccagtaaaatcatctgaaactggaggagtttttgtttgtttgtttggctttttttgtggcgaagggaagacttctaactatgaattcaattcaaaaaaataaatgtaagattactctggttacttttttcttcttgggtgaattttgacagtttgctgcttttaagaaattggtccattatgtctaagtttttaaattcatgtgcaaataattgtcatagtattttttattagaattttagtatctgtaaagtctgtagtgataacaccttttatttctgatattggtaatttgtgtcttttctctgcttttgtttgtcagtctggctagtggtttataaattttattgatcttctcaaagaaccagcttttgttttatcgatttttttctgttttctgttttcagaaaacagaattatttcatttattaggtatttcttctgtttgctttgggattatttgctcttatttttgttgtttcttacgttggaggctaaattgctgatttgagacctctttttctaataaacatttaatactataaatttccatccaagcattcctatcgctgtatccaacacatgttgatgtgttgtattttatttttatccaattcaaaatatttaaaaatttcccttgggacacagttataatgacttttaaggttttcatctgataattcttacatctgtgtcatttcagagttggttttgatttttctcaatttaggtcctattttcttgcttctttacatgcctggtaatttttgataggatgccagacactgaattttaccttgttgggttctggatatttt

SEQ ID NO: 32314 - DNA, 1069 bp, Homo sapiens
tactttcagtggcttctcatggttcttagaataaaatccaagcccctgatcctagcccagacagctttccgtggcccggcctttgcacatctttctcctttatcttataccaccctcttcattgtcctctctgcttcacccactctgatctcctttcccatccttggatgtacaagcaggcctttgcctgtgctgttctttctgcctggagcactcttcctcccccctcaaatcctcatgtgtttggcttattctccaggttccagctcagatgtcacctcctcagagtcctttcctgaccactttacctaaaatggcctttctcaatttctttatctcatcaccctgtttatttctctcgtaaaactcgtctctacaggttatgatactgttgatgtatttgtctacctttcccctttagagtataagcttcttgagggttgggaccaggcctatcttgttcacttctgcttccctagcatctaaaatatctaggttcttggtaatattgctgaatgaatgaataaggtacgtgtgtgtgtgtgtgtgtgtgtgtgtgtgtttgtgtaatcaaatagacatgggcggtgaaagagagggagtcagcgatttctaacttcgtcattttgtcccacttaagcagaccctggtagaaggatgcctgcatttgggaagtgacaccaggaaacagtggtagagtagtggaaaagtgagtaaggctagggaagtcaatgaattatcaagcttgctaccttgtggataactgggaagaccacttaggaaccctgggcagcagaatagaatgtgtgcttcagaatgactccccccgaccctcgtgatgcccctgtcccctgggggctgggggagctgcagtacatatctaccaaatctttctttctttcttttttttttctttttgagatggagtctcactctgttgcccaggctggagtgcaatggcacaatcacggctcactgcagcatcaacctcccaggctcaagtgatcctcccacctaagcctcctgagtagctgggactacaggcatgtgctaccatgcctggctgatt

SEQ ID NO: 32315 - DNA, 1036 bp, Homo sapiens
aatgactacccttgactaagaggaggacgttggggagcctgcctttctgcggtaacatcagcctccttttcgggatgatgtttctccccaccaccctaatgaagaaaatagaacatcaggcaactgagaatactggtcaaagtccaatcagaaatgggcctggaggtgtggtagtctggaatgcccatgcaagggtaatatgatcttggaagcctgcagagcctgacttctatttgacacaaaaaaaggcaggttatctccggagtgggttaagcctcaatttgcaggcttggctagtgttttcggcaagccacaagccagagtctctaatgaccagtcttactgtagcaagtagacttgaggatggttgcagcttctcacctccccttgtgagatcactgtggtgtagagatgtctttttcttggtatgtaaggaacattaagaggaggtttgtctggggacggggaaaagagaagtgacttgcttcctaataaacttgtgttctctgctttctgttggcaaaaaaaaaataaaaataaaaatagtgaaatcacatgcctgctttgttcctgcagctactggtttgagaatactgaattactccccccaccaaatattgcttattgtcttcatagatgttctttagaaaatactgttttagacttctccttgtttcccaacagggtactttttccccctctcaaatggcgaaagtgataccttcgtttataagtatgtgaaagttgctgtttaagagtcccagacttttacctttggggccagaatttagaattttataaaggtactatggtgcatagactgtatattatgtaccccatagcctatgcgttaatatttctgcagcaaaatgtgtgaacattcacactaagtgggctaactagactctataaagagccccacatcagctcaggtcttgccaacgttgagttagtttttaaaaataaaactttgtgccttagaacctgtgaatttcaaaattgtgaataagggactgtgaatctgtatttatattgt

SEQ ID NO: 32316 - DNA, 1031 bp, Homo sapiens
aatcaaggcagtgagctggttacctctggtttgcagatgagttggccgagagaaaggtgcagagacttgcccagcatcacttagctggtcggtgagtggcagaccacagccctgtgtgattccagagggaatacttccagctaagagacgcttctttcaatttattggtggaaagtggttctatactgagacactctcccctccaccttgcccttacagtatgaagtaatctccttccttggaggtggaggccagtgtttgtggtttcttaagacaaaatggaaacaagaaattaagcaataattataatatgattaatgataacatttatcaagcatggaccctgtgccagactcttttacaaattacatgtattcgcttgcttaatcctctaggaacttttcttatctagcgaggcaaagtgacttgtccaaggtgacttagctggaaagtggtgagccaggattcaaatacggacactttgaccccaggctcctcctcttaaccactttctgtatacttattgagcacctactcaatgccagactcgtgttaagcattatctcaccatccaccatttgacaaatgaggaaacagaggctcagagtggttaagtgacctgttgaaagtgataggacttaaaaagtgctggaactaagatctgaatcaggatgtctatcatgcctgtccttggactctcttgctccatgtcatgccaaagtgtgccatttccactgcaaagcctaaaacagcctcatgcataaaactgcaaggagcccattgcggttggattccagagggtttgctaccctgaaggagaggccttggatcttttctatgccacattccattaagatatcctctttatttgacgcatgggaaatggaggcccaaggaggctaaatgacttgcacaaagtcatgacttcctgagaggtgacagcaagatctgaatactagtgcttttcacatagggtactggcctaagcagttgcacactttggatgataataaacttggaaattgaggacc

SEQ ID NO: 32317 - DNA, 1046 bp, Homo sapiens
taaagaagctaatactgttttgagatagaaggaaatattttgtggggcatgtgacttttgtgttaaggcagtttacccatcttggctgatgtggggaaagtgcaaacttccagtagaatcccggtcttttcatccaagtgcttgcaggggcagccttgtagtctgcaaagaaccatgcagaaaccaaagagcttgcttttttgtctttgtaattccttagggtctgtgatatatgccaggaaatctgattgaaactaatatgctttttattctcccattattccctaaattgttatatcacaggcacttgcctacattgggaaagtaaggacaaataatacccatttaaagtaacttgcctatattttgactgtctttcgtaagcacttgctgaactgctgacttaactcagttttaagatttcctctttccccccaacttttccacatttcttaaatgagggtgtaatttactgcaaacatgtacatttaatataatattgctgttagattcgtggtacactttatgaagcaaaaacatgaaaaggaaaccacaactctaataaactttaaattaaagattaagatgactctttctcacccctcttcttgagtttagcccatgtctacaccatgcacacagtcacaagactttatagcttagaaactttaggtataattgggtcctatagacataatatacaatccaccaactgagccttggccgaacttgtcccttgttaaagacgtagggctagccagccacagagctgggtattgaagtcggcaagttgtatcccggtgcaggcgtccttaaatggagagtactcagaatctgccagccttaacctgcccactagccaccctaatcaagcattaaatatctgatccaatctggccactggtgtaactccgtaatcagacatcctgtttgtaaacagctcctccttctctccctctccctctcagagacagaagtggtgctggggtttggagtttgaaaataaccttcctatgacaggaagtgggcttttgctattagttgcc

SEQ ID NO: 32318 - DNA, 1033 bp, Homo sapiens
gtggacgtggaaaacactaattgcactctgtaaagaattctttgtcctttgctgattggttttggaaacggtcttaacaggagggagagtgaagagaagacttgccgaagccgatgctggtcaatttagagtgggtttctgtccttgcagatgggcaattaggactcaaagtggcaggtggggtggggggagattgtgtgggtttctaccgtcacattacttgctttttaaaaaaaacacacacaaaaaactttttttttggctttctaaattctctgttcttttcactctgatttttttttttttttgccgtttaaaattccttattcagcctaattattgttttctacactcccctttcattgaggcacaagaaatgggtttccctttaagtagctctgctgtacctagttaatgagaatatgcataatcgtgacaatactgcttttgaataccacactgtacaaggaggaacactagcttggagaaatctgtcttctgattatttgttgtgacacattcctatgtactgtgagctgggcattgtttttttctgtcccagggaaaagaaaaaccatacttaatgtgattttgcactgacagcacacaaatctttaattttcctttttaaaacatttttttttagtgataaaaggaaaataatagttggattgcataacatgaaaactataatcacaattcagtatcaggatataaatcaagctctaagtctttggaccctctgtggaaacatttctaacccgaattttaatttggccttttcaaccaaaggcttagagtggtagcaagggatttcttccaataggaaacctgatgtttctgatttaaagagaaggtgatattttaattgtttgaattaagctccttgcaaagttcgggtgtgtttacccacttagggctttctttcccagtcaacgctaacacattttgttaaatgatccctttccctgctcacattgtgtgtcatttctcatcatcagtagtcctccagcctgggcagctgtccccaccc

SEQ ID NO: 32319 - DNA, 1049 bp, Homo sapiens
gctgcagtgagccgagtagcatgatgctactgcactccaacctgggtgacagagcagcaagacccagtcttaaaaaacaaaaagaaaaataaaacagaactggaaggggcttaaaaggtgaaatgggccagcccatctgcctccctagaaccccattcactgctaagtgtgggtagcgtgttggggatcaaagcacccagagtcctgaatcaccccacctttatcagacgttgcttcctggtaatggttaaccagatccgggaggtagattgtcacactcagtcttttgccttagagaaaatgttatgtatttcgtaggtctccctgtggcatcttctactttaaaaaacgttaagtgtttgaaaatatttttggtagcataatttttttaaattcctgagttccggctgggcctggtggctcacgcctataatcccactactttgggaggctgaggcaggtggttcacttgaggtcaggagttccagaccagcctgtccaacatggtgagacccccatctctaccaaaaatacaaaaattagctggacgtggtggcacacgcctgtatcccagctactccagaggctgaggctggagaattgcttgaacctgggaggcagaggaggttgcagtgagccaagattgcgccactgcactccagcctgggctacagagcaaaactacgtctcaaaaaaatatatatatattctagagttcctaattaaaattagtaattttgcaagccagatgataggtctgaatatctattggcagggggaaacttgatttggaaaaataaaacttagcaattttatgaaacttcatttcccatggagagtgttgagaggtagggagcaggggcacctagatataattgctgtcaccctggtgtggttctttgttttgttttatttttagtttatttttaaagataggcttgtaagcggctctgtcttgggttgtgtcaggcaccccctctccccaccccctgcaatgcattttgtggggcacattttcccctgcggcatttgcttgcagcccaacatac

SEQ ID NO: 32320 - DNA, 1028 bp, Homo sapiens
cgtgattgaatgttctactgaaatgctaatacttcctcattatgaatgactatgacacagaactgagggagaattcacgcctagtggtgaaatgttaacagtatgaataggtgtgtggacccattgttttccatcatgattcattttcattgcttttgtgtgctcttttgaaaaagtcttctttttcataatgaaaacatcttagtgctattaaaccaatgtttggtagatcagactgcaggtcacacatttaacagagttagagaaaaggacgacagccctacacatgtatgataaatttcctatatccaaaactgttcctggagtcagtaacccattttttaactaccgtatttcattgaatctaagatgctcttgaagataaaatgctccattattttagtattactgaaaaagaaaaataaaaggctcccaattaaactgtaacacattattggtaccagaggtcttcaaatatatgtgtggtagttgtgaggagtgcgtcttagaattgctgaaatacatttcattattgcttcactttttccaactctttgccaaaaaaggataaaaaaatcaaattttgttttgtgagtatcctagtatgacaggggatattaacactaaggcctccctgtaaggaatcatataattacaggccaaatgacctagatgttaagcagtgggactgatctggcactacagatattctgaattttaaatggaagtttaaaagagacagaaaaatggcactgcagaagttgcttattggctgcgtggtgtagaagttgccaatttgccgatgccatttttattctttagggatactttaattgtattttcaccccagatattaattgaaaggtcatcaagggttttttctttttttttatttcacaagactagcagaaactctatagacggaagtgtatttcattggcatttatgtatggggctaaaacattttttcccacctttgaaccagctccacacttgactctaaagaggagaacaccaatttggggtcg

SEQ ID NO: 32321 - DNA, 1029 bp, Homo sapiens
agtgggatcacttaaggccaagagtttgagaccagcctgggcaacatagtaagaccctccctctacaaaaaatacaaaaattagctggctgtggtgacatgcacctgtagtcccagctacttggaaggctgaggcagaaggattgcttgagcccaggaggtcgagaatacagtgagctatgattatgccactgcactccagcctgggcaacagagtgagaccttttcccaaaaacaaacaaacaaaaaaattgggattcagcaaaaatggtggacttgatgaaaacataccaagagaatcaactgtaaaactccacttaaaaaaggcaagtgtgtatatggcttgaatgggcagctcagcagtgagggatgaagagcaggaaatcacaaatgggtcacctgtattcaaatcacatatttgtggctatgggcaagttcccaaacctctctaagtaccagcctgctcacctgtaatggtgataaataatattgacagctgcataaataggattgcagggattcagtgcttcaacggaggtcagaggctcagcacactagcaagaattcggcacttacatgttagtcactgacactggtgtgttacactaataagtacttcctagttgttattttattctagagtccttttagggcctctggaaacgtgatttcttcaaaaaacctggataatgaaactgaggggacctatgtaacttggtacaattatctcctgcactggaatacaagtaaagaccagactgtggagacggaggcatttaaaaagaaccatatatagcaaattttcatcagtgctttttttttttttttttttggtctaggttaaatggtattatcctcacattgtgtttgcttaaaattgacataatactgtatgaagcaaacatttgcattatactcattataaacctttcaaattgaagtgaactttaaaaattagttaaaaaaatttttttgaaatacagttttttgaatgaaaaaagaatgcaaagtatatttcctccctttgagc

SEQ ID NO: 32322 - DNA, 1044 bp, Homo sapiens
gttgcttctaggccccggctgaaaaacgtggacaggagcactgcacagcagttggcagtaactgtgggcaacgtcaccgtcattatcacagactttaaggaaaagactcgctcctcatcgacatcctcatccacagtgacctccagtgcagggtcagaacagcagaaccagagcagctcggggtcagagagcacagacaagggctcctcccgttcctccacgccaaagggcgacatgtcagcagtcaatgatgaatctttctgaaattgcacatggaattgtgaaaactatgaatcagggtatgaaattcaaaacctccacctgcccatgctgcttgcatccctggagaatcttctgtggacatcgacctcttagtgatgctgccaggataatttctgcttgccatgggcatctggccaccaaggaatttcgcaccctgacgattactcttgacacttttatgtattccattgttttatatgattttcctaacaatcatttataattggatgtgctcctgaatctactttttataaaaaaaaaaaaatctgctgtgcacaattttccatgtacattacaactggttttttgtttttgttttgttgccggtggggagggctgggagggggagggaacttttatttattgtgttcacaaactccatcctttcagcatatccttttaagtttagttctttcttccagttatactatgtactatcagttttgatataactatatatatataaatataaaattatatataaagggttatttgaaaccaatccatggcaacgctggtgcttgatacactgtgaagtgaatacaacattgaacagttacagatctgggacagtcccttctatgaaagtgctgaaatttaattaaaatcagtcttatatgaagtatgttccaatccatgtgggaacttgactctctcatctgtctaaagagtactggacgatataaaaatatatattttttaaacaatgtgatctcaaatttaaagactgctccagatagcctgcatttgcaatggaataac

SEQ ID NO: 32323 - DNA, 1041 bp, Homo sapiens
tggcccagattcaccttagttctttgagagaactaatttttctcattgtggcaattgtaattggccctcggaatggatctgtttttaaaatagtgaagtgaacattacattgcattttttacttttgagataaattttggtaaacaagtcttgatttttttcatgcgtaaaactgcctgcttaatggttaaagtctccttatgctttaatgtaaacgtttgttatcaaagatgtgcaacagcctgatagcaaaaacagatgcacagataagctcaagtaaccagtgaaatctaaaactattcataaggtgagtttagttttgaattattatatacactaacctgtgtatataaccagtattgggggcagagtcctattggtacagataattaacactggctatcaattttcctatataacaaagcacaggctttttatccaaggtgtctctatttgtatttaggcaattttaatagctaaggagttgacctatacgtgacttgcatttgaattcttaactgtaatatgccagtaactttagtagttttgaatgcagctcctctcttcgagcctcttgggacactgcgtctgtccttgtctgtcagattctcaaaaactttacctgggacacacacaagtaaacctgggttcagtagtttccctttccttttttcctttcttgagagtggggagaagcttctttgttggacagaaatcactcatctcattttttttctggcactttatggattttacaccatctcctacagaatagagttttgattagagtattcaagaccaaattgcttactttcagggtagctttattattccagcccaatactgcactccctactgcatttttgatacaaacttgctcatttgaaagggtgtgaaaagaatgatgtggttcctgagatttagctactcagggagtaggaggagacagcaggagttgggttaaatctaggaggaatgaggtgggggaatgtctagtgttttgaggaagggctgtgagaaacaaaatgctattttctgaga

SEQ ID NO: 32324 - DNA, 1052 bp, Homo sapiens
tttccagtttcttctctagttaaaatatggaggaagtcacaggacatccagtttgttcttgggtactatgggacaaaatatatgacagtaaactatcagctcatcttggcaagtacttttggtgtggaccactgaagcatatttgtaggaagggagttacattttggtgctcaggatgggagtgatgatagtttcaaagatttctattttggaagagggatctcaaatgcctagggtttctgaaaaatttcactgtatacagtttctgctactgcaattacgttataaataaatgctttaattataagatacaactttatatgtgtaaagatgtgtatactaggttaagatttaaaaccgtgggttgcaattaaaataaaagattccctgaaattcatggaactggacgatgtctttcctttccttctttatgtttttttaaagacagggtctcgctctgttgcccaggctagagggcaggagcatgctcataggccactgcagccttgaacttctgggcttaaacaatcttcccatttcagcgtctcaagtagctaggactacaggcttgtgccaccaggcacaatttaatttggttaaatttttttttttttttgtaaagatgaagtcttgatatgttgcacaggctggtcttgaactcctggcctcaagtgatccttctgtcttgacctcccaaagtgttgggattacaggcatgaaccactgagcctggccagaactagatgatgtctatgtcttttccagttctaaaatactgtgttatgtcagtttgggcaatttgtcatacagtaagatgactcttaaaattttacagtgccaagttacttgtctacaaatatatagagaagataatttgtcatttattctcccccaatgtgttgtatagatattcatgcgttttgtgacgacttttctttctttctttctttctttctttctttctttctttctttctttctttctttctttctttctttctttcctttctttcctttctttctttctctctttctctctttctctctttctct

SEQ ID NO: 32325 - DNA, 1035 bp, Homo sapiens
tggaaaatagtttggcagtttcttacaaaatgaaacatatacttaccatatgacctagcagttgcctcctgagcatttatgccagagaaatgaaagctaatgttcacaaaaaaaacctgtccacagctttatatgtaatagcccaaaactagaaaaaactcacacgttcttcagtaggtgaatggtacattcatactatggaatactattcagcaacaaaaaggaacaaactatggatacatagaataacttgggtggactcctggggctttatgctgagtgaaaaaagccaatcttaaaaggtctcgtactataggataatttcaagaattaacattcttgaaatgacaaaattacagagataagagaacacattagtggttgccaggagttaggactagtggcaggagggagggagatggatgtaactgtaaaagggtagcaagaggaagatctttgtggtgatgaagtaggtttgcatcttgattgtagtggtaattacatgaatctaaacgtgataaagtggcatagaactatatgcatacctaccagtgtcattgtgttatcaagaaggtgcacatgttgggaaactgggtggagattacatgggacctctgtgtaccatttttgcaacttcctgtgaatttataattattttcaaaatagttaaaaatgttgagaatatgtgatgataaaggaaaaggttcataatcagaaaaacaagttacaaaatgataaaattacatgaaactaatatttcataccattcatactaatacatatacctggaaggaatgactgataaaaaccttaactctgagatgatggattcttttttgcatttctgtagtgtatgtgtggatgagtcagtatcacttttatagttggaagaaagcagttttcctaataggaaatttttagaattaatctggtttggaatatttaagtgacaatgtgtttttacattaagggattaaaatttttatcaggcacactactaacttagtattaaaacagctgttaagattggaaagt

SEQ ID NO: 32326 - DNA, 1034 bp, Homo sapiens
aagtgagtttgacaggttttcatcctatcctgtcttgtgtgttaactgttggttaatccctttgtgatactggttactgccatgtttttttcttggccctcttgtattttttttgtacctcaaaagtttgagtatgaacttgacattttctatcttgtgtagttttaatcagacttggtatagattgatggcagtagaaaacttgtgttttggatgctgggtaataggcaatatttgtgatttttagaataatttgtttcgtggcacagaaattgtattttattgctctgagctggtgttatgtattttaacaattctagctagttggctagccggtggttattttgcagtttttgatcattctcatcactgtcaccttcatctaccagtcaaccaaggaaaccacctatgacttagtggtaggccagtatgatagagaactatatttgccctttgagggtagaattgatattgctgatgtgattgggaaaatactgccattcgtctgaagaacacttattaaattcgtaggatatgaaagatgctgctgaagggattggagagaggagaggggagtgttaaaatgttgataagccgtgtatgggaatgaccataattccaattataaaggctgtacggaagcaggggtctggcttagggaatcagttagaaggattccttcttctccacttcttttggacaaggagaattaaaaaatcacctgtcaccttttcactattaccatgtacgtcagatatttttagttctgcaggtggaattgttaaggtgattgagaatgaggtcttttttttctttttggagcagcaatagagcagaatgaaaggtgagatggtcttaaggaatctgttaagggaagaaggtggcctaggctgtgtggaggttcaggggcagcaggagagatctatattttagatgtattatcagtatgtgttgggtgtctttggttttttgataaacttgtttttctaactagactgtccactctttgtgccttttctggttatatatatatc

SEQ ID NO: 32327 - DNA, 1052 bp, Homo sapiens
tacaaaaaaaaaaaaaaaaattgcgggcaaggtggtgtgcacctgtaatcccagctacttgggaggctgaggcacaagaatctcttgaatccgggaggcagaggttgctgtgagctgagatcacacccgggcactccaacctgggtgacagacagaaactctgtctcaaaaagaaaaacccaaacaaacaacaacaaaacaacttaatatatgctgaataaaagcaattccatgcttgtgcacttaatctaagagaaatgagcgtggatgtctacccaaaaacaggtacggaaatatccatagcagctttattaataatatcccccaaacagaaacaacacagaaactgtggtgtgttcatgtatggagtactactgagtaatgaaagagaatgaaatactgaaatatacagtaacatggccgaatgtcacagatacatcaatacaaaagaaaacattcagggtgattctatttagttgaagtttagaaacaggtgaactgaatctatgataatagaggtcattttggagggtgttgattttgagggggatagagtaggagagagccatctggagtgcagggaatgttgataccttcactggggtagtgattacatgagtaaaacttgagtatttagccgaatgtaaattatacatagtagaaaactaaacattttacaaagaatttctttccactggtaacgttgtcttgaggggctgcagaatgggacatcccaatgactgtgcttgatagcagcaatctggggtcggttgtgtcctcaaccccattctacaatggtcaattgcatatgctcttgcccacctgtgctgggcaacaatcaccaatcagccaaggctctgtcaatgcctgtgcattaagccagtgccctcaggactgcttccacctggaggacaaaggctgaggccacacaagctctaggacagcggacagcttttctcaaacttcagtgtgtaaaataatcacctggtgatgttataaaaatactgattctgatctaataggtcctggggtggggatgtcctcaaatgtat

SEQ ID NO: 32328 - DNA, 1060 bp, Homo sapiens
gtcaactacgtttataaagtggaagaattggagtagatgacttctgtgctcccttaaagaatgaaatttcagtggatctctctagcatagccacttatatgtgtcatgcaggaagtcctttctgaatattcattgagtttctgcacttagaaagttacaaagaaacgcgatggtagtcaaacctcacaaaaattcactaatgagcaagcctcttaataaatttcatccacattctagtatatcatttccttcccagcatctttcccatccatcttgccagtatttttattgtttgacttactgttgatcattgatattgtacagtgcaaataaattgcaagtcaaccaaaagatcaaggatttcacgaaaacattggaagtgatatgggggatgtgcttgaaccacatggaaccactcaccatagtaaacaattgaagaagaaaactctacaataatagtgaaattagtggaaagtccttattttgaatattaaaggattgattaaaagattgatttgagcatcacatgattgagaggcccttgaggaaactgatgatacccttgatttttttctgtaagaattaccttctctgattctgctacaaaaagaccaacatgaagtgatgaatgttagatggtgctgtaatataattttgttagaacaattacaaatacaattaatatttggttcattctttgctgtttttgagaattagtacatggttgcagttttaacctacatattgttaacattgttaaatatttcatcaatttatttttgtagtttgtagttttgtttcaaggtgaagtatttggtttttgttgttgtttttttgacacaagagtctccctctgttgctgaggctggagtgtagtgctgcagtctctgctcactacaacctccgcctcccaggtacaagtgattctcctgcctcagcctcctgagtagctgggattacaggcacctgctaccacacccggctaatttttatatttttagtagagacaggatttccccatgttggccaggctggtctcgaactcctgacctcaagtgat

SEQ ID NO: 32329 - DNA, 1075 bp, Homo sapiens
aggcacagtggctcatgcctgtaatcctagaactttgggaggccaaggcaggcagatcacctgaggtcaggagttcgagaccaacctggccaacatggcgaaaccccgtctctactaaaatacaaaaattagctgggtgtagtggcacgtgcctgtaatcccagccactcaggaggctggggcacaagaactgcttgaatctgggaggcggaggttgcagtgagccgagattgcaccactgcacgccagcctgggtgacagagtgagactgtctcaaaaaaaaaaaaaaaatatatatatatatatatatatatatatgtcatgtgaatctgggaggcagaggttgcagtgtgctgagatcgtgccactgcattccagcctgggcgacagaaggaaactgtctttaaaaaaaaaaaaaaatgaatcagtgaaaaatgcagccctgatgcactgtttcagtgcagtctggaggtagagctactcttgggaggctagtgccatagaaggaagtaacaggtagaggtctgaggagacaggcaagtggtggcatctgaatggacagaaatgggttcaggggcaggcatgtggaccgtaacttcaggcaaggtccctgtgaaagttgaagatcttgtacaagaaggcagctaatgggcagaaagcccagctttgcagagtcagggttttgagataaaatgtttctgagtctgggcctcaggaccagtctgacctagaaggggggctaaggaaagaactcttgagcaatggaaccattagagtagggccccatgcatctttttacttaaagccaagattggtgagtaaatgcaaggtggagattcatcctcatgctctgggtgtaagagggatgggacagagtcaggctgccctgtacacaatgtgtgaagtcagcaatgcctcaccacaacagttgacccaggaacagggggaacctcccaccattcccatcccactgtttgatcagatccaagaatccacaatattgagagtgaatgaaaagtgtcagctggtaatgatgacttcaacatagtcagaactctttggggtgttccaaaca

SEQ ID NO: 32330 - DNA, 1044 bp, Homo sapiens
tcaagaccagcctgggcaacatagtgagaccctgtctgtattaaaaaaaaaacaaaacaaaaaacctataaagggaactcttaattggaatgactcctaggtgctatagaaaatgatagctacaatgtcaattgtgacttagaagaaaaatagtcttgatatttttgctaccgccatgattgataaataaatgctttagtgtggattttaatgtctgttttgaatgagccattatatgggatttattttttatttctcttcatgggggagcaattatattgcagaatgaaatatgaaaaaacttgaggctatacctgttgtacagaaaatgcttagggattgctcaagataatgcctaataacatacagcaggtggtgtcagcatttgtgttggaaatctagatttcgccagatggaaaattgaatgtttaacccctgaggtcataatggcatgtcatcacttcatttgatcctcctgctaattgagcttatcaaataccctgctgccatttcctgttgttactttcattttcataataaaattaaatggggatagtctatttgtgtgggttttggtttttcttttttttaggaatgatgattttgtaaacatgtaatgaatattgaggtatgtaccaggatctcatttctgtgagtgcctgtttctctctttgtgatattctttattagctagagagaagtttatttttcattaaagaagaaagatataggctgccaagtagatgtagggattatcagaccttccctgaaaaaactttttctcttggttttatgttgtgggaaatgaagtgaaattcttaggttctttgtaattgttgtgctaatagtacttttaaaaaatgggataatgtattggggagtgaggtaggagagagaaaccagcaggaactcttcaaattactttgcaaaagttgttttttcaactttaccaatttgaacataactttcttttccctaaacaggcgtgttgctttcagtttgtatgttaaattttaactgtagcccagctatttttttctctct

SEQ ID NO: 32331 - DNA, 1074 bp, Homo sapiens
atctaataaaaattatgatgcatttagatattcatttggtttagaaaactttcctgcctttcatttaattgacctagttgtatttcatagcattttaatgataaccacaactagtcagctgtaacaacagaatataaagattatatgtaattcttttttttttttttttttcgagatggagtctttctctgtcgcccaggctggagtgcagtggcgcgatcttggctcacggcaagctccacctccccagttcacgccgttctcctgcctcagcctcccgagtagctgggactataggtgcctgtcaccacgcctggctaattttttgtatttttagtagagacagggtttcaccgtgttagccaggatggtctcgatctcctgacctcgtgatctgcccgcctcggcctcccaaagtgctggaattacaggtgtgagccactgtgcctggccaaagattgtatgtaattcttaaggaaatcagtaaaggggtttggacctaataggactcataaatttttttgcatttaaaaatgttcttaagaaatgatcaggattctgagctgctttagatatattacctctcagggtctgaatttctttttcttaaggataattttatgttttttcaattttctttaggtaaaagtgcagttttaaagtgtctcctggatattcacaaaatttttcaggaaaatgacccagcgtacatactgaatgatctctacatctcagactactgtgtgtggattcagaaagtcaagtaagttttcatagagttacttacgaatttttagatgttcacattgctgaaatacctatttacccaggaggaagaaaacgaaataacctgaggagtaagttgtgtttttttttttttttttttttttttttgagatggaggtttgcccttgtcacccaggctggagtgcattggtgtgatctcagctactgcaacctccgtctcccaagttcaagtgattcttgtgcctctgcctcccgagtagctgggattacaggcgtgtgccaccacgcctagctaattttttatttttagtagagacggggtttcac

SEQ ID NO: 32332 - DNA, 1071 bp, Homo sapiens
tctaagatattttttgaattgctaaaagtaccttggaaaatcaatctactataaatgactgtgtgagcctcagttacacgtcacaattcatttcttttttaagtcatgctagattatctgggcattattcatggacttaaaccagtgagaatgcagtttgcgattatcctgttatatcatggcttccagatggagaattggcaaaacctccacatgcctgtttgcacacacactcacacactctcactctcactcacatatacagactattgcttgttactttttattctgggaagtaatctagttcttttgactttcattggaaaagtaatcagtactatgattgcataaccaaaaataaattcgattgccttgacttacacaggaatcaattacccagttttagtaggtcagaattgaaattgagacttaatttttattcattatcactctgacaagaaatagttttatcagctgtgttatgatagtaacataaaacttgaagtaacacactggaggcctctgctaaaaatgaacctgaaccctctatgtaccatgtacagtgtgttctgtgactaatttgggttgtggctagttagtgctaaaactgagggctgggttgtctagaatttgtgccagaagctgtagagatgacatgttctggatgagaatcgtcacctgtctttgtacaggtggatggcacggggatgccattattgccgctgaagaggctcatttgtttgaacaccccataatttaaataaaggtagctctggtttggcatttagtgttttccaagaatgaattcatgcctacttataattcaaaatgcagtcagtgttcacactttttattataaaggtcagtatagtgttccatagttgaaagtaatgaataaccctggctccaaagaaggattgatcttaaatggaatgagctttcaaaaccaatgtaggaatgcttcagaaactacagaatatttcattataactgattgactaagatctgagttttcaaagagccaggaatttgcctcatgtgacttcacagtagcctttacaaggattcttt

SEQ ID NO: 32333 - DNA, 1055 bp, Homo sapiens
taggtggataaattacttgagtgaatgctagcccgccctaacaaaagggtttgttcactgcttcacttgcttcaagtttgctaacattgatacagaagaaattaaacaagtctgcaactcttcttaagtgttatttgaggccacacaggaataaagattcaagatgctacataatgtcaaataggtctctgttaaggtttaaaatatttagaggacaccaggttgccaacagagttctacttcccattttccttttattaagggtgatagaaaatacagaaaacactaacttgtataatatatttatattttggggaaaacacttttatatttcaatggggtttcaaaaaatataacagcatttttgaaagctgattttatggaataaggtaaaaagacacctgatgttgacaggtaagcccttgggtaccatcaaaaggtcacccaggaaaaatcgaacattttatccaatttcatggctaactgttgtgtaatctatgctgtcctaccaatacttctgaagttgaattgttcagtggcagtaggttctgtgcaaggacagaagcagtcaaatagtagaaaacagctatgttcctcaacttaaagttaccaagagttctcattccaagacagaagttaaaaatcaataattgtgtgcaaacgatgacttcactgatggttagccagatacagtcaaatcaaaggacttgttgccagtggcatgactgactctgtgccagttttcagaaatttaaaattttccctaaatgcacctggtctaaacagcaatggccagtattctcactataaaaacttgactgtttctgcttgctgtcagccacttaccaaagcgcttgccatttaacaattgttccagaaaatgtagttttgtcattttcaaaaatcaggattctgcctcttatttagtgtcctatcaccccagcttcagggctgtttggtgaagcagccgtgactccttcaggacacttgttccttaatttgttatgtatgttccttccaaagggggttcataatgaaatacatttgggaaatgc

SEQ ID NO: 32334 - DNA, 1031 bp, Homo sapiens
gacattgtcttctgaagtgagatgtcaagactgtttctgccatcctattggattcctcctgacttgcagtttacaggtcaggattggcggtgacggtaggtttccccaatggcctgaaaactccaaatagaggtgggtgtgggtgaaatttgagatgtgccagcttttttttttttaaagagcatgagaaatattccaaatcatcctagaataattatcagcggaagaacttttttgattgttgattctgcaggtctcatccagagggtgaaaagaattaaggcttctgatgggcagcaccagccagtctgccttttcagttctgatctttcaaaggcaggtgtgatgcagagatagtaatggtgctgttggatggttttcctcctcttcctactctagttagcagaaatgcaaaaatgccttttggaatttaaacttgtaccctaaaccagtttgaccacattttttgctcaatttggaaaatcacacaagctatttggaatgtatgtatgtatttattacaagtgggctattcctttattaaaaatatactgattagatgtatagcatgtcctccctgctaaaaagaaaatgaatcgtgacttattaatgtgcctgattacgtgataggcctcgatatctattggctgcactgatcagcttgagcctagctcttaccacaccttttgtattttgtgtgtgtattgattatgatgccaatctgcacatccatgagcaatgtcacccatttttaaatataacttggagaatagctaagtagtatgtttaacaagggcttgagaatgtttagtacgctctatagggtaaggaagaattgctactgagaaggcatatgggatcagtggcatgtcaatgtagaacacagtaatgtagaatggactggcatcatgagagggaagcctctctcacattaaatataaaaatatcttaggaaacattttccaaaaaccaatgctgttagaacttgcagtggaactgggctgacttattttcttccttcagaggtcttt

SEQ ID NO: 32335 - DNA, 1078 bp, Homo sapiens
ataaaatataaaaactgcagactgatacaagtaattcatattaggtacaactattgaagaacaaattatgtcatctctaaataatgagaattgtttctctctttcaaatatctcttcgttttggccaggcatggtggcttatgcctataatcccagcactttgggaggccaagagcaaatcttctgtaaagtgaaatattcctccaaaaacaaagaggaaaattattgcagttccatttatcaggtgcttccaagaggtcagataccaggttcagaggtaaaaactcactgtatttgattctcacatcaaatttctgaggtcttaccattgtgccccttttactgccaaggagactaaggcctagaatgtaagtaacttgttagacattgtcatagcatggcgataaatgcagacccttctgaggagcacacagcctgctcactttatagcactagcatgttttgatgcttatggccccaaggtaagttaaaatgtctttcatttttatgtcagtaactggaaagtctaaaagttaaattaaaaagaattccacttgtgaggaagatcatatctggatgtctatctcatgtgtatctccacatttagtgttactgtcgatcaggggccagcatacttctttaaagggccagagagtcaatattttagactttgtgggttatgctgtctctgtcggaactactcagcactactgacgtggcatgaaagcggccgtcgacaagatgaaagtgaatgggtgtggctgtgtttcaataaaacttgatttatggacagtgaaatttgaatttcatataattttcacatgtcataaaatattattatttcaaccactgaaaagcttataagccttacagaaacagcccatgggccagatttggctcacaggctgtagtttgtcaaccctgctcactacactgaagtcttagaactttgacaaaacagagagggagaggtgcatgcaaccactgcttctacaactcgtccttccccatgacaacaggtatttaacaaacatttctgagggcctgctactgcatgacagccccaatttgggcagga

SEQ ID NO: 32336 - DNA, 1044 bp, Homo sapiens
tcttgatttataaatgaaattgtataaaatagtagccatagaaagtagacttctgattccaaattatcagcaaagtcatgcagaaaacaggcaactttttaaaaaatataaggttttagtctgtgtaaaggtgattataagaggaatattccttctacgggtctgcttagctttctcctaaccactgcttttgatttatccagttcatcatcttttttttaaatagaaaatataatttggcggctgggcacagtggctcacacctgtagtcccagcactttggggggccgaggcgggcggatcacgaggtcaggagatcgagaccatcctggctaacacggtgaaaccccatctctactaaaaacacaaaacaacaacaacaaaaaaaaaatagccgggcgtggtggcgggcacctgtattcccagctactcgggaggctgaggcaggagaatggcgtgaacctgggaggcggagcttgcagtgagcagagatcgtgccacagcactccagcctgagcaactgaactagactctgtctcaaaaaaaaaaaaaaaaaaaaaaatatatatatatatatatatatatatatataatttgccaacttgcagcccatggttaaataagtaccaccagaaagtctgaaaatgtattttccattcatagaaaaaaggattaagctgacttagaaatgttttatgttgacagtatcacttaaaggagatatacttcattcttaatgtgagaagtgcatcttggaatcatttctggtaaagaattctcttgccctttccccaaattaaaaagaggaagaaaagcaaatgaagtacaaaagccttaaatttcagtgaatagacagctgtgctctctattcgggctttgatggtgggatgggggtgaatccattgtaccccaaattatgtaagcttcagaagcatttgcactacctgaagtcccggaaatgtagatggcatgcatttaacggggctgaccttggtaaatataggtttgtgattgggaggatggttttgtgacacaacttctcca

SEQ ID NO: 32337 - DNA, 1057 bp, Homo sapiens
caagattgtctctcctttggctaatctgcttctcagacccaatcactgtggccagggtggtggaggaggtggaaggatattgacatgcaggctgggaccacatgccccagccccagatcagggtggggagtggccagtcgcacacatgccctggggcactagtgactccttggtggaaaatcgggaactgtcgttagagaggagcgatggaagaaaggctgacacactgcgatgtatctcctgcaccagcctgggcctcgatgtcttgagaatggcggtttgcagtctgatgacccagtactcagtccagggcaaccccaactccatctgtggggctgcccacagtacatggaccccctcactggatttgctgaccacacgtgcaaacagccatctcccagccccactccccgcagtccctctgaaccctgtcgaaattcccctcagttcccaccaagaagaaaagcaattctgagggtgagtggcttattctgctagtttaaatctctcgattccttccctctccagaactctgtacttactgctctgtcactggtaatgacaatgaacattttcacagtctcagtttttattgcaaagtgattgaggaccagttagaataagttatgctacagaaactaaagaaatcccgtcaagcaaatggtgtgtaatagaaagtcttagggcagccgtgtatattttctcccccaatgaatcaattgaaaatgagaggctcttaccactatgttccgggcagaagctatcaaaagcgtaagccatgatagtataatttgatcattttacatccgtcaaatggatatggcccaggggtgaaaagtggatgctctgcaactagatgatggtcaagagttataaaaatgaggtcctctctgttcaacatttctcctttcttgaaggaatactcaatgtcatgctcagggcctctaatggccagaaataaagttcctcctagtttcagagcacaccagggcaaccccaaaaccagagcaactgcttatagccatgtagactatgtactgtgcaattcctggggtgg

SEQ ID NO: 32338 - DNA, 1051 bp, Homo sapiens
ggaaatgaaggaaatttccaaagagatgatgctcctgcatctgttcattctgaaattactgatggcgacaaaggtcagaagatgttgaaaaagatgtgttgaaaacaggagaaggtctggggaaggatggtgggagaataaaaactccaatacagcttcagctccggcaaacacatgcaggattggagacagacaaaccgtcttcaattaaagagactcaccttctccaaaacaagaacaacaacaacaagaacaacaactgggacaaagcacaggagaggtttgctgaaaactttcaacaacaacaacaacaacaacaactgggacaaagcacaggagaggtttgctgaaaactttccagaaactaaacttcaaaaagatgacctaggaaccattccttgggtaaaagggactgaggagtgaaggttaatcacaaaagaaaactcaagcttttttataaatagagtttggaaactcttattgcagaatgtctctccccaaaaaagtcagtggcacaagaaagctgtgtcacagtttaccccttcctgattcagaaatgtgtaataaagtgtggtttgcagcttttaaaaaacacttcttaaactaattattagtgactgaattaagttatacagtaagtgaactaaagttcacagggcacagataagtttatcaaactttactattttatcttgtcatttacaacatccatataagcaattagccatataagcaaaattcatgtaaccacttaaatgctcatttgtccttgtctccatatattcatagtagtatgcacagaaaatacagcaaaagaaacatctaaagtctataaaaataaatctgacaatatacattcttgtttatgcccttcaggacctagataaaaaatattgagacaacatgaatagtgatgcatacattttcttatatttggaatagtctaaatcatattaaagaactaatgaacaggtgacatgtcacagaaaatttgtcttttattgttttcttcggtgaagaatctgaatttgttgatatatactatacattc

SEQ ID NO: 32339 - DNA, 1047 bp, Homo sapiens
atatgcagaagattgaagttggactgcttccttataccatacacaaaaatcaactcaagatggattaaatgcttaaatgtaaaacccaaaactataaaaagccctggaagacaacataggcaataccatcctggacatagaaacaggcaaagatttcatgataaagacaccaaaaacaacaaatgcaactattgacaagtgggatctaattaaacttaaaatcttctgctcagcaaaagaaattatcaatagagtgaacagacaacctgtagaatgagaaaaaatatttacaaactatgtatctgacaaagatctaatattcaatataaggaacttaaatttacaagagaaaaacaaacaaccctattaaaaagtggccaaagaattgtctattcatgtccttagcctactttttgatgggattgtttgtttttttcttgctaatttgtttgagctcgttgtagattctggatgttagttctttgtcagatatacagattgtgaagattttctcccattctgtggattttctgttaactctgctgactgttccttttgccgcgaaaaagctctttagtttaattaaatcccaactatttatctttgtttttcttgcatttgctgttgggttcttggtcatgaaatccatgctaagccaatgtctagaagggtgtttttgatgtcatcttctagaatttttatactttcaggtcctagatttaagtccttgatccatcttgagttgatttttgtataaggtgagagataaagatccagtttcattctcctacttgtggcttgccaattatcccagcaccatttgttgggtagggtgttctttccccactttgtttttgtttgctttgtcaaagatcagttgattgtaaatatttgtgttaatttctgggttctccattatgttccatttgtctatgtgcctgtttttataccagaaccatgctgttttggtgactatggtcttacgatatagtttgaaatcaggtaatgtgacgccttctgatttgttctttttgtttagtattgctt

SEQ ID NO: 32340 - DNA, 1100 bp, Homo sapiens
cactcccttagctgcttcagctgctgtctcagtagaccccatcctccccaccctccacattccactggctctgagcccagctaggagtatgacttgcctaataattgaagtccttgtggcttagactgcccctttagttctcttagaatccaatagcatgtcaactaatgatggcaagacttgtaaaaactcaagctcccaacactaggatgggagattatcctcttgctagggccaatacaacgctccctccattggcagatgtcagctgagtacagtctggttctgcttttcactgtgagggggtagtactgagtttattgcaaagcctcacaaactatgctctccctctcccaaacatactatctctgcaccatgtagccactactggtggttgaaaaaaaggtggcatccgtgcttctagaccgtctttttttttttttttttttttttgccttctccaatgtctctttcagtgatatgaagtcaataccaggtactgtgatcgctcacccaatgtttggtccctttgacagtgcttcttgaatgtagtgagttgtgaaaatttggtgtttttgtgtgggggatgagagtgtaggcttctattctgcccttttactctgtctctgccttaaattttttagattcagggagtatatttgcaggcttgttacatggatatattgtgtgatgctgagctatctgggatattattgatcccatcaccaaggtagtgagcatatattgtgggatataattgatcccatcacctaggcagtaagcatagcacccacagtttctcatgccctgccctcctccttccctccttcatctagtagttctcagtgtctattgttgtcatctttatattcatgagtaccccatgtttagattctacttataggcaagagcatgtggtatttggttttctgttcctgtattaatttccttaagataatggcctccagacgtatgcatgttgctgcacaggacatgactgtattctttttaatgtgtgcatagtattttatggtgtatatgtggcacatatttctatccaatttattgattcacacataagttaattccataccttccct

SEQ ID NO: 32341 - DNA, 1770 bp, Homo sapiens
gcaaagtctctctctctgatgtttggtcttctatttacaactcctaaaatatctaaatgtgccctccctctcagggcacacagcccaatgctattttctcccagatgataggaaagaaagaatcacataacaaatgcctagtgatcttcattgtgaagagcacacggtcaaaacttattttaaaatcctattttgaagtccagttatgcaaagaattaataaataatgacacgaattgatgaaagagtagctatcttactgagtctagcgtaagaacacagatgggtttcataatgagccacaaagccatctgagtctagatcagaatgtcaaggtcttgagaaaaggcccaactgggagcaaattatgaaatctgcatgagtctcttaaggacgacttagggaaggcttggcctttggtccttattatgagactgatatggtttggctgtgtcctcacccaaatctcgaattgttgttcccataattcccacatattgtgggaggaacctggggggaggtaattgaatcatgaggactgtgttgttcttatgatagtgaataagtctcatgagatctgatggttgtatggagggaagttcccctacacatgctctctcttgtctgctgccgtgtaagacctgatctttgccttctgccatgattgtgaggtctccccagccatgtggaactgtgagtccattaaacttatttttctttataaattacccagccttgggcatgtccatattagcagcatgagaatagactaatacggagacttattatgagtttgacaggaaggtgcagaaacagagttctggagtcagattatgggtgatggctacataatcttttttattcaggaaaattgaaagattttgtatatgagtggaacttagcttctgttcagggttgatgtgggaaaaagtggttagatttgtgaacaggagctgaatcattagaagtcttcaagtccttgctaaagagtgagaacctaagttttaagctgttgttaagtgcttttaagtccttgaggaacacagttacctgtttagagatatagtctggaagcgaacaagataacgggaagtgagaggagtgcaggctgatggaaacatgatggaaaatggaaatatttcagatgagagagagtgagggtttcactgagtcgaggagtgcaggctgatggaaacatggaaaatggaaatatttcagatgagagggagggagggtttcactgagtcgaggagtgcaggctgatgggaacatgatggaaaatggaaatatttcagatgagagagtgtgagggtttcactgagtcataaagttgtggagaggaagcagtgagtagaagaatacttaagaagtagaattaataaaactttgtgccagaacaggtgtgatgggtctgggagagagctatacctggaacagtggatctcagagtgctccatgaaaataatactctttctatcataatacagatatgttacttgtctttttcgcttgtttttgttctctgctttggtgcaaatgcaatagtaagtaaaaccgtagcacaaaacaagacagtggctccaaacaatagtagcagttctattatttacactcacgtggttgcttaaataaacatgccaattttattttcatgttacttaagaatatccttgatgaagcagtaaaaaatataattttcattaaatctagatccccaagtatgtcttttcagtattctgtttgataaaatggtaagaactcatagagcact

SEQ ID NO: 32342 - DNA, 1071 bp, Homo sapiens
tcttaaccatgctgtaacagaagtcctatcatgcaggctttgttgttcccatttttacagcacactttgcactttaatgtcacagatatggctgttttcctagaagctcatataccaacctctgccagcttcaaacatttcttctgcaacttcctcacctctcttctcctccatagaattgaagagagttagggcctttctcaggattaggctttgtctcaagggaatgttggggctggtttgatcttctatgtggaccactcagactttctctgtgtcagtaaaaagcctgttttgttttttaaaaatcattcatgtgttctctggagtagcacctataacatccttcaagaactttttctttgcattcacaacttgagtagctgatgcaagaagcttagctttggcctgtcttagcttccaacatgctttcttcactaagctcgatgatttctaccttttgatttgaagtgacaggtgtgcacacttcttttcaattgaacacatggtggccactgcagagtgaagtggcctaatttcattgttgtatcttggggaatggggagctagaagagagaaacagagacagggaaatgactagtcaatgaagcagtcaaacacaacatttttccatcacgtttgctatcttccatagagttccagcacgctgagacaattccattagtaacatcagaaatcactgatcacagatcataacagatgtgataactaaaatctttgaaagattgggattgccaaaagatgtgacagagatgtgaagtgagcccatggtgttggaaaaatggtgctggtcaggcttgctgagcacttcgtggccacaaatctttaatttgttaaaaaggtgatgttgccaagcaaaataaagtgaagctcaaagtgagatgtgcctctattttgatgggctctaacaatttgtcttttctgggtgcatttagaccattgacattcaaagtgattatacagttggattaattttgccatatcattttccattaactcctattattctttgatcttgctttgtcctccactctttttctgccttttatg

SEQ ID NO: 32343 - DNA, 1887 bp, Homo sapiens
atgtggctgtgcacttcacctgggaggagtggcaggacgtggatgatgcttagaggaccctgtacaggaacgtgatgctggagacctacaacagcctggtatcattacaggagttggtgtcctttgaggaggtagctgtgcacttcacctgggaggagtggcaggacctggatgatgctcagaggaccctgtacagggacgtgatgctggagacctacagcagcctggtatcattgggtgagtgaaacttgccagtaactcccaggattgtattttgttgctggtaaatataggaacccttttaaggtataataatatttacttgtaagcttccagttgatgaaaaatgtgtcactactctaatgaaatgttcaaattggctccttcattgcacagtccctgaagcccagctgtcgtcattctgaaaaggatttgacttagtggtttgacaaagtcttccattgtttctcattaccagggcattacattaccaaacctgagatgatcttcaagctagagcaaggagcagagccatggatagtagaagaaaccccaaacctgagactttcaggtcagtcagtgaataccaggcagggaggcctggaggagtaatgcccagcaaatttttgtagtgttatcttgttttcaccacttttttccctaggtcttcgacctgaaggctgttggtctgcattaaatgtgcattatatagtccccaggggtaactctcatgcatatatcccagtctcttatttttctgagtatcttcttctatttaccccaaatccaatccctgccatcctctccttaggcctttttctctgctatttattttctctgtttcccccttttcctctattctgatgtagtatcttaaaaatttttttagacattcatgcatttatttatcctttgaatgtatcttaagtgatttttaagaatcagtcattataacgatgatgaaaatggtgtttctttttaagctatagctttattcttgttttattttttattaaacagatgattctcactctatttctcagactgaagtgcagtggcatgattatagttcactgtaatgatgaactcctgggctcaagtgttcctcacaccctagcctcccaagtagctaggactacaggtgtgtgccaccacacctggctaattttttattgtttgtggagatgaggtcttgttctattgcccaggctggtctcgaacttctggccttaaatgatcctcgtagacaaccacctacaaaaaaaaaaaaaaaaaatagctgagtacggtgacaagggtttgtaatcccagtttttatacttgggaggctgagatggaaggattgcttgagctcaggagtttcaagcttcagtgagctatgatagcaacactgcactccagcctcagtaacagagtaagatcctgtctcggaaggaaattatgaagctgaggaggacccatcataggggcctggataggggtggtgctggacttgggaggagaaccagaagattctgggtctcaagtccaaagaaactaattatttcctgttgaagggctcagatttctgtttgagagtggagtttgtagttaccattggaagatgagaaatgtacaggaaacttcatttttatataaaactgtgtgacatctgaaactccaaaacacaaaataaaacccttcaaaaatggtgaattatcaagcagcgattggtgagtggagaggggcacggctgtggatctcagaaggaaccagaaatacacttttcgaagatgacgggcacagcctgagttgcagaaccaatccttcagatcaccagtgtggttttttgactggagcttctgtgcctattatggttctgggaagcaggggatgtcatgtttaagt

SEQ ID NO: 32344 - DNA, 1050 bp, Homo sapiens
ttgagtgtttttattatgaaaggtgttcatcccgctgtggaaccagataaatgttgacctgatagaatggattggaatgtcccctcctggtttttgaacattttttgaatattttgcagagcattggcattaattcttcttgaaatgtttggtaaaattctccagtgaagttatctggacctggaattttcttttttggggggtttttgattactggttgaatcttcttactagttacaggtctctttggattttttatttctccatgatgcagtatggtggtttgtgtttctaggaatttataaatttattctaagttgcccagttttgtggcatatggtttgctcacattagtctcttgtaatctttttcatttctgtggcatctgttgtactgtcacctcttttatatatgattttagtatttgagatttctctttttttcttaatatggctgtgagttttaaaatttttattgatctttaaaaaaacaaactcagtgtttttttttcctttcttttttctggtcttattctgcttatctctgctctaatctgttattttcttccttttgcttggtttgtcattagtttttttttcccttcaggtgtaatgttaggttattgatttgagatctttcttctttttaatttaagcacctgcagctataagcttccctttagcatgggtttgagatctcgcttcttttcaatttaagcatctgcagctgtaagcttccctttagcatgggtttgagatctttcttctttttaatttaagcatctgcagctgtaagcttccctttagcactgcctttgttgcctcctcctgagtttgggtatgtcatgattttgttttcatttgcctaaacatttttttgtcctattgtaatataattgcgttgtttttaataaaggtgattaatgaaacacataatgaattgtgcttctgtttttataatattttaagcattcttaactcagaaatgtaaactttagaaaaaaattccaggccaggcacagtggctcacacctgcaatcccagcactttg

SEQ ID NO: 32345 - DNA, 1083 bp, Homo sapiens
gtattaattcaccagctataattgtggattgtcaacttcctgctttcgttctgttgtttttgattcacgtactttgaggttttgtgtgtgtgtgtactttgtgtgcactttgaggcacaatttataattttaatatcatcctctctgattcttttacttttatgaaagtaccctgtttatttctggtgatatattttgttttgaagcctctttcatctagtgttaacatctccattgaagctttttatgattagtgtctggataccatctttttatgattagtgtctgcatagcatattttttctcatagtttgtttgtgtctttgtgtttaaattgtgtctctgtggatgccatattgtgggtcttgctttcctctcaggtctggcagtctctgtcttaagtagagtatttgtccagttacattgtaactaatcattactaaggttggatttaggtctgccatttttctacttattttctatttgtttgtttatttttttttaagacagggtcttgctctgtcacccagactgtagtgcaatggtgcaatcttggctcactgcaacctctgcctcccaggcccaaccagtcctcacttcagccccctgagtagctgggactacaggtgcatggcaccatacctggctaatttttatattttttgtagagatagggttttgccattttgcacaggctggtcttgaactcctgagctcaagcaatctacgcaccttggcctcccaaagtgttgggattacaggcatgagccaccatgcctggccttcgtctgtcttttgatcttctatatattctttcctaacttcttttgggttaattaaatatttgtaaatattccagttcggttaatcttttggctttttcaaataattttttataggctgggcatggtggctcatgctcgtaatctcagctctgtgggaagccaggggaggtggattgcttgagcccaggaggtggagaccagcctgcaacatggcaaaaccctgtctacaaaaaaaccaaaccaaaaattagcctgacatcgtggtgtgcacctgtagtcccaactattcgggaggctg

SEQ ID NO: 32346 - DNA, 1021 bp, Homo sapiens
tctttgtttctcagatttgcattcttctacatatttggcttctacttatggtttgcttttatgattacaacatggcagcagctgtttctcatattccctcacgaaagagcacaaaagtgtctgctttttcctaggaattccattaattcctacatatcattggttctgcatggatttttttccccaacacaatatccagcagtctcagttccattaaaaacaatagactaagagcaggtaagtggccatttcccaggcataagttggaataagcttaccaatggatggctttcaaattcctccctaatgagcatgcagttgtggtaaccatcatattgccatcatcgttgagattgccataatggaattttggtgaccaatttagaggagagagaaaagggtgtgcacctgagaaagtctacacgctattcaattatttctgctttgtaacatacagaataaaaggaaagacattcaaacgggaaataagtacatagaacaagccataggaggtgtagaattttgggacaggagggaacatttcagatgctggttctatcagggaattggtgaaagacaaaaagtgctctatgaatctaaactcagatgttgacctacatatttttgaaatctaaaagcttagtaagtttctacacttaaatttaaaatgcaaaaatcacaaactagtctagcaaaaagtgtattttttttccttcccatgctgttgctaaaaaacaaaacaaaaacaaaaacttatctagttctcatgatgaacagtggtcaatctcaaagactcccagtgcaactttggaataacagaatttttgtcaaccttaactctcattttaaaaatattatcattttatttcctgatcttaatacttttccaaatgctctaaactttgcagtatttatatccttatgcccactattcatatgacttttatacttgtgtcttctactgctatcaatttttaatgatttatatatctctaccttaatctcagatctttctcttggg

SEQ ID NO: 32347 - DNA, 1208 bp, Homo sapiens
taaatttcttctggtagtgtcagttcaactttcagaagtgccacttaaggaagtttgatttttgtttttgtaatgcactgtttttaatctctctctctttttttttttttttttggttttaaaagcacaatcactaaactttatttgtaaaccattgtaactattaaccttttttgtcttattgaaaaaaaaaatgttgagaagcgtttttaacctgttttgttaatgctctatgtttgtatttggaatatttgaataatgacagatggtgaagtaacatgcatactttattgtgggccatgaaccaaatggttcttacttttcctggacttaaagaaaaaaagaggtttaagtttgttgtggccaatgtcgaaacctacaagatttccttaaaatctctaatagaggcattacttgctttcaattgacaaatgatgccctctgactagtagatttctatgatccttttttgtcattttatgaatatcattgattttataattggtgctatttgaagaaaaaaatgtacatttattcatagatagataagtatcaggtctgaccccagtggaaaacaaagccaaacaaaactgaaccacaaaaaaaaaggctggtgttcaccaaaaccaaacttgttcatttagataatttgaaaaagttccatagaaaaggcgtgcagtactaagggaacaatccatgtgattaatgttttcattatgttcatgtaagaagccccttatttttagccataattttgcatactgaaaatccaataatcagaaaagtaattttgtcacattatttattaaaaatgttctcaaatacatctttctttcttgtgttgatttcttttttcattgtgtgctgatcaaatttattccatttaatcacaaagtcgttctgtcttaacatttcacccctgtattatcagatgagtgaaaattctcaattagttgtatgaataaccaggctttactgtaagcaaaattttacctaagtcctctgaaattaaaaatgtaagatcagtcaagacctagaagtgaataattggatcagagactaagtcttctttaatattaagggtatattatttttgtttatgtatgtgtatctgagtttcagttaatctatttcatctatttctaaaataattgggattcaactagataaatgtgatttgtaaagtttgagccacctatgttctgtca

SEQ ID NO: 32348 - DNA, 1122 bp, Homo sapiens
ataaaataccacagtggtgaaagttgaatgtaaaccaagcgaggaaaaaagggatcttgcaatatgttttttgtgggttagaataaaagccagcctgtatggagttggaaagtgaatggaaattttggaagggaggtgatgagcacaagtaagctctttctggaagtttgggatgaggaggaaatcttgggatagagtttgacagaaaggccaaatcagtggaaatgttttaggattgtggatttgaacattattatagactaaagagaagaaaccatgtaggaggaagaaacacaagaaatggaagattattagttgaggaatcagcaaagagtgataggggaatgaaacttaaaaacctacaggggcacttaactactgtattttaatagatatattgtggtaagatctgacctcagtgtattgttgtatttattatggacatctggtcattagctaacttcttttcaacacagagggcagtttctctttgttctgtgactgcagcatgaactcctaatccaggcatagactcacaagtgaggtgataaataaagctgtgcatttcaggctgatgcctctattgtgtgaccacaatgtccttgataatatcaccacaatccaaagcttgaaaaacttacttatttttctcagttaacccaaagttgatctggctctgaacttttgactcagtgtgactcgactccaaatagtgattcataaatagaatgtgatgatgtaaattgcgaggtttatatctggccagaaagtatggagcaattcctgcttataagaaggcttcattaaaagttggctgggtgtggtggctcacgcctgtaatcccagcactttgggaggccaaggtgggtggatcacaaggtcaggagtttgagaccagcctggccaacatggtgaaaccccatctctactaaaaataaaaaaattagctgggtgtggttgtgtgcacctgtaatcccagctactcgggaggctgaggcaggagaattgcttgaacccgggaggaggagattgcagtgagccaagatcatgccattatactccaggtctgggcgacagagcaagaatctgtcttggaaaataataaataaataaataaataaa

SEQ ID NO: 32349 - DNA, 1476 bp, Homo sapiens
ctgctagggtatgaatttcagctctgccactcactcactttaagtaaccatgcacaaacttcttaacctctcttagacgtcccatttcctcatctttaaaatctggataacagtacctcccttgtaaaattgtcgtgatgaccacatgagttcatccctgtttaaaaacaaacaaacaaacaaacaaacaaacggaacaatgcctcacacattataagcaaagggtaaatatttatttttattatataactatatgtacccacatatgcatacaaaaatgaatcacaagtccatagcctttgtttagaatggattacttctcaaccatcatttgcatactaaattttactcagtagactatgtgctagaataagaaccatggaaggtgaaatatcagatttcttgcttcccaggtaaataagaaacataattattgcattttaacatagaaaataaaaccaccaagaaaatctttgcagagtctgtaatgccagtctgtttattgtgaatgggacgtcacctcttttgctgaatggaggtaagtatgaagtcggtgctggaaaaggaaatgaagaatcccactcttcaactccagtttgagtccctggctctgttggtccaaggctcccattaataatcgctgatgtacttggcattcccaatgcacagtaaaagaggaatagcatcttctgccaaaaaataacaaaatgaacactaatattctttttagtggacatctctgttttatcagatttaattcatcagctttcctttgcttatgttgggatttatgacattttacattgtcaccatcagaaaatgttgacaagcttacagaactatgctctgaaacattgatgaggatctgtgtaaaatgtcacagagccccaaactcattaagtatgaaacatggttttggagaaaaatacgccagtacatttaatttgaagaatctattgtctgagtaaagaggcttgtttcattttttaatgaagttgtaaggagtcacaattttttaatgggtcaaaatgaagaagtgccaactatctgaactagggtatttttttaaaccactaaaagactcaaaaatatgttcatattccatgtttgatttttaaccattatgactaaaggcagagtagaacattgcaaatgatacgagattttaggtctgatgcataactcttcccgtgtacagttatggctatgtaaatggaggcacatcccagaaccttatattacagttgcctgtgtgtagaataaaagggataataatgtcattcagcatagttcatcagatgatttgtgagcataacaagatgaggaatttattggaattttaaatagaaaatattactctctattcatataacatttgctttaatattttttttttatttaggcctggacttctcaacatcagtgaacctgccgcgcagccatggctggcagacacgtggcctaatactggcaaca

SEQ ID NO: 32350 - DNA, 1280 bp, Homo sapiens
ctataaactctagtcctgccctgacggggctttggagaatttggttgtgggtgttcactttgtgcctttcacaggatgctttttaatcctggcagacagcataacacctgtgttcaacccatgaccaggtgtccctcacacaggaaactagtttatactggcagacgcccctgtggctcttatctgacctgcgtccagcttattcctgtcaacatgccccctcctaggagagccttgactgggaggaaggttaaaacctcccagtgtgttgcttagatgagactcagaggaggcaacacaacaaaaacacgtgaaataacggaagcagtttattactcacagacccatgagacagagggagtgccgacaagggcagatgagaaggccaccagggcaatttgctcaaccagcaggtgggaatccaggtggggaagacctaggctctgaggactttttgctgttgaaggtattacccaggcaggtttcctttggggagttcctactggtgggttcttagagcaaatggcacaagttccaggaggtcacattctgtctgagaatggtcactggcatatctgcacagtccatgaggggtgtggggtcactggggtgagtcaagtaagttgtatctacatatcccacagggaggtggccaccgtaagtcagtcatgtaaggcagatgtctggattgaccatgttgaggaactggagggaggcagggaactggagggaggcagggaactggaaattgtcaagggtgtcaaaacccagattctgctatgagaaggttaaacttagattcaaaatcaatgctgaggccaaatgaaattataagaactcatgacgacaatatgtatcagactcaaatgatttaataattgtaagaaagcaccaatcctaatgaaatgggccaacaccttcttgtttcaccagatgtggtgggggaagaacatcaaaattgcagacagaggtgggaattctgcacagtgggcaccctcagggttgatatcactcaatgccaacagaattggatattgctttgatgatacagcctccagttctctacagcaactttgcaggccccttgtgtggctgggtgttatggtgggcttgaaaaaaactcagtagacttaaaacataaatgtaaactaagttaattttattacccatatattcatcaatttttaaataatgaatcaaaatggccagcagaaaacatgagcccttttgactattcataacccttgatattataattcttttacatatttaacattatt

SEQ ID NO: 32351 - DNA, 1029 bp, Homo sapiens
agtgggtaaggaagagatggaaaggtgacaatcaagtgtttactccgtagaggctgtgataatagttatcctgagggcaggtcctaaccaaaaatattggtaaaggaagatgaagtatgggatgccagaattatcccagttgtttttttttcatcttgcttatttatcagcttaatttctaggttaagtataaaaacaaccaaacaatatgtaagagtgtttgatatcaatctcgatgtcatctcttccacttgcctagcttccctggacttcatccgagatacttagcgatctcattcttagtattcctgcttttgctttctacccaagatcaattgtttgacggtatttaatgattcattaaactaaaattctcattttaatttttttatgtaatggggaatcatctggaatgtaggtgccaaaatacaattctttgagaaagagaattctgaagtccaaaaaacattttcttcacttcctcccatgtattccctgttactattataaacaaagcaaaacatctgtgtttagaaaaccgcttcagaaatgggcaaatgtttttttgagtgtagactttaagaagcttataaaaaaaaattaacattagtagccacttcattcttactgtgttcttagtttccttcctgaaattttggggcttttgagattaagaactctttattaaaccttctttactatgatacaataactaaactaaaggatcatcaattaaataaacgttaagtacttttttctcatgagtctaatcagctttattttattttacttccttgctggcatctgtatcacctccattgtagccactaacttaccatataccttccatgagaaaatatccaagttcatcttaaaagctgtaaagtatctgccttctttctgttcttggttttcactaaccatatctcctttctttccattgcttagccactctgctacaatttcagtctcttttctgtcttgcatagttaggatcactacagaaggttttcacaaactcagggaatt

SEQ ID NO: 32352 - DNA, 1058 bp, Homo sapiens
ctaccgagaccctcccgtgacacatggggattaggagaactacagttcaagatgagatttgggtgaggacacagccaaaccacatcactctaagtataatgaatccttgttaactggaatactggaaatatagagaaacaggcatacagttgtgaaatcaaagactttttttttttaaatttcagctcctcaatccactagctgtgtgaccttgagcaagctagtcagcccttctgagtttcctcacctataaaatggggctaaacatacccattcctcgggattggacaaagaatacattaaccaatcaatatataagtatataagattcagatttgttttctgttttatcccataaaatctgttattggacttgtatttcttttagtgtcaggactaaaagtaaaggaagttcataaaatttgtggatgtcgtaaaactgagaaagacagctagtatgccaaataagagaatcagaattaaatataactcaacagattggactgatgggagagtgctaactattaaagttaatagagcaaattaaaaagtctggtacttgaacttgggtttaaaaaattagctgtaaaaggatagactaaagacagcaggcttacgggaagtatatgtgagtgtgtcagggctttcggagtgatctgactttaaaataaaacacccatctgaaccgactgacggatacagttgccaagagaacaaatgtagtcttagctggcactagaattatgcctggatcaagtaatttttctctttttacttagaactattcagttcatgaatggagtaatgtgtttgttctggagactacattttcagatggacttttaagaggaggacagtagggatagtcgatgaggccgcatgaaaggctgaaaatcacatcatatgaaaagacattcaaggatctaggtatgattaggccagaaaataataacatcagagcagacatgacatcttttccttaacattttaagagactgccgtatggaagagttatgcttattctagctcgaggcaacagaaaagggcccatgagaaga

SEQ ID NO: 32353 - DNA, 1031 bp, Homo sapiens
tcatctgtagtgtgaaattgtaacagcctactaattccatcctgtttctggtcttctccccaaattacattttcttactgttgctagaatactgtttctctagaccactcttattttcccgattacgtaaactgaagtataatacgcatgccgtgaagtaagtaaactaatgcagcttgatgaatttattcatgtcgtgaccactccgatcaagatatggaacatttccaagaccatagaaggcttccattgactctcttctagtcaacaagcctctcactagcagagataataacttttctgacttttatcatcattgattccttttatctattcttaaaatccagctaaatgaaatcatacagtagatagacttttgtgtatatttttgcctcaaaataatgtcagtaaaatacacttaggttcttttttgttgctgtgtagtattccatctcataaatagaccacaatttatttatgtattctcatattgatggagtattttcagctttggatttttgttagtaaagctcattattcctgtacatgtccattgttgggcaggtgcactcagttatcttggtttgcctttagtggacatacatactaatttctttttgttttcccatgtatttgaaatacaagtcttcatcagatatgtatattggaaatatttcttcctggtcattctcttaatgatggttttagggattaagtaattaattttgctgaaaaccattttttttttatgattagtgtgtttactcttctgtcctaccttgaggccttgaaaatattcttctatgtcttcttctagaagctttattatttacacctttgatattttgtgatgcaaattttttttatctaccttgagttaatttttgtgtatggtatgagttcaaagtcaaaattcttttcatttcccccatatgaaaactaataattccagcataatttattggaaagattatcctttctccactgaattgcagtggcatcttattacaattccaataaacatagatttg

SEQ ID NO: 32354 - DNA, 1030 bp, Homo sapiens
tatgtatttgaatatgtcttaaaattgtccttaaagccttacattttatagtagataaaaaacattgaacacttactcactcttaaaacaaagagaatgttaaattatgtgtttgtttcctcttattttggtatatcttttatgtatcattgtacaattctttcagcaatgaacttgtctcctaaatatccagagacttcaaggttagattctgaggcataagaagaggctcggcgtgctatccaaagttatagaactaataaagaaacatctagctacacctcagctcacttaacttccatttcagatattggatttttcatcttcctcttttcctgtaataattttgtttccttaggatttttggaaatgcttatgcgagtgttccaaaatcagcgcatgaaaggttacaaaagttcttaggaagattttgataagatgatactcaaattgttctggacctcaagaactcaagttttttaaactcaagtttattaagcagtaattaagataataaggatgtgagctgtgcatttattttcatttgtacaactcgtatagccaaagacacatatcttttttttttaattatactttaagttttagggtgcatgtgcacaacctgcaggtttgttacatatgtatacatgtgccatgttggtgtgctgcacccatcaactcatcatttacgttaggtatatctcctaatgctatgcctccaccgccccccccccaaccccacaacaggtcccagtgtgtgatgttccgcttcctgtgtccaagtgttctcattgttcagttcccacctatgagtgagaacatgtggtgtttggttttttgttcttgtgatactttgctgagaatgatggtttccagcttcatccacgtccctacaaaggacatgaactcatccttttttatggctgcatagtattccatggtgtatatatgccacattttcttaatccagtctatcattgatggacatttgggttggttccaagtctttactattgtgaatagtgccata

SEQ ID NO: 32355 - DNA, 1034 bp, Homo sapiens
atgccaaaatatgtaatttattatagaatcttcatttacttttgctgtctaaggggatgctgtcctctaattaaagagcaccagttcccccacgccatcagtagcttctagtcaatgtaagaaccacctacaacaaggaatcaaacagtttaaagttgtaaaaacctatgactatgaaatgatgccaagatgttaatatataaataacttttaaatcatttacatgctgccaaaatgatgatccatgatggtgttccatatgctaggaagttgtaacatctgaaacttttactatttctaagaccatctgtgtgttttgtataaattatgactgtggaactgataaaacactggaggtaaaaagcacatttatacatttgggaaaaggaatacattaaaaatcagcagtttgggttcaaaatcactgatcttatgtagatcataattgtttttgttttattttcttcctttaggcaaaactgaaattgaataattaaaacaaaaacttagaacataaacagaatacatgacattatttccagttttttttttaatagtgaaaataaattcttaaaacatgttggttattagtcattgtacgtgattcttctttcctaagctttgtattcaaatgagtgttttcatctctgttgttaatgtactttgccaaatgtgctgagtgcagatgaacagaagattaaagcacataatatcgttatgaaagacaattgaagattgcatgcttattgctacagttttggttataggaatttctagagttctttaatgtggtggctttctttgttgaaaatttaaagtacacctctcccagctgtgagaacaaagacacaccctacaaaaaggggaaatatgtagttgaattatagctgcacctgtattttttttaagttcttaattcatttcttcttacattgacctggattctgagccaaattttagatcctggatgattataaaccaggaatatataaataacattttcttattctcttacatgataggagagtctttta

SEQ ID NO: 32356 - DNA, 1075 bp, Homo sapiens
agacacatgcaaatcaaactcaggtgacagaaacttttattaatcttactttcaaaaggataaaagtgtagcagagaaagtaggtggaagtcatggaatcaatttcaaacccagaagtctggttaaaggacttctgatcttatgtatttctctttactaattttatgtttttcaaaataaaggtagttcacattaatttaatttatagactcttgatggattgagagttttataataacaactagctgtttttattggtaccttagaaatattggttctgattttgatttagcaaattcacctgttaaaatacaacagccctctttggactgctgcttgttgtgaactgtagtgagctaagaagaaagctaaataaaatatccatgatttgaagagggtgtttaaatactaataataacttgcaaaacaaaactaaatgaatgcaagtacacaaaggataattatgcaccattatattactctactacaatgaaaacgtacggtggacagatgtaggaattactaggaagaaaaaattgtaggaataattggaatcatgtgaatcttgaaccagcatgtaagagggaaggtactaataagtgaggaaggattttatttatcttcagttaagaaggaattgaatcatagccagaatttgtaaggagatttgtctgcttggcaagtatacaagacaggtatgtatgagtagtagtaggaataagaagacaaaaacagtaaaaaagaaaaatccatcaaataagcagcctacagtttagtgttttgaaagcagtgaagcagtaaaataataaatgatagcgattttgtatgggtaggtagtaagttgagagctaggagcctgacaaagagagactgtccactttacagagggttaagatccccactgcactgaagttttcaaaatgaaagggaataagtacagaaactaaagaaaaagactcagaagagtgttctaattgttttacagattaaaagaatgagtcatataccttaagagtgagttcactgcaatgtgttcatcatgcatctctctttaacacaggattataatcttaga

SEQ ID NO: 32357 - DNA, 1102 bp, Homo sapiens
aaaaaaaaaaaaaaagagaaggggtctaactctgtggccaggctcaaatgcaatggtgtgatcatagctcactgcagctcactgctcaagtgatcctctcacttgtgtagctgggtttacaggctcacaacactgtatcagattttttgttttttggagagacggggtctcattttgttgcctgtgctcgtctcgaaatcctggcttctggcttcaagtgatccccctgccttggtctcccaaagtgctggattataggcattagccaccgcacctgaccagagtgatcttttccactgtaatttttaaactagctgtggtattatatgtaagtctaataggtaaaacccgcacataggtgatagcttgttttactgaaatttttacttacaacgtggatcacaagacccaagataaaacacattaaagtgaaagtacttatggttattatgtaccctggatgaactcattctctttaataaatcatcgacatcttgcttccaacagttagtatgggataataaaaaaaaattctgatttgcttcaaaaacataaacagtatttgaatttcactatgtaaaatactgctttttatgtcctaaatcacataaatactataacatcatgaatagttatattattaatacaacaattttgaaatactggtatatgcctatataattactgattagtgttattatagattactgaattaaacagtcaaaacagtatgtttaataatttaggccagtgatcctcaaagtatggttccttggctatgcatcatcaatatcacctgggaacttattctcagaaatcaaattctcaggtcctacactagcgtaactgaatcaaaaacttggggttggggcccagcaatctgtgttttatcaaagccatctaggtgatcctgctatgaactgaaggtggagaaccactagtttaggaggtccagccctggagttgcatacaactaagtttgaatgctggctcgttgactcattaactgtcattttgagtgagctgcttaccttctctaagacatggagttcacatttgtaaaatggtaaaatgatgtattagtccattttcatactgctat

SEQ ID NO: 32358 - DNA, 1095 bp, Homo sapiens
atctataggagagaggaggatcttagaaaccatgaaaattataatacttctgattctctcctaaccctatagtgtacctatgacaacaacacgtaggaagcaagcatggcaataggaaaatgaatattgccaaaaaagtagagaagtagacacttctggttgtctgtctgccaggaattctctttgttctcactggcagggcctcaggtttgatctggtctttctgtgtctcctccacgagactgagggaagatccatcctctcgctagctctagggtaaatccctatttgtgttatcctatttccttaacaataactggtttcaaaagtgatgcttgaccccttccttgcaatgaaatatgaagacaagtctgatggggggactactttataaggttaaatggcattttccttccctgccccatcccttggaattaggtctacatatgtgacctagaattacagcagctgtctgtcaaccataaaagggaatcaaatgcaaaatgtgaatattggacagtggaaatatgaaggaacttgggtcctaaaggacatggctgacttggagaatggacaagtcttggagcttccttaccttgggactttctgttttatgagataatacctttttcttagtagggagtgttggcaatctggagctgaatgtctttactgatacaaatattaaaagcaatgaaccagggagatggttaatggtacaaaaaattgttagtaagcatgagtaagacctagtatttgatagcaccacagggtgatggtattgaataataattcaattgtacgttcaaaaataactaagagagtataactggattgtttgtaacacaaaggataaatgcttgaagtgatgaatatctcatgtactctaatgtaattattatacattgtatgcctgtatcaaaatatataatatactccataaatatatatatatgtacctactatgtatccacaaaaattaaaaaataaaaaataatgaaagcaatggaccaaaagttctaagctgcacaggaaaagctgtaagtctaggagataaatgataaaagcaaaggtggggtggagtgaggtctaaga

SEQ ID NO: 32359 - DNA, 1053 bp, Homo sapiens
gtaggtctcaacaatgggcccataatagtaaaccattctataaacagatgtactgtcatccatgttttgtttcatttatggaacacagaatagctttatcataattcataatgtccctaggatttttattaatggtaaatgaacattggcttcaacttaaaatcaccagctgcattatctcctgccaagaaaatcagcctgtcctttgaagcttttaagccaggcactgtcatctctacaacaatgaaagtcttggatggcaactttttaaaatagaatgctgttttgtcaacactgaaaatttgttgcttactgtagccaccttcatcggttatcttagctaggtcttctggataactggaaacatatatagtaactgtgtatctctatatgcattatcaacattaccaggagtttggaagaaatttatttcaaccctcatgaatgacactgacgggtttaaaacttcattggaggaagtaattgcagatgtggtggaaataacaagagaagtagaattacaagtggaggctgatgatgtgactgaattgctgcaatctcattaaaaaaattaaacagatgaggagttgcttcttatggatgagcaaagaaagtggttcctcgagatgaaatctactcctagtgaaggtgctgtgaacatgcttgctgtctcaccttgctctcaagttctagagactgcttattttcttaaatgccatgaaccaacctctgctagcttcccacttttcttctgaagctttcctcatctccctcaaccttcatagaatgggagacaattgggcctttgccctagattaggttttggcttaaaggcgtattgcagttggtttgactttctatgtagatcactagaactttttccatatcagtaaaaaggctgcttcattttcttatcatttgtgtgtttactagaatagcactcctaatctctttcaagtacttttcctttgtattcacagcttggcaaactgtttggcataagaagcctagattttggtctagctcagctttcaacatgccttcctcagtgat

SEQ ID NO: 32360 - DNA, 1028 bp, Homo sapiens
tttttccctgtcccccttctttctctctgcccccatttctctcctctttattgggactttttgaaagtttgatatatcctaattattttagtacaattaaatatattttcattgttttgtataattaaatatctttcattgttatttgttttatacaattaagattggtttcatacaattaattttaaaaagattaaatctctttttcttcagtattttttatatctgttgtgagtgcaaccacgtatctggcccactaagctaaaaacgaaataatccttgacttttccctgactgcacttctgtcctattccccacctctaattaactgtgaaacacggcttactttatgaactagttttatgaatgatttctaaccttttttttcatccttatttttcattgccgtgcattgagcccttatgatctctcatgtggactattctaacagtgccttcactgatatccctttgaaatcaatcctgcagagagtggccaccgtgatctatctagaatggaaatctgaccacatcatttacttgtttaaacatttggcttctaattacctacaggataaagtccaagatccttagcatgcgatgtgaggccctccgttatcgtgctcctgccagatcaatggcctcctctctagtcatcctatactttctagcttattgtatattaaaactaaactgttaatggtttgctgaatacagcaccttgtttctctgctctgtgcttctacttgggttgtgctctataccaagagtgcctcctctcacctttgtatttccttttggacttttcactgttatcctcaagaagtacctctaaggtgttcttcctacctagcctagttttttctaccaacctagttcacctagtttcctgcctaacctcgttagatatcactcttcgctgcttcaagaatactaaagcaacactcctgatattaacctactactcagttttgtgtggcaaaacagagatcacatcctatttgtctttgtgtctctggctgttagcac

SEQ ID NO: 32361 - DNA, 1047 bp, Homo sapiens
ctcctgcctcagcctcccaagtagctgggactacaggcgcccaccaccacgcccagctaattttttgtattttttcagtagagatggggtttcaccatgttagccaggatggtctcgatcttctgacctcatgatcctcctgcctcagcctcccaaagtgctgggattacaggtgtgagccaccgcactcggcctataacttacttttgataatttcattagtagaattagaaagcttgctcttgttctgtttgcaacagcataaatagaaattgactttctatgttaactgtagtttaatattcacttgaactaagtgtttcaatcttattactgaaaggattgaggtttgatagtagagtgagtcagttattagccgtgtaaccttgcacgattattaggtacatggcttgcaaatgcgacctcttgccttggctttctcatctttaaaatgtgaatatgagtactcttctcagaagattgttgtaagaaatgaatgaattaacaactatagagcatttatactcatgcatggcactttattgagggctcagtaaattttaattattttaaaaatattattactcttgtccctattatgaaatccagattcagataatttgatagagggtgagtataagtggtagactggctataatctatggactgtttgtttcatatgaaggtgcagttttattcactttcagatattaccaaatcgcagcattttgtttttaaacctctgagaccatatctatttcctttggatgatcaggacagctgaacatctaatccattcattttggccctcattgtgattgaaacagctgaattcatcatacaatgatgtgctttgatcattaagacagccaaaatgaaagcattggccatgctgcctaaggtccatttattttggaaataacttttgacaggtaagacacagtcccgtattgccttcctgacatttcattgatgtcttctgcagcttctggtagcatattcatcatttagttaatacgctttttgttatcatttgttcactgttat

SEQ ID NO: 32362 - DNA, 1051 bp, Homo sapiens
gatgggcattaggcttagcttctagtgacctattcttgaacctgtgccattcaaagacagcatttgcttgtgtattatttagaggggccttttaaaaaattctgtatgctttatgaaaatattttctataatttattcaatttctttccagtaaatatttttcttttcattaggaaatatatgtgtgtctgtataaacacacacgtagatatcacacactaaagtgtatacatataaaatacaagagaaatatactgtaagctacaaatatgagccacatgtgtaattttaaatcatagcaacaataaaaggaaaaggaaaaaggtacaatcactttaaagaatatcatttaacccagtataatgtgagcactttaaggtgtaaacaatttaaaaatgttaatgagatctacacttttttcatattaaatctctaaaatctgtgcacattttatacttacacacatctgaattcatgagagatctacacttttttcatattaaatctctaaaacctgtgcacattttatacttacacacatctgaattcatgatattcacagtagttagtggctacttattaggcagcaaaaggataggatacatgcacactcaaagacttattttgtaataagtcttaaggtagaacttgaggaattctaaccaaatcaaattgtgaacatttttttcttcaatctacaagactaaagttgatatcagagtgatctttaatttaacataattaccttagttatagacatatgtcttcaaatccacaaatgttaggcacatgcttatttggtggtgcacttaatcctacaccctcattttctagagactgctttggaggaatttcaaggttttacctacactcaaatggaagcaggattcactaattattgaaccatgaggccatcctaacgtccatattattcacagaatgtatactttcttgaaaatatatgtaaaaatttgcatttaaaatattttcagtgttagattttgactttaaacttgtattttgttatatttatgtttatattgaggatcaa

SEQ ID NO: 32363 - DNA, 1026 bp, Homo sapiens
actatcatcagtgctcgtgccttcctatcttgaggttatctcatcacatggcctgttcttattctcataaccctcctccatgtaacagtttctatgggatttttgttccctaaaacccacagatatttttgttataatctgtattacatatttgctccagtattctacctatgacatttattactgagcagcagaagaggataacataaaataagttattattttgttatgtttttcttgtttataaccattattttctgtgtgactgctttatccctttgttattaaacttgttatctggttttaaagttaatattaaaattgctgagaaattttaaaatatagactagtattacttcctttcttttattcaaaaaattattgtccttatttagctactctgaaataaagcttattaacacacatttgaaattctgtagccaaaaacaatgctcaatgccatcccagaggggtaatttatagtcatgtatcacttagtgacagggatacattctgacaaaggtgtcatccagtgatgttgtggttttctgaatattctagaatgtgcttatacaaacctaggtgatatagcctggaacacatcaaggctttatgatatgacctgttgctctaggccacagacctgtacagcatgttactgtatggaacaccgtaggtaattgtaacacaatggtaagtatatgtttatctgaacatatctaaacacagaaaaggtatagtaaactacgttataatattttgagaccacagttgtatatgtggtctgtcattgactaaaacattgttatgcagtgcatgactataagagtgtgtgtgtgtgtgtgtgtgtgtgtgtgtgtgtgtgtgtaatgggagagagagactgactgtaaacaaaaacatgaaaggcctattctagtcttatctgtctgaaagatatttgaaaatcatgaattaaacagtaaaggttagatgttactccgagaacatgctttgaacctcctgtcaaatctctttactcttaca

SEQ ID NO: 32364 - DNA, 1016 bp, Homo sapiens
ggaggttagaattctatagtaggaggcagtgaagcttttaaaccccaggaaataatgataaaagtcatgtcctagaaaattaaagtctagtgtcaatgtgggagatgactggcaggcaggactggttggaaggctgttgtgcagaaggcgtattagaagctaggattgtgccggtagacatggaaagaggcaattatgttataaaacacgttcaggatgttgaattgaatgtgcagaaaggtaaatgtagagtcaagatatgacgctttctagcctcagcaactgggaaaggtgaggccattattccaagattatggagatgtgatgaatagattttctgagtgagaagataaggagtttggatctgtgcatttaatacagatgttcatggaatgtccaaaagtaaaaatttgagaaggaaattgaaagagtttcaggccagatatatctataggaaattcattagcataaatatgatagttgagacaaaagaatgggtaaggtcatttaatgaaaaagttaagaacaagaagcctgaaaactcatattgagactaagtaaggctaaaccacatatgaaaatgaggtagaagaaatttagtgggtaagagcaatccagatgaaaccatctgggatacctgagaaaaactcccacagtgagacttcataactgaagatagaatttcgggtgaaggtgggaaagtttcctctctaggaaaaggtagcatttgctggagtgagtgcagctgcaagtagtagtggacagctaaagattatacctcaagggttctggaaggttctcgcatgggctaaaaatgtacctctggtggagccgaagcccacatgggatgccacatgggatctgggcaaggaaaatgaatcagggctgacggcccagtactggtttcagccatgtcaatctgtggttagactagttacttacattgaggaatctttcctctttaagctcatttacttctatccttgtattattatgatgattttgttttggtcatc

SEQ ID NO: 32365 - DNA, 1045 bp, Homo sapiens
cttattttgggcaaggcatccctttttaggcactggtgatccgagggacacccatgggaaatgctgtcctgtatgaattttttcactcacacaaatattagtatttataaacaatgaaatagttttctaaatgctctattgcttttgattgacaaatgattgttattcatctataataattttgtaatattgttgtcttttattcccttttcctgttttaaatttaattataagcagactgacaattacaagtatacaaatattcatataaaatacaaagaaaataagtatgtttattttccatcatgcacaatattttgagtttgcttgatgaacatgagacagattttccaagaaatatctttgttacagttgaatttggctgaatccatctgttacatatagatattgatacagatattaggagatctatatgtatatcctctattcgagagctatgtccagtgtttgaatgtaaggctaaatatactttatattggaatgttggtttgtcaactaaggagtcttgtccttttgagttagcaaagtgtaactctaatgagctgtaaatgtataactgtattatacaagacaatatgttatatgtatagtaaaaaagagttcatccatggccaggcacggtggctcatgcctgtaatctcagccctttgggaggccaaggcaggaggatcacgaggtcaggagatcaagaccatcctggctaacacggtgaaaccccgtctctactaaaaatgcaaaaaattagctgggtgtggtggcaggcacctgtaatcccagctactcgggaggctgaggcaggagaatcgcttgaacctgggaggcggagcttgcagtgagccaagattgtgccactgcactccagcctgggcgacacaacgagactccatctcaaaaaaaaaaaaaaaaagcgttcatcaagccatgaagtttttgtgagacattcttaggttaaaactagaacaacagatttatgtaaccccaaatgagtaaagcatatggtggtgagaaaatattttatcatttt

SEQ ID NO: 32366 - DNA, 1050 bp, Homo sapiens
ttctgtgctctgatcttttcagtacattactgaaataggaatatggtattatcacatcttggcagctccatgtgctccctttcctcatgcccttaattctctccatataccttacgtcagtagtaattgggtaattaggcagaaatgctgtcgcctgagtaagggtgtaagaaatgtctcattgaacagaataatctttctttgtactcatgattcatttttgatatgctacaactctatcagcagggaaactttcctccctgtcgagattctaacaggcctttaagacaagaatagacggagaggttctgttattagtctcaattctgaggcaaattgtgttattcttctatagtcacattttctgccccacagtatgagattttcggagatggcagaaaagtcttctgttgagggttttatgaatcacaagataagggttctattgtgggccacttgaagaaaatttgtagctgatttggcttttaaaaaagctggaaggcatttctggaagtctgaagagctcactgggttatttggtttcaactccattttgatgcagtgtatagatatccggagcaaaatgcccttccgtggagaaaattctgtttctggctatcagttgcatcatgattcccaagcaaatagctgagtaaaagaaaacatcccttaaagactctactgcattcttgtaataaatcacaaaaacattggtatcagctttcttagtcattctgtgagactatagttaagaatatttccagatgtgtcttactgaaaagaaggtaattttctttcatgcacaagagatcctttcttaacatagaaggggaaaaaaaatcaaacactttttagtcctctgcaggtgacaaaatttcaatttcctgtattcttagactgctagcattttgctcttatcccatgagaatgaaaggagatataatcataagtcaacaaatacttctaaggtaatagaaatgaaggaggcagttttccagtttcctgacaaggtagcttcatggaacaataatctgaagaaaagaatgcaca

SEQ ID NO: 32367 - DNA, 1607 bp, Homo sapiens
acctaaagcataagatgaaaatctaaagctcagtgtattctaaattacataataaaaatgaaactgactcacatgaaaaaccacagaccttcctaatgactggctctgagaaatgtgggctcatatgtagggttacaaaggtaaaccaggctttatgacacttccctgtgccgctctccatccctctccaaacattcacactcgcatgggcatcagtgtcttcacatggctttgggtttgctttctttcagaaggtgactcttggaatcaaacaagcaagtgcaggttttcttaacagaggtgatgcagcatctcgtatttttgatagcaccctaacagctaacgagaaatgtaatttactgggtgctttctatattccaggaatagacctagtactttacatataatatattacttgccctttaaaataattttatgaagcatgtgtggttatttttattcctattttgcatatctggaaacaggttaacaaaggaaagaaaatttcatcgaggccatgtagctaagttaagtagagggccaggtccaaagattcaggtactgttggcttgtgacacttctcggtctctgctcaatggtttttcttgctaacagtattttgaaattacctcaaaagccttgtgttcactcccagaggataagtcctgattggctcagcaattttcgcaatccttttaaaatccttgccattgatgatgggctcagccatgattcctgtttacagaggaagtttgttctagtgcttctgggaaacatttccttttggtaaggcagtgcaagggaaagccttttattcctaccaatttctgtccttttgaggacattcttgtgtaagaatcatttcttccctgtaaggcaatgcaagagaatgcttttttactcttaacctcttctgtccttctgagaatactgtgtgagaatgagatgcttcaatctgcaggattcatcttttgcttacaagaggaaacatggaaaacacacttgcatgtagaagtcgtaagtgagagtctgggagcttgaagatagtattgagtatcagaacaaaccctaatatcagcaacctctggaattattactaacttaacttcattacggtattctgtcacttttaggcaaatggacggggttgggtcaggacctctaaggcaaatcaagtgaacaaaccatgagagagacaaaggtggtatacagatttggtgcagatgaaaaataacagtgaatacaaatgaaagacaaaaatgctccttaaaaataagattgttctttgctttaagtttgtgacctatattttccataagattttgttttctgttgccatggtatcaacttatttccaaaagctatagaaaggccaggtgtggtggttctttgaaaaccatattataaaatgcaatccaagttttttaaagttaaggaagaatttgaggtgaaagttaatcttaattgtaacaatcaccaataatttctagtgcttactatgtgtcaggcactggtttacatttattaatttactaaatccacagaacaattcagtgaagaaggtattactaatattctctctttgagattatgaaactggggctgag

SEQ ID NO: 32368 - DNA, 1028 bp, Homo sapiens
atgaactcagtttcattaattgagcttctagaataaatagacccaaaattaccatggtgctttaataggtattacaggttctattttacatattatgtagggtcatgtatacattatatatcactgtggagtaatgattgtctttcatttattttctttcagaccaatttagaattattaatttttctattattggtatcaaatctaggaaacaatggtccctacagtgttgcagactttagatacaagtcttctgtaaaatgctgtttgaacttatttaaacctaattcatgtgatgccaagtttatcctaaggcttgtgctggggcaggcatgcacatcaaggaaaaacaagagccagttcccaaagggagtgcagacagctaaattctgtggggttagttaacgctaggagtcaatgcggaatccagagggatgcttccgactacgtttttattgttctttttttttttccctgaaatggtcaaaggggcatgtgcttgaacatgtgagccagcaaagcgtctgcggttctaatcccctaattaggctatcatacacagatggtatttagttcttttttttttttaaatgaatgaaagcatgtggtaatgatgttcatgaatttttataagataaaaaatgctacttcagttttgcttatatttgcctaacctcgtatataggtcaagccatgagtggaaatatgtgaaatttaatataaatagatgatgtcattatgtgcagtcagcttgtaggcatgatatatgtgtagacatacacatgctccctgtcacacatatatcaactcagatccagtatacacgatttaaaatttgagttattttggtagagaaatgagactttctcatgtcttcaaccctgcgtgtaatatcattgtgttataaatatctgcatccagtttttagttatatgctttattaatatttattaagtccaacttagcataaatcaaaaaatttgttacacataccatttagtttagtttaaaatgttttaggcagaagt

SEQ ID NO: 32369 - DNA, 1050 bp, Homo sapiens
ctatgtatttttttccatttgatctattaaggccatgtccattaaaagtataatattaaattagtaattcttatacaaaattgaataactctgatcttattggatgcacataagctaatttaaaaggaatttctagtgaaacaactggaaagtatttctctttccatccttgcctctccctttcctttgagtgttgctgtatcaggccacgggcctgatgcagtcgataataaaatctgccagtttttatttctgtggaggaagaattatcaataggaagtaagagaagaatatgaaaaatagtggctcttgttgggaaattagctcatcatagttaaattcaataaaacaaagtacttatataagatgctgagtgtctaaaaataaccatactcttcaaaattagccaatgaaagaaaaatgcttttaattgttgctgtttgcaatttttgtggcatttttattgttttcttcaaattttttagtgccagatataaatatctccatacatgagactaaccattttcactgtaaacagagaacaaagaactgaatgtttgttgtgaaaagcgcagtctatgaggtgaatgccctaaggggaatgcggacttaagaggggctccgtaacacactttcccaccaacttggagatgctaaaatgagttggtgaaatttccagcagtctcttctccttcgtacagctcagaatcctctcatcaatatttcttcccactattagagaaacaaataaaactcatctctgctgggattaatttgctgcagcctgaagcattgagcctctactggcaaccactactgagctgaataagcagcatccccgcatctgttgacaatatgaaattgttgcggcagccaatattcataagaaatggcctccagaatccaaagagaatacgctagtccataactatcagggtctgaccactgaaagaatagcatgtaattccagattttctaagctatatttaaatgagggcttcttttctctttggatcagaatgtggagaaattgtgtagacccaattttac

SEQ ID NO: 32370 - DNA, 1070 bp, Homo sapiens
ggcagttgagtggatatgagatatctctcaccgtggtttaatttgtgtttccatgatgcttcatgatgttgaattttttttaaatgtgcgtattggccattcttatatcttttgcgaaatgtctgtccaagattttccttctccgaaggttgtagcctctccatttcttttgcctattgtttttagtcactctccagtgccttctaagagtttttgtattttttccattgtatataatcattacttgcaggtggggtggtctaatttaagctactcagaccttactgaaactgtaatgtaatcacatctctttgactcattctttatagttgtgtcaacctgtccctgccttgttttctcctaacattcttgtgtaataaaactttatttctcagggtggaaattactgttttaatataaaaaaggaaagatcggaaggctgagatggaggacttgcttgaggccagcctgagcaacataacaagactccatgtctaaaaaaacattagttgggcgtggtggtacacacctgtaatcttagctactctggaggctgaggcacggggatcacttgagcctaggaggtcaagactgcagtgagttatgattgtgctatagcactccagtctgggtgacatagtgagatcctagctctaattaaataaattaagtcaataaacaaataaaaacacgaaatgaagccacttatttagattgcacaggaacataaccatctttaatataaatgtattcaacatgtaaagtattccgataattaaaaatacaactaaaaaagtaagttcaaagtatgtcttaatggacaaaaaaatatccttttgctatttcccagtttaccattttcaccagtgagagtttgtgctgatcagtttgggctcctataacaaattgtcatagactgggcagcttaaacaaccaacgtttacttctcaaggttctgaagtctagaagtcgggttccagcgtggtcagattcttgatgatggccctcttcctggttatgtcctcaccttcctttggtgcatacaagcagagagagaaatcacttctctt

SEQ ID NO: 32371 - DNA, 1652 bp, Homo sapiens
tgacaaaagcattcagaattttatcttgagatgtcaagaacaaatctcctagtacgctgtgcttaccacagtgtgatggcaatgggatgggagaagggagaggtctttcctcctgccagtatgaggttgcactttcctgaaatccaggggactaaagtgggagaaagaacaaaggtcagcagtggttacctgatggaggagaggaccaggagtcctgaattttaaggaaatgggcgatatttatcttttgagagtggaatgggaaaaggaattcctgtgactatgtagttgattttatataaatgatatcaggcaaatcaatgatatgaagccaactagaaatggcttgatatatctagattgaccctttaggcataaaaattaagagaactaaactgttcagaaacatgaactaagtatttcttcactgatccacctaccaaaaatattgcagccttttatcccaactgatttaaagtgagactctttagcctttcatttggaactctgaatggtgatgatgatgatgatgatgataaacacttcttgagctattattactcttaacactcactgtgctaaacactttgtaaagatccctacaattactctacacatcacaatgcagcatatattatttccatttcagatgctgcttacagtgattacatcacttgcccaaggtgataatctggccaatcagggctgggcttttcacaccaggtatttcttccagagtccgtgctctaacccggaggtccccaacctttttggcatcagggaccagtttcatgaaagacaacttttccacagatggggtgggaaaattagattctcacaaggaggatgcaacctaagtccctcacatgtgcacttcacaatagggtttgcacttctatgagaatctaatgctaatttttgtattttttgtagagacagggttttgccatgttgcccagggtggtctcaaactcctgagctcaagcgatctgcctgcctcagcctctcaaagtgctgggattacaggcgtgcacggcccgcattttttattgaggtaaaatttacatacaatggagtatctaatccaatgactattggtgaatatactcacaaacccgtgtaaccacaagtcaagaaatagaacatgtccatcattccaaaatttcctcattagtttttccagtcaatccctatcttgagaggcaaccactgtttagacatctatcacagcagattagttttgccttttctttagcttcatatgaatgtgatcactagtttatgctattttgatgtggcttctttgacttaacacgttttgaaattcatctatgagtttacacacatcaatagttcattcattttttattgctgagtggaattctatgtgtatgaatatatcacaatttgtttattcattcttgtacgaacggacacttggattattttcagtttcagctattatgaatatgttgctaacacattatcatacaagcatttttatggacatatgtttttatttcttttgggtagttttgagtggaattgctaactcgtgtcttaagtatatgtttagctttataaaagaccagccagacagttttccaaagtgattgtaccatttctaccagcagtggaagagggttgtttct

SEQ ID NO: 32372 - DNA, 1040 bp, Homo sapiens
cagacattttgaggattgcttctaagtgtacaacaaaagtataattcttattttctaggagagtcccaattcagtaaaatttacttctcttgccaagtaggtcatctgaaatacatcaaatgttgtgtccagatttttgttttaaaatgtgtgattgttacttctaaaaatggcttttggtccaaaagaaattatgttgagaattaaaatgacaaccacaacacaaccactgtttcctgttcagtgacttcacttgatcaacttttgtgatagcaatgccaaatcttgccaaagaacaaatcatttttcttccaaggaaaatgttgcttttcaaagaaactactatgtttatgtttggtcatccagttaaataagaggatatttaattagtgcaatggagtgattttaacatttatgcttaattttacattggatttataatttctggcacttgacaaggcaatggccaggtacagttttctttccaatgatagcatttcaaaatatattctataagcaaggatttagttcaaaaacttaaataattttgaaaaacaacaaggccttttaaaattgattacaacctgctcccccttgaattttactttttttctctttctttctctcttttcttcccttttcttttctatttatgtttaaagcttctgcatttattctttgaccaaaataatacatttggtcttcaacgaaagcctggatatttgtaaccctaattgtcagcagcagtatctttctgaccgctgaagggaactgatttgtgtctgcattagcacccttcacactccaaattatacttccccttccccctccagtggcagtttccaaactctcaacttgtttcatgtcaaatgcatgttgggctctgtaataaatcactgatgaacagccaactctctgttttggaggtgcagcctctgaacattgattaatgtgattcttcaagaatggaacaatggccagtgtgcatatgcacaagaaaagctcatccactgcaatagatagctttgttccgtgtgctc

SEQ ID NO: 32373 - DNA, 1027 bp, Homo sapiens
gaaaaatactgatgcttgtgttccttccccagagcctgtgaactaattgagtggaggtgtggcctgagctttgaaattctgaaaaggtcccaggtgattgtattgctcagccaagtttttgaatcactggtctagactgtgaaggtacagaataaggagggtgagatactgttcactgtcaggacaccaaattgtttccttacagaaacatagctatagagagatggcaaagcctaatgtgtgtggaattgtgtgtgcatgcatgcacattcatacacagctgatatgagtaaatcatacagttttgttgcattttctcacctcttgctatcctgcctccgttgattgtgaactaagaattatttctgtgtaggcagatgtgttcattgttaggattagtggtgtatgcagcagatactttagagcccaaggaattcctctttcttgtcccaccctacccccaccttttttacctatatgaacacaagatgaacaaatacaagaaactggctagaaaagcattttcaaagcgctgatgaaattatcacatttatcaatattttaaaatttagacacatggcaatatttattaggcacttcttaaaataactcttcttttttttttttttttttttttgtgagcaacaaggctgtttattttacttgggtgcaggcgggctgagtccgaaaagagagtcagcaaagggtagtgggattatcgttagttcttataggtttggggatagtcggtggagttaggagcaatgttttgtgggcagggggtggatctcacaaagtacattctcaagggtggggagagttacaaataatcttcttaagggtgggggagattacaaagtacattgatcagttagggtggggcagaagcaaattacaatggtggaatgtcatcagttaaggctattttcacgtcttttgtggatcttcagttgcttcaggccatctggatgtataggtgcaggtcactggggatatgatggcttagcttgttgagtgttgttactat

SEQ ID NO: 32374 - DNA, 1057 bp, Homo sapiens
tcaagtgtggcataaccatgcatcctcttattgaatattgaattgcaaagaaataactatttaccatgatttaaaaacatataaccatttaatagcagtcacttctattaattgcctaatcagattataatagtttgttttctttgcaatgaaatttccccacaattttaatggctgtgaggtacatgaagtcacacagcatgacatttttataggagccgaggtttccacttcacaaaatgcacttacttatttaagttgtccctcagcctctaattgctttatctttcaaaaaaagtggtatgtttttattctgtgacaatatagatccaaaaataccattttaacattgagccagttaatgactccaaaatttgataaacactagggtaccagtcctagcacaggacattggaaataaatcaagttgtaggtgagaggaaagaacaaatacactgactcagggggatgcctggagtttggggatgcgctatatacacggttggtacctctgggctttctagtctctctttgccaacacctggatcctacccacttcaccctttggtttcttcattctgtttacaaactaactgaaaacagacatgacatgttataagaagaaagaaaaatcactttacatatatatacacaaaatttatgtatggacttccatgtataccaaatttaaatatatgtggacttccatatttattttcatatatgccaaatttaaatatatacagacttccatagatatataaaaatatatgttttagggccaggtgcggtggctcactcctgtaatcccagcactttgggaggccgaggtgggcagatcacgaggtcaggagatcgagaccatcctggctaacacggtgaaaccccgtctctactgaaaaatacaaaaaaattagccgggcatggtggtgggcgcctgtagtcccagctacttgggaggccgaggcaggagaattgcgtgaacccaggagacggaggttgcagtgagccgagatcacgccactgcactccagcctgggcgacagagcaagactcc

SEQ ID NO: 32375 - DNA, 1047 bp, Homo sapiens
aaagtatcagaatgtttaatgttcctttgttagaataatgatgtactacatgtactcatacatatttggtccaggagagttgcttatcttaagaaaaatgagtctaaacctcctgatttttaaggatcccttcagttttcacatttgattcatcataagacagcttacaggtgcagacatgtttacttaactgggcaaacatggagagaagctgcatcataaaggccaagtcagtggctgtcaggatggttttaattaacagtaaggcaccattggtcccattttgtgtgcacttcaaaatgttagttgtccattgaggtggctcacagatgaggcactacttgagcctagttgaaatgcagctgtgacatatgctttttaaagaagacaggagagaggagtttggggcacacgattccgtgtgaattagaagctgttttatgagagatggaggacagctggtctgttcataataaatgttagagaaagtctaatatggcaggaaaaatcgtaggattctgaaataagaatgttgttagcaatagcaatatatataaaacaaaaatgaaaaacaacaaaaaagtattcacatttataacattcttagacttttattagagttatgttgttttgtatgctctaccatcatacctcaccttgacagtcatgctgttagctgcagaagacaatctgtcatagtggtttaaacactggctttaaagtcagacgtacttagatccaaatcctgcccccgccacttaatgattgttttaatgttagcaagttacttcactgaggcttcatctcttcatcaaaaaatgagtaatcgtacttcctttaaagatttattgtgaatattaaagcacatttaagtatgaaatatagcaccttgtttatagtgagtgcttaattatattattatatgtgaatgtgtatatatacacattttttccaggtatagtcatctatcagtttgtttagtatttgatatcaacagtagagtttttgtgtgtgtgtgtttgtcttgctctgtcatccaaactgtag

SEQ ID NO: 32376 - DNA, 1034 bp, Homo sapiens
caaaactttctggacgtttgcctctgttatgtatataaaagatgaatttataaagtggcttgaaatgtgaatttaacagcagctttattttataggaacacgcaggatccttaagaaacatataatgctaagtattttatatattgaagattattcattttcagctgcaaaattattatccatcatttgttcttgcattcaaaataaagaaatcctttatccttaagtaatataatgttaagattcaggaatattttaatacccatattcatcttcttaatgtctttatgaaatgtgtctacggaggtctgactttacattaattaaattttgaagaatttcagggttgaataatttcattcttttattacagcatcattgatttttatagctggagatattagaatcaatttagtataccaaacagttaatcagcaaaaatattcatggttattaaaattatcttttatatcatttcagttgcataattcatgatcataaaattaaataactgttttactaaaatacactggtggtgtaaaaaaaagacttttttccctagatttttctcttggaattgctcttttatctttgacatcatgtacataaatatcaagtgattacatttttcaaaagaaaaatgaaataaaaatagtaattgattagttttcaggttgatgatttatttattaggaaaccaaaatattcaccaccacaaataaattattttgttgccaggaaatcaaattataatcagaaggtttcttgcaaaaatgtagttagataaaagatgcttgttatgcttgaaacacgtcatcgagtttaatgtatattccttttacccccagaaaaataacctttgtgtttgcaactcttgggcaagactctcatgctattaacagtagaagactcacattggctacatattcctttctgaccaactaaatacatacttctaaacaataggaaaattatgacataatacttgatgtggacataaaaattattattgtatatatatgcaatttttgttt

SEQ ID NO: 32377 - DNA, 1123 bp, Homo sapiens
caaaaaatcatatcaaaaaatctgtgcttctttacatatactatttctgttgagtgcattcaacaatataattgttttgtttaagtgaggaggagaaaattggacgttcaagagggcagtaaccagcagaaacacttcttgtgactcatacacaattctacatttttattcttcaaactaaagataacattctttttgttaaacatctgatgtttactcacagattatgtatgtgatcatttgaaaattaatgttttttaaaaagggtaacctaggttttaatttattgtgacatacagcctgaactttctacggctttgaaaataaactcacagttttctatttgcacatggatgcttcactatttagctaaaattgatgatattatcacaaatactatagcttgtgcaaggtttcaagaacaaggaaggaagtttaataaaacagaggctgagactcagctttaacaccctgtctcccatgctaatctcctgtttacaataatccattacgaatatttaatggtaggcagcatgcagaccagaattaaaggacatatgggtacagttatcctggttaaaatggccaacgtgccttgtattgtgtatggaagataacaggacaggtggtaatctgtcttcacggagtggagacagctggtattttctgtaagccgaagccatctttttcaatgtagtctcacctcgcagctgatatgttgcttattagtataatttaaaacatatattgatgttaaaaaccatgctctctttctgtccagtataaaaatgcagctcgtggcacagcataaacagatgaaaaatatgtatgtatattccagtatttgtaattaaaatcattctgcttaatttaactgttttttaactgtaaaatcaatattatctttaggctcatctataaagtattttttctttaagctgtgtaagggaactttcttccctgtgttgcatattctccagacttacgaagttattgggggaattattagttcattaccatcaaaatatttttgttaaatttcattttaaaaaatatttcttctctcttgtttaaactacagtatgtttcatttcttatactaaagaaagactcactggacatg

SEQ ID NO: 32378 - DNA, 1034 bp, Homo sapiens
atagctgattattcatgatggaatttcagattttacaaaattaattatttctagatgcaaaactagtgagtttaccatgttcaacaaattacatttatatttaagatggcctcacagtcaaaatagcctaaatttgtataatttagcttaatttttcataattatttcaaaaacgtttgttatttttctaaaagatgatgtccctgttaataaaatactttatatttttaaaataagtaaatagtcatttaaaaacaaactctgactagtggatcacaaggtcaggaggtcgagaccatcctggacaacatggtgaaaccccatctctactacaagtgccaaaattaactgggtgtggtggcgggcacctataatcttggctacttaggaggctgaggcaggagaatcgcttgaacccgggaggcagaggttgcaatgagccgagattgtgcctctgcactccagcctggtgacagaacaagactccatctcaaaaaaaaaaaaaaaacgaaaaacaaaaaaacaactctgactatactgacattaaccattattaagtgggaataagaatttaataatttagcttgagagctcataatgaaatattttaatttcagacttatctgatttgctaatgcttaagtcatttctttactcaacctacacttacatagtaaagttgtgggtgaaagttttcctggtctcactcgttcaaagaagatggttatgacagtttttagccaccatatgggcttcttttgttttcttcaaaaatagaatacctgaattcacacagtaatgtctatccagacccttacccacgtgaactaagctagatagtaatttccagaaactacattatttaaccagactaaagaatgtaaatcgaatgattataataccatacttaaagtcaaaatcacaactataattttgcagaaagcttccagttttgattagatataaggtaagaaatattgataaaagattacataaataaaaaaacagtattgcttactaattccatttttttc

SEQ ID NO: 32379 - DNA, 1019 bp, Homo sapiens
gagctgttgctccactgaagctcctggaagggtagaggccagaggacctcctatggggacagatttctcgggcagcttgagttgatgagctggagaggtggcttgaggaaggagtaacttcttctggaatgagaagtttctcacttcttcctcttctttccagtcacatcatttctttcttcccttagcggcatttcaattttctagaaaagcggagactactatagagtagcattacacacaccatttaaagctttttctctgattcagctgaagtctctggaatctgtctggtggcaatctacaattctatggacagtcactctggtcctggggaaagggaagatattaatcagtccctttccactttagaaaatgacttgcaaaaaataaatgaaacaaaccagggatgggatcatgtgaataagatatttttgcttaccattgagtttccttcatgaaatgtcagttccatgaggataaggaccttgtaactcctaataactgctgatctagaacagtacctggcacagaaaaagtctcaaaaatgtttagtgaatgaatgtactctgagcttaactcttgaagctgattttctggggctgaaaggtaaggacctgatagtatctctggaactctgtgacttcattttcttgtctataagagggcaatgctatatgttatcttgcttaataattgcataattggataactattggaaaataatttgcactagtcagagataggcattatccagataagagataattatctttattaaatagtcaatgatgtccttagaacttctgatatttctaatggttttgcaaaactgcagtcttagtgcctgaaagaaaatcagacaatgagtccagatgcgatagctcacacctgtaatgccagcactttgggaggcagaggcgggtggatcccttgaggtcaggagttcgagactatggtgaaaccccatctctactaaaaatacaaaagttagccaggcgttgtggtgcatgcctgta

SEQ ID NO: 32380 - DNA, 1033 bp, Homo sapiens
atataaatatttccatgtaaatgtaaaacaatttacagatattaaatatttaagactctaaatatttaattatttttggaacactctgcttttgtttaaagtgagacacaaaattcagaaactagaatgtcacagcctttgccattgcagcttgcttcctttgactgagatgtgctgatagtaaccattttctaagctataatgattaatgctacttaggggaggtaggaaaaaagttaatttaactggagtcgttcagttttaaagggattttattgaacacagaaagtatacacaaacacacacacacactgaagaaatattttaatatgcctgttacagatgcagttacagctcttttttgtttttcagtgtttttagaatgtcagatccaaatattttttattttttaaaaataaagttgaaacatatgatttattcatgaaatttcagagggggaaaatatgaacaaaggaatccctctccctctaaccttgccctgaaatgctacaatgactgtgataattagctccatgttattatagattatttttcttataaataatttatatttcagtttgctttagttctttaaaaaggcaaagcatgaaattgattagatataattgtacgtttgattaatatttaatttgaaattattttgcagcttcaagtttagatgtaactgtcacattttagaatactaagtgtatattagatagcttggtataaatgtcttcctaattattcacttttttattattcaaaagcaccatttctcatagctatacatcatgttttataatgtgtgtatgtgtatgtatacatacttatacatgtatgtgtgtatatgtatttatatatgtgtattttttttttcttttgttggataacagagttgactcaatttagacatcaccttttttttcttccctaaggagttcaggtcataattcaataatactacatatataacaagtactgttataaatgcaagtattaaccaatttgaaaacatagctcattcattcca

SEQ ID NO: 32381 - DNA, 1117 bp, Homo sapiens
tctttataaatgaataaaatggaaaggtgcatctggttatctggggcctaatttttaattcagtatatctgatgtttaagtctaatctcagtctcttagtctctaaagtgaaaattgtaacttcagtcgcattttaaattgtgttgtatttaacccagggtttaaattgaagttttaatagtgcaaatgacattttacatttgtcaggagaaataaaagtttatgatcaagttatttagtatgcctgaatgagaacattttaaatcttatccagtaaattatggagcaaattcagaataaaagctaaaaagttaaagagaaaatgggcaaagacaccacctccacgaaagtatttatatatctcaatctctccccctccccgactctgtacatatttaccaggtaatactgtcctgtatgtagatttagtcacattaagttactcttttatcagattttcatctcagtcaggcaccagaaaaatggattaagagccagcatttaatgtagaaggacctttagaacattttaattatgtaattcagcacttgtcatagcttatgagagtgttctcaaatggaagtgtagtacaggttgcaatctcgttgactcttgcttaaaggcattcttggaaaatatgatttagaatattttcctttgggaccacccctgggaagaaaccagtaaagagtcaataactgatgaaagaggaacaatatttatatgaccagtggatcgagaatctgtggatatttgcttttctctctgcttgtcacttttgcttaaatcacgcaaagtagccctaaaattctgtgtttggactctaacattggtagacaataaggtcaatttcttaacatttttctttttcttttcttcttttctttttaaaaagtaattaacacttaggtcactgcattgtctcccattaaatgagttctttctggaccatgttggtaataattcttaaagcctccctcagagttctaatcaatacatttcttatgaactgttctagaaggcgttttgttctgttttagtttaatgggttttcttaaccctatccaatgactcctttctgtagtggacattgtggatactctttttagttacagac

SEQ ID NO: 32382 - DNA, 1032 bp, Homo sapiens
ccatctgtgattggttgattccacagttgcaaagcccatgaatatagaggaccaactgcatgttttgataaagtcatatttcaaaagttacgatattactatcaagttatgatattaaactatcacccccaagtaaaaacattaacgaaaagtgtcttgaggcaacacaggtttcatagcgcagttgttggtaatgctttcaaaacattttcatgtgttttatttgcctttaaaccaagttttacagctgtaacaacaactgtatttcttggttcctaacaattgtcaacctctcaaacattgaaaaaaaattaatatagaatgccatttaaaacctttatttctgtatagaaataatatttttgtctattgtgccttaaatatttatttaagttgaagtaatgcaccaaagttattctatttatcagttatttgggggattatttatttttattttcatttatatcccagttataacaagggtagacctcagtgcagatattggttaatgttttgctgctgttctttgctgtgtagttaaaaactgtaaacctttttctcaaaaacagtattgatgcagttaaagttatctcacacaattataaagtcaaaaaattggaatgctaggaaatgtatagtagtttttatctctaacatttttacttgtaagtatttgaagtttgattttataaaagaaaacaatttttatgcacaaatgtgattttaaaatttattttttattgattatttttctttgcaaaccaataatcatgtcttgatgagaatatgaaattatttaatttagaatactttgctgtttttaagacataaaaactcactatttgtctaattcaatttcaaacccaactttctaagaaggtcttacgagttgtattttcttgcttgttttggatcagctctatttaaaactttattaggaaaatagtttgtgggtctattctcctgtaaccaatatcaccaatgattaaacttagaactccatgttatgcctgtcacaaattgataacacag

SEQ ID NO: 32383 - DNA, 1921 bp, Homo sapiens
cgtgtgcttgtgcttgtgcatgcacccttgagcatcttattgttaaaattaatctttttatcatatccatccacccacacatgtctgattccagaacatgtcagattcacaagtgtgaactaattttacattatttggcttgaatgcagtcctcttgtgttcagagttgatttcctttgatgatttaaaattgagttagattctataaatggtgggattatgagaggagaattgagaaagtctggctcagtgttgtgaaatacttagagaaaatattgttcagcttttctgccactccatggccaactagatatatgtattcgcatctcctacgaaaatcttggcgtgttcttttgtccttactgctgcttcagcttctggtaaatagaagaatctgatccacctcagagctttccttgaacaagggttttgttgctctggaaaacactaggtgtacacagacatgcttgaatttcatgaatgtcttctagtgtgaaacaatgtgtgataatattgtgtttctagactctttttttacttgtcttggtcttgattttaaatgcctttaagacaaagttgacacaggccacaactccaagggtatttgtattctgtttaaacagtggctttgggattgtgtagcttttactagcaagccacagcacaccttgactcacactgttttaaacagtaagtaaatgtattatgtcatacaagtaataattcaagtgacacaaactgctcacaaatgtcatcaagcactgcatatttcctgccattgccagggtctgcttctactcaggactacttttccttgtttaggcaaaattgttgctagtggtgactagggatccttctttcactttcagcaatagtgagaggaaaccctcctccagcttaacaatgtaagcccttcccatcagtcttattgagccaccttcagataaatactacctttgcaccaataaacgtaccaaggaaatgacatgtggaggttggcttagcgagatgatatctacaccaggatccaggattggtatcactttcacctgaaacatgttgggtagccatggatgcctaaacaatatgaaatccattaggaaggcatatggcaccacgttctttgtcaaataattgtattcagtcttacacttattagtagaaattattatcctggagcattctatcattacattataatctggactgttttctttgtaggcctgtgacacagttttcattttaaattttagccataatttaaaatgtagtcatacttttaatttctacaagtatgtgctagttctctattcatttttcatagcattttggtttttttttgtagatagaatatcttcctaaatatttcagagtttattgtctagtatttttttccataatttcttctatgatgcctgagttagctccatttcctctggtgtcaatgtttagcttcttaaatttggcccttccatctcatcctgctgctttttctcgtatgtctgataatccttcctatggaataagcaactgtatcgttaatcaaagtcctctgtttttgtgttacaactgattcccatgtggaattatcacttagaattctgtttaagaaaatgtgagacttttgctttactgggatcagcaaggaagccaggaagccagctgtcaggatacaggatcactcaaatcaaatagtgagcattataccaggtttcacctggtagtttgttcagtttcactgggaaagggtcagctatttttgctggaggtaaatgccagctgcctgatttttgcctgcatttggggaggggatgacaagtgaaagatttgtccttatacagaccttcaattaatctgtgtcttcagttcctttttcacatccatcttccaaagttcctgctgactttggatcttggtttcc

SEQ ID NO: 32384 - DNA, 1029 bp, Homo sapiens
gtgtccgcggtcctgctgctgtctccagtaccctccgcatcccccaagtgatgggaacaagggcccgcccaggcagccgctgtcgccgcaccgccccctcgctcgctctctgcgcgcggagtcacccagtcacactcccggcaccccgagcccttcctccggagctgctgcttctactttggctgctatcgccgccgccgcgggtggcccgctgctgactgggctcgccgggagacggagaagcactttttggccctccctcagcagctctcacaccccaactttgccgccgccgccgcgcctgccctcgcagcggcgctcggccgcacattgtgggggcgcacgccgggaggctccgcaagaccgtggaggcaggaaacggcactactgcgcttctgcctcggctctttgttgttcgctttggatggttcttgaaagtgtctgagcctcctcggaaatcctggggccggagaagacaaaccttggaattcttcctctgcaaaagtctctgagatactgacaagcgtccggaaaggtcgacgagtaattgccctgaaaactcttggctaattgacccacgttgcttatattaagcctttgtgtgtggtgtgtggcttcatacatttggggaccctatttccactccctcctcttggcatgagactgtatacaggatccacccgaggacaatgattgcggagcccgctcacttttacctgtttggattaatatgtctctgttcaggtaaccccgcgtcttctttcttcacccttgatcctccctgttcgccccctctccactttgcacgatcaaacccagaagtgtattttggttacccctccctcctaaggccggaggggctcgattcctgctagacttttaggcgaaaatgttcctagttcgcatttggggttgtctctttttccccactccccaaaacctcccctccacccctgaacctcctcaagactctttgcagatctcggccttttgccaagttcagggcacgcccagattactctgggcaaa

SEQ ID NO: 32385 - DNA, 1050 bp, Homo sapiens
tattattttgacaaacccctttgatgttctgtgcttaagttcagtcatttttatagagaaagctaaccagtaaagtagatatggaaagtctttgagtttgtgctgacttgaataaacctggaatcatgtatccatgtcaactaagaattatataaaatgtttctcttcaaggctcataccaatcagaatagttaacttgagaattaattgcttccaactaacatgcatttattataaattatccaaaatgaaggatttttatattataaatattctgttataaatttataaagaatatgaaatcttttaaaatgtctaagttaaactttatagataatgaaatggaattgtgatagaagttatatttatacagatcttacatgttaactctgtgaaacaaagggaaaaattcaagtttggtctttgatgaccaaagtagtatgaaattatttctcaaagtttagcaaaaacatgcatagattaaaaattaaaacccaaggaggagactgcaaaggaaaataatgaaaagacactcactcaaatgccagattctaatctaggtcctatatggcagagaaaaaaaaggaatttcttatatagattgtattttaatagtgagagacaaaaattcaactgataagaacagatactacacttgatcttagccaaaaggctgagaagcaaaaatgtaataattaaatttataatatgttaaaagctgataatactatggtgaaaaatcaaggcaggtgcaggagagtgtgtgtaggtatttaattttcaggtaggattgtcaccaaaagctctctcagtatttctcataaacttgagaagtaccttcttttttataaaaaaaaaaaaaaaaagacaaaccctaaaatttaaaaaaagactctagtcctcaaagagttctatgtactgtatgattaaactttaatgtaaaaatttttaaatagcaaattctagtgagaacaaagacacagagaaagaggaatagaaataaagatcataaaggaagaagaggccaagtcaagtataaaaagtaaaata

SEQ ID NO: 32386 - DNA, 1029 bp, Homo sapiens
agaggtttatatagtaagaaataaatgtaacaatgtgtaagaaaacagaactagagaggggtaaggaagcaatcatgaggaatgaccggtctggcatctcattgcatgccatgatttggtgagcttcagttctttgatacttttttttgagaagacttgagggacaaatgtaggtttcaagcttttcaaaaggattcaattctatgtttatccaaaaaaatatgtctatgggatgtttgggtttcatgattaccatatgtttttcttagcagattctatttcctaaaacaacattgggactggatacagaacatgccttaatattttcttgagaaaattcatcttgatctttaataccagtccatcaccagtcattcttgacagtttggtctttcaaaactcttttcagaaggcattgtgtctgtaattctagttcctaatatggtgcctgatatttaatgcatatttatccaatcctgtctgtggaaatatgacttatattttgataaatagaatgattgaaatggcttcttttctactgatcttttttctactttataaaccatgaagaactatgcagaaataagattactggcaaacattttattttcttatggatgtattctaccatataatatatttacttataccttccttccataagaaaaaaaaaaaaagaagcatttgacctgagtcttagagagcctatggtatgtgatagtcttttataggaagtaagggtcataatctaaggaagactttgggcattgacagatgcagaaaagctcgtaacaagtacatgcaagagggaatatttcaaagtggccgaagtacttagtaattaaaatgaaatagtaggaaataatggtggaaagatgtctttccatttcactttctgtgcactttagttaatgatcacaactacatcacatggtcatttcataattatgtttgtgtgtatttaggtcctagtttattaatctttgaaagtcagatattatgtcttatcttttaatccctcagagcacc

SEQ ID NO: 32387 - DNA, 1050 bp, Homo sapiens
attgcttatgtgtgtttgcttccttttaatgatcataaactgacaaacttgtattgagaagcgacctgaccaaaattaccctcatctttaatcaggtgtcactgaaaggtacaagcaatgaaaatttttacacatattataggttatcgaaagcatggaaacaaactgtcagttttcttatttatgagatctcattttaagctttgacaaaccctaaactttaggaagccaggcaaaaatttgtgatatatatgggaatttattctcaagtaggtgcctcatgttaaggttttttcttttcagtttttgattttcatatttttctgtcgtgtcacattattgatttatattccaaatatttcttcatatgaatctgtatgaatgtatatgttcatgtatactgcataactgtagtggttatcattttaatttgacttatcattttaatttgattttttatttttaaaaatttcatttcttggccagatgtggtagctaatgtttgtaatcccagtactttgggaggctgaggtggttggactgaatgagcccaggagttttgagaccagcctgggcaatacagtgagatcccatctgtccaaaaataaaaattagccaggtatggtggcgagcacctgtagtcctagctacttgggaggctgaggtgtgaggattgcttgagcctgggaagtcaatgctgcagtgagctaagattgtgccactgcactccccctgggtaacagagcaagaccctgtctcagaaaaaaaaacttaaaacgttttatattttagtctcagaaccctctcatttcacagtatcagtcttcacttctacattatgaaaacgattgcctttatttatatacattgaagtacagagaaaaaacaaacacctattactttaaaaataagtttcattcattttgtctgtttatttgacttaaatgacaagtaaatctaatattttgtgttataattttatttgtaagaatgaattggttaaatcttaactaatgtcagtattttacaaaattagtttcttttatctaa

SEQ ID NO: 32388 - DNA, 1409 bp, Homo sapiens
aatattgaagatacgtactttttccatcaaattttaattgaggttctgctgtatactagactctatgttcttgattttgttcttactagttaagtgaagtaagtattaacaaatgtaattattaattttaatgggaaaaggaaacaagtattagagaagtaagactttgcatatcttaacaccttttggaaaacggaggtatacatgcattacaaaataactttgaactgtatattttggctttacaatttaatgtcattgttgcttttagttgtatttggtctggtttttttttgtggtttttcctcagaacaattttggaaactatattcatcttcatatagaattatggcagtttataggcccacctgtttgaaaaaactttatccacagttgtgttcctaaaatcagttgtcccagaattgtgacaggaaagaagctcttttgaacttgaatgcatatctaagttagatgagattaatacaatttatatcctgaatgtaatttatatcctaaatgttgaactgtgattaggtttccctaaataatggtgacatctgggatagtttgagttctttctttatagtctaatttacttgaatttcgtaaaaatcaaggaatggacctgattgcgactggttagtaacttgttctagttttgccttcccttatatatttcaggtaagttaagattaatagacacacagtctactaatttgaattaagttttttgaagtatttgaagtgtttatatactgccttttattgttcattacttccagaatgaactgttgttataatactcatctttgtttcttttgtcttgaaagaaccatatttatttagagtcagaatggagcgatttgtagtaacagcaccacctgctcgaaaccgttctaagactgctttgtatgtgactcccctggatcgagtcactgagtttggaggtgagctgcatgaagatggaggaaaactcttctgcacttcttgcaatgtggttctgaatcatgttcgcaagtctgccattagtgaccacctcaagtcaaagactcataccaagaggaaggcagaatttgaagagcagaatgtgagaaagaagcagaggcccctaactgcatctcttcagtgcaacagtactgcgcaaacagagaaagtcagtgttatccaggactttgtgaaaatgtgcctggaagccaacatcccacttgagaaggctgatcacccagcagtccgtgctttcctatctcgccatgtgaagaatggaggctccatacctaagtcagaccagctacggagggcatatcttcctgatggatatgagaatgagaatcaactcctcaactcacaagattgttgactaggaggttaccaccattgtgatcaagataaatgtggagtattaaagttat

SEQ ID NO: 32389 - DNA, 1047 bp, Homo sapiens
tctaataaatgacacatggttcctcacactaagcttaccttgattatcccactcataacaggatggctcaaattctgtagttcctcctttttaaataaattatttggaaatactgttactaaatactttatgtgctcttaataatttatgattcataaagaaaggaacatgaatgatttcctaatcatgagcatggaaaattataaaattatttattatttagcaatcctaaagtagtacaagtgacaaatccctctaaatcttagatcttaattcatctagcagatcctcaagtgtaactacctaaagttgtttttttaatagtttttgcttttaatcaaaacaaatcactaatagactaaaattataaaatgtaaacatgagaatatatatgcttttaaaattatataagacctaaatattacaaaattacacatttatagcacaatcaccatactccataacctgacgtttttataaatttgactactacaaattttaaaatatcaacagaccaaaaaacgtaaaaccaatcaaaagcaaactgatacactgaaaaatattctttgatgatttccttaatttaaatgcttctagaagttaggttaaaaaagtcaataacctagtagaaaactgcaagagaatatttcgcagaaagtaaatgcaagtggatttgttttccaatagaaaaacatgctcttattcattattaggccaaaattataaagattaaatgccatttctcctctcatatttatgaaaataaaagagatgatgtattctatgatggctttggtgtatagaaacaggacctgataatcttgttggagggaatgtaaatgttcctatactcatcacaatttaaaatgtacacataccatttgacctagcagttctacttatagaaatttcatcctcgaaatatacatatataagctcaaagacagaaacaacaatatacattacaaatggtttatagaagcaaaaaactggaaatattcagaatgtctaccatagggtactaggtaaattaaatatatccataca

SEQ ID NO: 32390 - DNA, 1045 bp, Homo sapiens
ttatgctggtatgaatctgtatgaaagatgtatggagaagaaccactgcggagctagggtttgcacttaacttgcacagtataatttatgaaaaatatttcaaaaagttacatttggggttgtcactgaattagtcacttatcactattggtcactattatcagtgtcagtcaaaagcctggagaattcataagcttggaaaatacaaggttttagggaggtatacatgatggactacatgttggcccttcctgagttcctaagggcacaggcctgggaagcacccacagcataagctcaggtcagcaaatgaaggatgtttctctaggtaaagataacatgacagcaaaaggtgaaacctatcctagaagataggagttagaggctcaaggaaattcagagtaggaagaagccacagtaacaaaagtggcagaaatggcagagatttttaaaaggctgggggaggcaggtagtatatggaaattagaatcagccaggattagagagtgtcaaaggatcagagcaggagatagaaaagtatgcaaaaccgctaacttttccttgagaaatttattattttgataactgaatgggcaccctgcttacaagggaaaaaataaaggatatatcccttcacaaatgttatgtttttcatacatttaaagtggaagttaaatattgtccctcatctactccaaacatttcagtggttcccattatcagtggtcagccaacatctctatgaggtatttctttacctccccatttaatactgaaatatccttccccaatatcaccatgccagcactatccccatcctcctttatttttctctaaggaatctgtcaatttttcatttataaaggtttgattgtctttctgtccctatgccagaatcattaataactccacaataggaagattttttctgttttgcttactactgtttttcttagaccttagtgcattagcacactgtggggactcaataaacatttgccaagtaaaagtttaagaatggattacggagaatggaaaattagta

SEQ ID NO: 32391 - DNA, 1030 bp, Homo sapiens
ttaataagtaaaaagtaataaatgtacatgctacttttaattagcagagttttatctgaagaggaagccaatcataactacggtaaaaccatcaactaacagcatagtcatatttcaaaattagttggtagttgccatgctaatggaagtacaaccctatcattagcattttaaaataagtaatgaattaatatggctatcatattaattgtcgctgttctaacaactgtcatcatcctaacacaggccttgaagcagaattaaggtgcatgcaagattttttgagcacaggtttgcatacaaagaaataaatataaaatttgatttagcagaaagaacactggagtcagtcaaggcaacaggtcacagtgctgcctaagctacaaagtgggctagttagtctccaataattattgtttttttttttttaatttattattatactttaagttttagggtacacgtgcacattgtgcaggttagttacatatgtatacatgtgccatgctggtgcgcacacccactaactcgtcatctagcattaggtatatctcccaatgctatccctcccccctcccccctccccccaccccacaacagtccccagagtgtgatgttccccttcctatgtccatgtgttctcattgttcaattcccacctatgagtgagaatatgcagtgtttggttttttgttcttgcgatagtttactgagaatgatgatttccaatttcatccatgtccctacaaaggacatgaactcatcattttttatggctgcatagtattccatggtgtgtatgtgccacattttcttaatccagtctatcattgttggacatttgggttggttccaagtctttgctattgtgaataatgccgcagtaaacatacgtgtgcatgtgtctttatagcagcatgatttatagtcctttgggtatatacccagtaatgggatggctgggtcaaatggtatttccagttctagatccctgaggaatcgccacactgacttccacaatggttgaact

SEQ ID NO: 32392 - DNA, 1108 bp, Homo sapiens
cccaaagtgctgggattacaggcatgagccaccgtgcctgatcctgtgcccctcttgatagatatttaagtcatttttaattttttgatctcacaaacagtctttcaataaacaattctattttttccagcacatgggcatatatgtaggacatacttagaatcagagttgttgagatgacgagtatatgtgctttaaattttaccaaaataccttcaaataaaacctgccagtttatgctccactaccagtgtacaagaatgcatgttttcccttactctcaccaataattgatattatcattcttttaaagttttgccagtctaatatgcaaaaatataatttttaaaatagtttgatttgaacactttataatgtttatttcccgtttattctctgtagtgatggtttatatgattgtttatattgttttctttatagtttgtttatattttagaaatgattttatatacaaccgtgcatgcatttctgtattggtcggcttatctggatgcaattttttctattctatatgctgtaagtattttcctccagtctgttgcttgatattgaactttgttatgttatttttattgttgctgttcaacaacaatctccacagagatcacaaaggtttttcattaaaattgagaaagtttattactcttgctttaaagatggtatggcttttttttttttttttttgagacagagtcttgctctattgcccaggctggagtgcagtggcaggatctcagctcactgtaacctctggctccctggttcaaatgattctcgtgtctcagtttcccaaatagctgggattacaggcatgttccaccaggcctggctaagactatggcttttgacataggcatttcatcatgttttttcttttttttcagatttttttttttagaatgagggtcttactggctggagtgaagtggtatgatcacagctcactgtaaccttgaattcctgcactcaagtggcactcccgccttagcctcccaggtagcaaggactataagtgcataccaccatgaacaattaatattttttatgtggtggcgcattctagtaatcccagctactcaggaggctg

SEQ ID NO: 32393 - DNA, 1034 bp, Homo sapiens
gtggcagtgtaggacaatgaaagagcagggcacataatggaagcacaacagaagccattatttcagccctatgacttaggcctccagccttaatgtaataaatgacacccaacatgacacccaacatccccacctttggttcttctcattgccatcccaattagaaccctggctgagtaataacaaatggtctcttaagagagcactttcatgctaagaaacataagtgcttaggtaaatgcaataggtcatatggtaagagaaccaatgaacagtctactgtttttgaaacttgatagatcaacgtgaagctaactgaattttggtaattaaaccttcctaaggaaatacacattctcagcacttaagccaatagaaggacaaattatctggccatttaaaccaggcgaacaagctctctacttggcaaaatgttttaaatgtttcaaatccctacttccaacattaacaatgcaacagtagtgtacttaaatgtctataattcagccggatctactgcaattattaattcttgaggcttcagtatatctttattacattttcattaccttgtacatataagaaaacaggcgtgaccttcacagatgacagagttccaattactttaggaccagacatcacagttttaatcaattaactcaggcaaggtactaattacccttattacacatttgtagtctgactgctctgtaattatacttaaaaacactgatatacattataagtaccttagtgacttcctaattcccagcctcaaagaggatcacattttaattagtcctgaatttctaaacaagaatatgaaccaaagcagtaccaacagccttaccacaaatttaaatgtgacccacaaactactattttagaaactcagaattcctttgttggatttcaaaactgtgacctaaataaacaaaaggaaaaataatctattaaaatattattttgaaattaaatgtttaatcagaataggaatcaggtagctcctaacgcacagtgaaagaaaatagcat

SEQ ID NO: 32394 - DNA, 1047 bp, Homo sapiens
gcaaatgatataacatacttttggatggatgatgtcattgatgacttccagatggatgatgtcagtatcctatagcaaagaccaccaagaacatactcctgaattcagacgaaattggatttattgacttgttgcagtgggaagaccacacaccattgagaactgcagggcatctcagtaaaacggtgttagaaaagacttataggactcaggtgtatgttaggtgattttggagagggttcaaggaagcagggctttgctctggattggatgctgtcaggaaatggaagggattctatgattaagtctcctaaatgttatctggtaggcaggaggaatgtatgaggctgaagttatcaatggtaaagcggaagtggtcactcattagccagagtagggggatgttcggtcagtgttgtggtttggaatatgttcttgccttgcctgagtccagacatgagtatgtacggagtggtggtgttttgttttgacctatcatggtgacagtgatctctgatgttagcattctgtggaattgcctgtgttcaacaggagaacacaaagacctagctgtgagtgccaggccagctttttggctgctgttctttctcagggttgagtgaaaagagtattttttactaactttaataaaactcttaattatgaccaagagagaaccactgagatagataatctataaggtcccttccaacactgattctatatacatttttatcatagtctttggaggaagcttagaatttgtttttgattgtatctattcaaaatagcaaatgttttacaagcacatggtttaatctttagcagaacagtttgcttatgcaccagcttatggcccagactacttcagtgttttccttatcttaggcattatactcaataaagtgatgatccctcacgactccttccccacgcagatgaccctgtaaggctagtctgtttttattgggtattgttccactaagttaaatccaatttggaaaaaaaaaattttctgtggactttattagatggcttttataggat

SEQ ID NO: 32395 - DNA, 1083 bp, Homo sapiens
aatactggagtcaactcttgtagtatctcccagccttatttgcttctctatataaaagaagaatgtattatctggttggagagattgctggaatcagggcatccacaaggagcagcatggtatatggtggttaagtatttagcttgggagacagaatgcgagctttgtaatcccaggtctatcttttgtctcttagcctttttccaaacaccgcttttcccatctgtgaaatgctttgattatcatatgtctcttagagttgtgatgaggattatgtaaattgcttagcataaagtagtcgctcaaaaactgctagttatgactggctgcattgtgaggggttgccaagcctataaagtggtggctcttagcctaggctgcacattggaatttcctggagaacttaaatgttttcattccagagaatctgatttagttggcctgggctatggtcgggtcattgaaatttttaaaacctttccaagtgattccaatgggcagttatatttgaaagctatgtttaaacgcaagaaataggattctctctctcctaggcagattatgaaagagtgggctgtggagtaaacagacctggcttggtgtctgccttctaaaagccatttctctactgtgctttccacactcttctgttgactggctctttgtgacaggtcccaatccatcccacctctgatagttggagatgcgtatgaagagtctgctctgcagatccagtgcacccctggttctcaggttcagatttggcaggatgtaataggaagccttgtttgttttggcttcaattccaaattattttctctaatccggtactttcagggaccctgtaatttgaggtcattaggcctctataaagaaagtgaatattcttatccctgtctgcttatcagttcattgtgttcatactcttggttagaactaggaaggaaggaggcatgcatgagtgattgatgttaacttctacccaagctagaaattctgaggatgaacatataatagcattatctataaaatgggatattatctgcctcaataggtttttgtgatggttaaataagaaggtat

SEQ ID NO: 32396 - DNA, 1072 bp, Homo sapiens
tggtaatatgatgtgcctttccttgcctaaatcccttcctggtgtgtatcaacattatttaatgtcttctaattcagtcatttttttataagtatgtctataaacattgaactttaaaaaacttatttatttattccactactgtagcaattgacagattaaaaaaatgtaacttcataatttcttaccataacctcaatgtcttttttaaaaaataaaattaaaaatgaaaagagactcaattgtatatagagtgtctgaattgatttaaatctcaacactttaggataaagaagtggaggcaatctctgtggttgtctgtgcaaagtgcatcttgctgtacagggctgtcgttacatcctgtgtttgggtctcttgtttgatcttctgggaaatgtaggaaccccttccccctattagaaataagaaaatctttatcttttatttttcagaattttaaaccatgttctcaaaagtagttttgttatctctacatgtcatacttaatgtggctagttttcagtaaagtcatttagtggctgtggatgtttgtgttctatagtaaataaccaagtcagcttctgacttagaacaaagtcagcattactctgtagccaattattgcctgtgaaatgactggttactcaggtttctatctaatcttaattcttgaagattcattacccttcagcgccttctgtggaaggtggaaaagagaaaagctaaatgaacaaacaaaacacctttgggaatgggataagaaaatttttggcagcatgacatttttgtattggtcagttattttaaacaatgtccctgcctcttaataccccagagttacatgggaagctactagcaccataacccctggtgctgcattgtagttggtatttttagcatgttgcagggtagctgaggttatctttcctgcaaagactttttttctttggaatatatagggctgtattgttcatttaaatgtgaaactgattctaatcaggttgaaccatatgaaactgcagatattcagccatttttgatcaacctaatagataaaatcagtggcaaggcg

SEQ ID NO: 32397 - DNA, 1040 bp, Homo sapiens
tcttacctttgttttaggaggcttccctcttcagaggaaactgggagaagccaatttccactgcttctttttcctgtgcctttttaacactcaaacccagaacacttaatcctctgcagctcgtgcaaaaattcagtctgtaatttaaaatgtgtgcacggtacactgctgaccatgggcatgtctattgtttgtatctgtaatgtgtatgtccatttcagtgttgtctgttttagtatgcaggtgatagactagagaacaagacctctgtctccgtagcatcctgggtatgtgagcattcaataagtacttttatgagaatgagttttgttttaagcttaattaaaaacatgcttgctttctaaaaaaaattcttaatggttatatgtacgaagggatggggaattgggtaaagggtgcatttggaataattcaaaataatctttcttatttgtccgtaaactctaacttatcttctttcttcaacttctaaacagagcagtctgaatgccagaatggataaccgttttgctacagcatttgtaattgcttgtgtgcttagcctcatttccaccatctacatggcagcctccattggcacagacttctggtatgaatatcgaagtccagttcaagaaaattccagtgatttgaataaaagcatctgggatgaattcattagtgatgaggcagatgaaaagacttataatgatgcactttttcgatacaatggcacagtgggattgtggagacggtgtatcaccatacccaaaaacatgcattggtatagcccaccagaaaggacaggtatttctcttattttaacttctgtcttcttcacctggttaataatagacaaaacgacgtaatgattgcccaattacatgtaagcaggtttgttggttctctctctccttaaagaaataaatcgtgtatcttctctttctactgccttctctccccaacttctttgcattaccatggtactcatcaatattggttggatgaggaacttttcttatcttgggaaagccttaatg

SEQ ID NO: 32398 - DNA, 1069 bp, Homo sapiens
atcagttaaaattttttttattgtcatccattttatgctgaaaaaattaagctgctaaattaagtgtcctaatatagccagtaatgctgaatctcaaaagtccacattagaatcccatgtcttgatttggtaggcaacaagcagtggtggtttggtggtggatgtgacctcactccaacatacttgaatcaagaagacgctgtccattttcacagaactctgaaggaggcttgtgaccagcatggtccagatctctaccccaaatttaaaaaatggtaggtaaagttactgaactttcatgaccccaaaattacattctgttccttctgaaggcaactattatgtcactaaataccctcttctgcttatgaaaatggaactagttttcttactttgctcatcagaagaattagaatactggttttaagtggttgtattaaattatttacttagaaatatttaatataaattgagtagtaatatctttttattccaaatgatttagaatggtagactataaactataaggtcatctatgcttgagaatgagaggctttttaatctggagtgggttgttaaattcttattccagatgagaattattattcctgatgttgacttgggaatgtctaagggcattggaagggttggagaaccactagagggagatgccaacataccagagattttggccaaggggaaagaagaattggagaatttgttaaagaaattctaatgataaaataagaaaacaaacaaaagttgggagaagacccagaatatttgttatcatcaaatggaatcttggcacaaattgtttggaatatgagtaaagtactcaattctgcttagagccaattggcattcttgaaaaaggaaggacaaagaatttttgtctttttgctttgtttttagagctaatagttgtggaatgttaatatttatgcaagagtatggagttcagctttaaaatcgtcaggaaagatgaaacatttgaatattctcttgatttaatattactactgaaaactacacagccatggatgcatgcagatactggttttttgtt

SEQ ID NO: 32399 - DNA, 1040 bp, Homo sapiens
gcttagatgtccaaagttcgttactgaacataaatttcaatagattatggaacacattttctctccttctctgggtgaatttgccctttttcctctttaggagatggaaagaactcatctcctgtgcgctaagtgtcggctaaactcctccagccaggatgtcattgtgtcagaatcttcccacttctttttactgttacacaagatatatttgattcgtttctcagtagcactaccaaatgcacgcatcagatttcctgctaggaaaatcttctcttccaatatcaaaatacttgagcatcaaaacccagttctcgtagaggcgtacattcatgaccatgttgttgcccatacagtgaaaccccacatcttgagtggaaacttgaaagattcctgacttttcctagctggaaatacaacagcagcttctcaccggcagattttgagctgtgatactgacacatctatattaaatgaagttcagtctagttttccatcttatgttttcaagcaaagaccactgaaccaggacacaacctcaagtactagaccagctgtgtgatcctcagaagttacttttttatggctgttttcccatctatgaaatatatatgtatttcatctcttttaatcctcatactacatatatatatatatatatccatatacatatatatatatatatatggatggaatatatgtgaagtgcttagaatattgtctgaagcatagacagcatttagacaaattgttgcagccacttgtcagcagtttgatcttggataagatgttttgcccctctggtcctcagttttctcatttggaatatatgagggttgtactggatcatcttatgtcccatccagctctaaatgttcttagaaataaaacaagccaaacatgaactttcatgaaacattgcccttgcagtgaccctaataccttaagaaaaaaaattagtaaggctgatacacgtgaatactaatgtgcgtctcactcactctaaggttctgaatcccttcagaatttgattacctact

SEQ ID NO: 32400 - DNA, 1043 bp, Homo sapiens
cactcagaagtaatataaattacctctttaaaaagtaaccagaatttgtcctttttggttttatacattcacaaacatatacatttttcttgagtctcaaggtattttatatttttagtcagaaaaaataatttttcatttcagttttccataaactgttacacaaaatataaacctaacgtgtatttttcaggactgcgtgatcgtgcactttgtgtggtaagaggtttgagtagtcctatatgtcacctagggaacagacattatagcttactagcaaatgaatattcatgccttgtttttgatacctcctggcagcttccatgtcaccacttgttcatacctgcccagagctagttttagacatggcaaaatagaaatcatctgtaatttattagctaacaatgtaaaaccatcttttaaagccttcagactgtcaagacgacatgagcagctcaccatatgataaaaatacataaatttgacattccctcttccataaacctttgtttgtagatttaatgttgaacagtacttttccataaagttctagtcacttctgttggcctgagccaccagattatgatgttgccagaattcactcaatttgaataaagatgaacagtatttgttttcttgtttccatgaattatatcagtattctaaaacatcgcttcagaaagagaactgtttatttctgcaggcttcctgtccttttgtggtatggttttttggccttattttcactggcttttccttctccaaactttgaggcgtgatttcattcattgaagaatcaatacatattttgtttcaaaatgtttgaaacaaaagacatagatggtagacttttattaaaacatatatggatgtggaaagcacatatattaatgcagtcatcccttttcaggtgggaagagagcaaaccagttgattttttaattcatccttagtacacagagaatatacttttcctcaagtaatatacctgtttgaagctttaagagagatgtttttggtaactatttcattttcccaaagaa

SEQ ID NO: 32401 - DNA, 1035 bp, Homo sapiens
ctcatgtaagtccatctgctccctcatcacctccaacccaagggtaattggtgtattcattttaccccttttctgagcctgcacatgtgcatgagtacgcagagactgcatttggttttgtttttagaaaatgggatttatatatatatatacaatttgttttcataatatatcactttctaacattatgccatatttatgtgtggtaatcaataaaatttaagtttcttgagggtgggaactgtagcaaccatatccattttctcttcatgacacctcacatacttctctgtacatgaggattctcagtaaatgctcataggttgactatagcaaatcttttttactcagtttttataaaattgagacagcaatatagaggaatatcttaaagatagtttttatgtgttaaagtaatgatttgttatcgtccctgttccactaatatagtaagaatgaaaataattgcctttcattttatttcagagtaatatctgaggaaatcacgggagctcactagtatggaagttattgtaactgcaaaacaaactttttaggaaatgaaggatattaacacatctttcgagatttatagtctaatgccaagtgaattagccaagaagaaatagagccacaatacttggaaatagcttgattgagaagttaaacatttacttaatctcatcttagctgattagaaaaaaaatcactttgattttaggcaatatatgcttattaatggtctttagaaactacctagttgatctgacctagagaacaaacagggctctttttagcttattggagtccatacttaagtcggaagacccagagtcaagttgctgccctgtcattgactagctgtgcaatccacttacagattcctgtgccctcctatttcatagggttgtctgaattagttacattaaaatgttttataaataattaagtgctggtccattgtaagatactatcattatttgcttgaagtagttaagggaatgagactcacctaaactcatatttttacctagg

SEQ ID NO: 32402 - DNA, 1023 bp, Homo sapiens
aacccttctctctttcaggggacacttatctacaagtctttttacatttaagacaagtggtaagccttttatggactttataattttttatttatataatattttttgaacactgttaggcactgtgtcagttgctgatttattgtactttctcacgtagttgtcttaataacactatgaggtaagatagttatctaataatataatgaatagagcaaattgaaagttttatatttatagagaaatggtcatgtaagcaaggaaggttccttaagaaagatgacttttgaacttgtctgaagaagtaatcaattcgttcaacagaaaatacttactgagtgccttctctttatgtgccaggcattgctctggttcgagtgatagagtaaagtgaacaaactcctgccttcctggagcttacattctagtagtgagagattgatgataagcaatgaataaatttctgtttataatgtactgtttacaatatgataaaagatgtaggaaaataaggaggactggattgaagttgggaagggccttcctcccagggaagacctcagggagaatgcaacataggccaaaaacctgaaggaggtaaaggagtgagttactcagttatttgggaagagtgtcccagggagaagataatgtatctccattaaactaacagtcatgcttataaatgagcatgtttgtaggtttcctaatgatacacaaagacatatgcccaagaaacacttgcctagttttgaaatttctctgttacagtgtattattagtgtagtgtatgttaattaaagatggaatagaaagttttcagtgagcaggtctacatgcattttgaaattatacctggaaaccaaatttagtcttttctttgtttcaggatgttatggaacactggggatggagtctggtgtgatcgcggatcctcaaataacagcatcatctgtgctggagtggactgaccacacagggcaagagaacagttggaaacccaaaaaagccaggctgaaaaaa

SEQ ID NO: 32403 - DNA, 1102 bp, Homo sapiens
acaatgacaggatcatatgcacacatatcaatactacccttgaatgtaaatagcctaaatgccctatttaaaaaggcatagagtggcatgctgaataaaaaagcaagacccaatgatacgccgtcttcaggaacccatctcacatgcaatgacatccataggctcaaaataaagggatggaggaaaatctaacaagcaaatggaaatcagaaaaatgcaggcattgcaaccctaatttcagacaaaacagactttaaacgaacaaagctcaaaaaagacaagggcattacataatgtaaagcattcagttcaacaagaatacctaactattctaaatatatatgcactcaacacaggagcacccagattcataaagcaagttcttagaaacctaaaaagagacttaggctcccacacaataatagtgggagactttaacactccactgacagtattagacagatcatctaagcagaaaattaacaaagatattcaggacctaaactcaacactggaccaaatgtatctaatagacctctacagaactgtccatccaaagacaatagaaaatacattcttctgattgccacatgacacatactctaaaaatgaccacataatcggacataaagcaatcagcagatgcaaaagaaccaaaaccataccagacacactctcagaccacagtgcaataaaaatagaaatcaaaactaaaaaaaatggctcaaaaccatgcaattacatggaaatgctccagaataactttggagtaaataatgaaattaaggcaaaaatcaagaagttctttgaaactaaatgagaacaaagatacaacattccagaatctccgggatgcagctaaggcattgttacaagagaaatttatagcactaaatgcccacatcaaaaagttagatctcaaattaacctaacatcacaactaaaagaactagaaaagtaagagcaaaccaaccttaaagctagcagaatatgtataatcaaaatcagagctcaacctgaaggacagtgagacgcagaaaaacattcaaaaggtcaacaaatcaaggagttggttttttgaaaaaaattaatgataggccac

SEQ ID NO: 32404 - DNA, 1023 bp, Homo sapiens
gggatcagatatgatcacctaaagagattaactagaaatccaacaaccctcagaagtaaaattgagtaggtccaaaaaaaggcttgagggatgacctgaggctggaatctaaggggtttgagggaagcactttaagaatactactaattaatcatcaattcatttgtgagccacctgcctggatgaaatattttgttaattttttttttagtccctcattattgttttgaaagagtatacatgtctttcacaggaaattaatctctataagttcagtgatgcatgtactgcttttccttttgaatcatttgaatagacattacttgtcatttttttcctccagagcaatatgattggtaatcattaaacattttagtcattattccatactaatttaacagccagcttggtatattattctgcttctgttatctacattgcaaatattattgacttcatgagagtcatcccaaataatctgcttttctttcattcctaggcaaatactgtggtctggggttgcaaatgaaccattcaattgaatcaaaaggcaatgaaatcacattgctgttcatgagtggaatccatgtttctggacgcggatttttggcctcatactctgttatagataaacaaggtaattttcaccttttgcaatggttcctacagtttgtaatttctaacaacaaaaataaaatgctttttttaagtacctgttttctgaaattggaatagagcagaaagactgaacaattaatagcacatatataaatttgacaaataaggtgagttcagtttcaaagttccaaaaataaaagtacataaacgttacttccctttccttagtaaaggaaatactgctgaaatgctgattttttttatttttataagattggaacacgagctataataacttttttttttttttgagacagagttttgctcttgttgcccaggctggagtgcagtggtgtgatctcggctcaccgcaatctccacctcccgggttcaagcaattctcct

SEQ ID NO: 32405 - DNA, 1047 bp, Homo sapiens
aaggctacagtaaccaaaacagcatggtactgggaccaaaacagagatatagaccaatggaacagaacagagccctcagaaataataccacacatctacaaccatctgatctttgacaaacctgacaaaaacaagaaatggggaaaggattccctatttaataaatggttctgggaaaactggctagccatatgtaaaaagctgaaactggatcccttccttacaccttatgcaaaaactaattcaagatggattaaagacttaaatgttagacctaaaaccataaaaaccctagaagaaaacctaggcagtaccattcaggacataggcatgggcaaggacttcatgtctgaaacaccaaaagcaatggcaacaaaagccaaaattgacaaatgggatctaattaaactaaagagcttctgcacagcaaaagaaactaccatcagagtgaacaggcaacctacagaatgggagaaaatttttgcaatctactcatcagacaaagggctaatattgagaatctacaaagaactcaaacaaatttacaagaaaaaaacaaccccatcaacaagtgggcaaatgatatgaacagacacttctcaaaagaagacatttatgcagccaaaagacacatgaaaaaatgctcatcatcactggccatcagagaaatgcaaatcaaaaccacaatgagataccatctcacaccagttagaatggtgatcattaaaaagtcaggaaataacaggtgctggagaggttgtggagaaataggaacacttttacactgttggtgggagtgtaaactagttcaaccattgtggaagacagtgtggcgattcctcagggatctagaactagaaataccatttgacccagccatcccattactgggtatatacccaaaggattataaatcatgctgctataaagacacatgcacacgtctgtttattgcggcactattcacaatagcaaagacttggaaccaacccagatgtccatcaatgatagactggattaagaaaatgtggcacatatacaccatgg

SEQ ID NO: 32406 - DNA, 1055 bp, Homo sapiens
tgagaatcactgctctaagtgtattacataattggttgatcaagaatgttttcccaattttagttctacttttaaatattttgtcgtattttaagtatcttggtggaataggctttacttttaagaactgtaaaaataaactggaaacacatttctaatttaggggtgaaaatgagaacgaggtctttccttgatttgcaaattcaatgttaagacctttgcatacctagcacagtgtttttcagattgcagttggggacacattagggggtcatgaaatactttagtgggtcatgagcgtgcatgcgagagtgtatagggtcacgatgtaaacggtatttcttttggaataagcaaaaaaaatatgtatatgtctagccttcccttttgaactggagtattctgaacatatatttcatagcagtaggtgcttagttaagctatttatccagtcaggttaaacttgtcaaatattttttgagatacaaagcattcaaatttgttcattgctgtagattggagacctgttgttaactttagtttctggtgcatatcatcttgcttgcaagaggaggaagctctgaactccatcacatattttagaacattcttggcacgttacttgtggactgttcctgccctccccctacacaaggttatgaaaaaagacaactctgtaattattttcttcatcagcatgcatgcaaaagtcctgtttttcatcagttagtatttcttttgttaacttttgtagaaattatccttcatgttggaaagggcagtaaatgttcgtgtatttattgagaatcaaacatgagcataagacacctaaaaattactcctaacactctgcgtgtactctttgtaaaaatcatttttaaatgacaaccgtaagttgaataatagcctacagggaataccttaagtgtgacaatctgccactacaaagtcgtagattcagctgttaatagaaaatacttgagtttctgaaattcatctacactttcaatcaccttaaaagctgcctttgttttctatttactaaagaacgtgca

SEQ ID NO: 32407 - DNA, 1033 bp, Homo sapiens
tgatagataatgatgctggatggaatctctggcagatcctaaagagagaatcacggtgcctgctccaaggattttctagtacagctttgccttctacagccaaaccatttgaaaagcagctgtgggcaaaatgtagagtcctagcagaaacaggcacttgactatggaatatcaaatgactatatgaccagaactgcccttcaggaattggctcttgtaaggttgggtgctcacagtaacaatccactgaacaacagaaatggtatacatgcgagcacatgtaagcaagtccaaaagtcacaagatacatgaacagatggctcagagctccttgccttttgtgttcctcagctcacacctatgtcctctgggttattctctatgaccagctgataatgttggaaaatgctcaaagctggttaagcttggtatgttggtagaactgaaaatggattgctactacactgcggttccactcagggaggatccttaaaggacagaggtgaacagaatcctggttggcagagcttcagtacatgcattcatctcctttgaatggagaaaatagtctgaggtcagtgtaaatgtagggccttgagcaacagtgaatggtatggttgattgggtgaaaggtctctaagatagaatatgtgaagttcaataataaagagacctgaggaagaggcatgtggagggacctaaaggagtgagcacaaagtgtgtgtgtctttgtggcacatgtgtgtgtccaccagagagtatccactacaagtgaagcattgaccaaccaggtggacaatgcggtagattgtatttttcaaagatggccaccaatatcctccatctcacctactcttcttgtaatctgaccttgacagttctcccattgagtggtgggatctgtgttccctttccttgaaccttggcagaactttatcatgtcaaccaagagaacatggtagaaatgatattcggtgacttctgaggctagatccctaaaattctgtgcatttccaccttgctcccttgggat

SEQ ID NO: 32408 - DNA, 1028 bp, Homo sapiens
ttttaaaaataagcctatcacgttgccatatattataatgggggattaaatatagtcaccctagtggtacctcttactggcatataaagtctaactggcacatatgccaataaaatgtaccttactaacatgtatgccagttagactctgtatatgcaggtatatatatatatagtagggacttaatattctttgtaggattgcatatatatgtagctaatactagttacttaaaacagttggttcttagatagctgtggatttgaccagaatcaggcagaggcaataaatctgagtatttattgagtaggtgtgaggaactcacatagactgcctgaagagtagagatgcatggggttggggatgtgctggtaagagatgaaacagaaagaggtgggcccacatcagtctgtgaaggtaaggcccttgcatgtcattagtgtcccggtattatgtcactgctttctaaaggagtctcatgttaacagtagaaacatgtaaaatttaggaaccagacggaattgtgattttaaataagccaatcaatttccctagtctgactgttcttatcagtaaacacagaatacaagggatataatgtaagcacatagtatttgtaatagtagttgacattcattgagtgctttcaatgtggtaggtactcttgtttattttaaaagaagcattttactagaatcatagtagaaacttagtggtcagacttcatgtagcatcacttacaaccttcattgaatattgtgaagaaacttagtggtcagacttcatgtaccatcacttacaaccttcattgaatattgtgaagtgcttgttgaatctgagacttaaaaattttgttcttttagaggaaacatggagaaagccattgacatgttcaacaaagctattaacctggccaaatcggaaatggagatggcccatctgtattcactttgcgatgccgcccatgcccagacagaagttgcaaagaaatacggattaaaaccaccaacattataaaacagggggaa

SEQ ID NO: 32409 - DNA, 1017 bp, Homo sapiens
gctgggactacaggcatgcaccactatgcctggctaatttttttgtactttagtagaggcagggtttcaccatgttacccaggctggtctcgaactcctgagctcaagccgtccaacttcctcagcctcccaaagtgctagaattacaggcatgagccactgtgcctggccccattctctttaaaccatggatttttttttctctcgagcatctcgtaagactagtgtttctcaaaatcactttgtaaaacaccatggtagagtccataaattgaacctcaaaggaacctagtttccttgtacatagtgtggagtaattagactggttggattgcaagatggtaagaaaatataaaataatgtatatttacataggttacagatcagtttccacattttctaatctgtttgtcactttgtaaatcacaaaataccttccatattattattttgatttttttataacaactgtataagataaataaggcaaatatttctattgccattttagagatgagaacactgatactagacgtttaatgacatgcataatatcacatagctaataagtggcagaactagaatttgtatcctgttcctttgatacttaaatccctttcttgtaaccgtttattttcactttaaatttataaccctgtatggaaggcagggaggtgatagcttcatttctaagctgaaacaggaaactaaaaaacattaatgatttatctagcttcaggtaagtggtatttaaatttctatttaagcttttcccctaaaatggtaaatgattgccactatgtatttattctcagtgtctttagtaaagtactaaagttaggcatatttatcacttgataggtgaccatttgacttaaaatatttgttatcctaaattaaaacgaattgaatctctccccagagagtgcccacagatcaatatgggttttctcttaggtttcctttttagttctctttctatcccacttttatctatcctagattaaataatttact

SEQ ID NO: 32410 - DNA, 1036 bp, Homo sapiens
agttgttgcaacatgaggcatttctcccctttccccatacttaacaatttgtatgataatctatctgagtagactcatgataaagctgagttattgttattttaaaagttagtgtaaacatttctctactgctttacaatttacaactccatttattgacattatttcagtttttcctatcatgacagtaccttttgatagggcatataaactgtatcccaatttttcatatgaggaagcagtctaatgaagattaataaattttacttaagatgaacagctagtgagtggcagaactagttggtacttaaatctttaccttttaacttctagtccaaagtttttattgtactagattgctttaaaaaatggctatgagagtttgtttcatctcgttaaaataacaggagtaataaacaagagttagaagaggattaatggataaactgcttgaatttgatatattgttggagaaagagggtaggaatagggacactaattaatatttattgagtgcctgctaggaactaagacggtgaacataaagttatttgattctacagtattattgtcattgtctttatgaattgaagcttaaggaagttatatgagtttttcaaagttggatatagctttccagtttcaaagttcaactctttctgttgttcatagtgttgtgattatataattaatggtctaaattgggatgcttgtgagaataataggaggctgtcttagtgggtacactagacaacgagtgcgtataccagggcttttctagacaaactgggatgtatgattaactccattttgagtgtctttacaggtttggaatttgtcctgatggacaagacctgcgaggatcagttaaggagaaaactgcaatttgaaaatatttctgataatcagggctaggagagggatatatggaagggggagatttattaaataaattaggtaacatttctgatgccctcctgttctgttttatgtatacagaatttaatgattggtaccatgcacttaatctcatgtt

SEQ ID NO: 32411 - DNA, 1010 bp, Homo sapiens
ttgtccagctgctggtatagattagccaccaggagcagagcacaatttttgactgctggcttttctgaaaggaagggaactagtcttgaggattcaaacttagaaagcggagaaaggaaaagctatattttattacatcagtttattcaaagttaaaaattatgaagaagagcaacatcttcaatggtataactgattgtgagataaaacctattgattagagactaattcagatagtagcctattaagactagcccacatgggaagtattggaaaagaaaagataatactcaatcggagtaccattagtagcttgtgaggataaaggaaggaaaatatcattatttatgcctggtcaaatgttttttaccctacagatttgagttacagaataccactgcccagttattgtttcatataagaaatctcttagataataggattttcaatatcagtatatgttaactttatttttacttttaaggttgattgtatatcctccaccacctactaaggggggattaggagtaactaatgaagatctggagtgtttagaagaaggagagtttcttaatgatgtaatcattgatttttaccttaagtaagtacaatgataaatgatcctacatattttacagattttactgagaaacttaaaataaatgtctttatctctgaattattttaaattctgttaaaagtagcctgccaagatttcagatttggaaaatttttgcttaccaaggttttctagaattgacttattcagtttcattgctttacttactgtggatgctatatagttaagaagagttgctgcttttttgcttttttagcttttgttagtttttgatgtaaatttctttaactattgtattatggtggtgaaagaagttacttacaaattacaaatcattttgggaactaaaaaacagcagctctattgagatatctgttgtatctttttttttttgtttgagatggagtctcactcttgtcacccaggctgg

SEQ ID NO: 32412 - DNA, 1326 bp, Homo sapiens
ctgaaggtaccactactggtagggaaagtgtttctaatacaattagctattgaatctttattaaagcagtgtttactctcctacatctgataccagttattttttaaaaacctgtaaattaatggaaattctgaatgaaatcttaggtgtaccatttttttccatagcacattaagtttgccttgtggaatttgctttcaccaacataataccttggaaatacttagtattcttttgtttacaggattttgtcacctctttagttttatatgctagtaatatttgcaggttgaattatatattatgcaggtggaattctatttttacaatatttcattctatataataaagttattcctttttccatgagacaggcttgactgatatgcaaataataaattgtttaaaagaaaactcctgtataatcaagtttttctcaagcccctttcctttcatgaatcattttactgtagtataatatttatgtttagaaattatagtttgatacattgtgtgtagaaattgtattagaccacttttatagtttacaatattacatataaaatttaatgtgctatcctaaatattgtgttgatgatttggggggagttttattttccttagggagtaaggtgttttctctggaaattgaaaggcgattgactatcttggaatttttaccctcaatcctgttccagtgccttcctttaagtaatgtcaaagacaaattatcatgaatattagttattaggaattgttgaagctacagtaaaagcaagaatagtttgaagagaagatgtatggtgttgaagaacgttccgtgaatggaaaagtcaggccagtcagatgaattgaaaattgtgaattaaaggcaactgctttgtgacttgctgtgtataaactttgagttggtacttgtatgacatagattcagaaagcaaaataattcaggataacttttagtcaattaggtggaaacttttggaaggtatttttgtacagtacatatatttgataacaaatattaaatatttttagtaatgattggcatgagtttcaaaatgatgtcttgttgacttaaaaaaggaagtacttctctagaatgatggatttattggagacttaaaatgacagggtcttgattattgaaaagaagaaataaactggcaagtaaattggtaaccttgtgaatgatcacatattatagccaactacagagcaaaggtattttgtctccttttaaagagcagtgatcaacactctttcaaattatagtccctttccactaaaaatatgtatttatgtaaattacattttaaaagactt

SEQ ID NO: 32413 - DNA, 1087 bp, Homo sapiens
tcatttctttttataccacattgtgtttattcaccagttggatttttatgttgtttccacttcttagctattatgaataatattgtcataaacattcctatacaagtgtttgcaagtgtttgtgtagacatatgttttcttttttctttttctttttttcttttgagatggagtctcactttgttgcccaggctggagtgtagtggtggaaaacagctcactgcagcctccatctcccaggctcaagcgatcctcccgcctcagcccaccaagtagttgggactacaggcacgcaccaccatgcttggccaattattctgttttttgtatatttgaggttttgttatgttgcccaggctggtcttgaactcctgagctcaagtgatctacccaccttggcctcccaaattgctgggattacaggcgtgagccactgtgcccattcttagacatacatatgttttcatttatcttgaatagataactaggattagaattgctgtgtcatgcattaatattgtttaactttctgagcaactgctgaactttttttcaaaatgactgtacgattttgcattcccaccagcaatgtatgaaggattcatgtttttctacatcctcaccagtgcttatctccttccgttcttctttcctctctctttcttttctttccttccatctttccatcctagtgagtgtgaagtggtatctcattgtggttttgtttgccatttcctaataactaaatgatgttgattatcttttcatgtgctaattggtcatttgttttttttttttaattttttaaattatactttaagttttagggtacatgtgcacaacgtgcaggttagttacatatgtatacatgtgccatgttggtgtgctgcacccattaactcatcatttaacattaggtatatctcctaatgctattcctcccccctgcccccaccccacaacaggccccggtgtgtgatgttccccttcctgtgtccatgtgttctcattgttcaattcccacctatgagtgagaacatgcggtgtttagttttttgtccttgcgatagtttactgagaatgatgg

SEQ ID NO: 32414 - DNA, 1035 bp, Homo sapiens
gatataccttttatgaattaatgtttataaatgactgtactgaatttaaaaccgtacagtttcatttgcattttgacattactttattatacattttgcatttaaaaggctgcaccagttggcttttcttctgttttattctcaaaatatagagattctgtgatttatttgccctgtttatggattaaaaagaaaattctaatataaagcatttcaataggatgcataggtatattacgttttttaaatgctttagatctgtgattcttgacttactatttattttatccccttttaagtcagggatgctttattctattttaaagcacttatgagttacatgttgtaatcaagtttgcacaatatatttatctatatgaggaacccataaatgaatagctaatttttaaaatgccattaaaatgcatgaaatgcttattaaaaccttactatactatttcttcaaggcaagtaaattgaccatgagaaaagaacacagttattaaacactgttgacaggaaaattctccttgataacataggacaattaatggaaaaaaaaattctcattatttgcaaagaatgaacaagttaatgaacaaacaaactagatttggtatgttttcagcttttgtatcatgtttaattgtttaatttggttgaaaaactgcagttgagaaatcagatagcaatatagacattcacagcagctctgtggataccatgtaattgtcaggtaatttcagaatgttgaaaattattcagtgcagccctcatagtatcatacttgaagaaattgattacagttccactaaattgttgaagataaattatttttaaaggttatgaaaactaagttatattaattcatatgtttgatttttaaatcccacctcctcaagctatccaattttctgactttgaaaataaccatgagagatgccacatttctctctgggaaactaccactcaaagaataattgttaaaaattaagcttttaggtattagaagctgttataaagtataaaattaag

SEQ ID NO: 32415 - DNA, 1090 bp, Homo sapiens
gcctgtattgacctccaccaaaatcttattccattaaaaaaagatcaagccattcttgtactaacatggagatcaccatatggtgcgaaaaagaaatcagattcaattcccacatgaatatttttcttcctcttaagataatattacttacatagcactcagttaaagtgcttcactagtctcatttattattcataatgttctctgttgttaagagggtctgacatgctggggcttcacctcagggaaatggtcccatagaaaaatgaaactaatgattctgagtaaatgaccttaataggtaaattggaattacagtgtagatttttcctcagctcttggatgactccaaattctctatcttctttctcttcgcagatattatccttcaagtgtaactgaaatttggtttcattaaaatgtatcaaattaaaatataacaaatatactttccacctgataagaaggaaaataaacgtcttttgcctgagctcaagatgattctattacatttactggaaattcagaagcggtgattcaaaatatcacagtccaaaagaaatttccaacttggggctgagtttaaaaactgattcaactaactgcttagtaaccattgctaactgatcagtggtatctgttaaataaaatcagaggtgttatatatataattacataatataaaaactaaagtttaaaacaaagtgtattttttatgtgttcctagcaatgtcttttttctatttttaaattttgaaatcttttattgacaaatacaaattgtgtatactcaaggcatacaacaagatgatttgatacatgtatacattggggaaccatcattatagctgtgtgacatcagacaagttacatgacctcgccatctccttaaatttagggataataatctgccctgtatgataatcagaaggaagagcatacgatgaaattgctttgcaaactgaagcacattacaaattttagtcttaactaattatatatatacacacacatgcatatatatatatgtttataagtttacgtgagtgtgtgtctatatatgtataaatttgagactactgcaaagggg

SEQ ID NO: 32416 - DNA, 1050 bp, Homo sapiens
tttgcatttgagttttgtgtaatggtaattatcacacatggctggtgagagaataaattggttttaccatctggacagcaaaagagccttaaaaatattcataaattcgacacggttacatgtctagtatcttgtgctcaaaaaaattgtatgattctttccttaaaaactagcacatatatggttaaagatttctttatgatactactttataataaagaaaacttgaaaacagcataagtgttcattgcacaggaatggttttgtaaatccatatatgcatactttaaaattatattcatgaagaatgtttaccgctaatttttttttgtataatgctaataaacattgagtagacttaacattgtgtatgtgattaggaaccatcaccaatggctatatgtaggtgttctttaaaatatctttatatttccctataattccaaaatttcctagagtgaaattatgttctttataatgaagagagaaaaagtgaaataaacagaaaattgaaaagatacaaggacagaactgccaaaaccagtaaaacgtattttttatgggaaacagtttgacaacatgcatacccctaaatttataagcctaatccaattcttaaactacttttcttgttatcatttgttgtttttgtgtttaagaccctttctaggttaaaaagaaagcctaatcatgttaaattaaattttaagtttgcttttttaaaggtcagtgctaataatagcaaataatccaagaggcatttctatttgacttttgaatgcatttttacttaatttaattatttggttagatatttgattttgttactattgcattaagagctgatagtgggaggaattgtctgggacaaaataagaaataacaagggtgggcattttgtttaacagtaactttaatgggattaccttttggcagtgtagatgggcaagctttgactagaaatttggagataatataatagattacattctgtcccttttacatcaaaataatccattttcctaacaatttcatctaaataaaaattaa

SEQ ID NO: 32417 - DNA, 1026 bp, Homo sapiens
aattttcatgtataaggaagagtggttcaatctaattatgaatatccttggtaactatggttgccatcctatcaaagatgacttgctgtatggtgactatgtaaccagagtgttttgatatgctgtttctgtgggttgctggaaaacaattgcttttcccttattgatagaacagcaagagtaataatggtcccataagaatctatcttcatattcttaaaaaatggagtcatgataaaagaaggttggatttaaggaataactgtatacaaaatgtcaacagatttaggaatcacagcgctaatattttgtgtccataatgtaatcaaaacatatcaaatatgttacaaatatcctattatcttctgaacaaagcttgccctctgtttaaagatactgacattgaacatatcttagttgatcaaggtgaattttctgacaacatttacataaaattagaaatagagttgggctgctgaatatagaacatattttctttttgtttaaaatgaggatgacagtatatattcctgagctacaatggatcttaaacacctgccaccactaataccacagcaacaaaacaaaccaacaataaacaaacatgttgatttccttgtttgtattatggtagttactttgttcattcccatgtatctgatttttagtcttagatttttagtgtaatattttttaaaatttaaatatatgattgaagtttaatgtacatggggaaaagtacacaaatcatacatatagagtgagaaatttttatgaagtaaacataatccatgtttacagtatgtatccatgtttatctcctacccagataaagtagtaataccttgctgcctgcatcttggaagacgccctctctcagcgcgtcagaaagtcgcacatagtcaccacccagtagttctgatacatgccatcataaatcatacatagttgaaatcatactaattatactcttttggaaaaaactggcttcttcctctctttatgtttatggaattcaactcttta

SEQ ID NO: 32418 - DNA, 1589 bp, Homo sapiens
gctgataacttcttataatttaatatgtacttaatatacaaaataaagggtagaagggcatagatactttaaaaaatggcataagtaaattgctgtgacaatttagaagggaatagttgctttgggatcagtgatcagggactgcttcctggaggaggtggtatgttaagcttggttaaggtctgaaatcgaggtgagagaaggccctggcaccctgatccagcctttctttgttttactgcatagagattatatatgtgtgaacaagatatgaggataatgttatcacaaagatgtagtctgttgcaaagtagttaaagatgtatgccctacagagacacagattctggtgagcttggtagataatggaattgaatatctaaggtcagcataatttatataaaagttgcaaaacttttgtcataaatgtctcagtaaaatgatcaagaatgagcatcaggaggcaagtggtttccccagtaaccttttaagaattacctttaatgagagcgcgtcctcagaatgtcctagaatgtaggcaaagccctggctgagtaagtaaggaggaagtgtgactgcttacatagattattgttttaatcttgtctcaaaggtctgtatttgtcctttaactgatgaaattagacataaaaattgttagtatacactttttttagtactttgatatgttgaactgcgatattggttttcctttgtttgtttttgtttttgtttttgttttttctttacaaagtactatagtttactatagtcaccaccaagattggaatatacctacatagagtaatgtacatttcattaagcacacaatttttttggcatccaaaatattaaagcctatttcccacattgtactaaaatgtattctgaattatttttaggcactaaaggagaaaatgccattgttgccattaacatggaaattctgtgttgtagcaatctagttatttataatgttcatatattcattcagaaatgaagaatttagaaaaaagtttatccttatctgaattagaataacacagacagctaagactatactaattaaatatttattaattgtagaaagcagaacaatcttgccaggttcagggtgtaggaactgagagggtttgtttcctgtagttgcagttcatgtattaacattgtaagcttagttcaaacagtcggtaaccttcaaaataaactttctcttaaagttttaagaaaatatataggacaaattgattatggtatttctttttgaaaactgaaaattctgatgagttataaaattgtttacttgtcataaggtcaataaaaaatggaaagattgctcacaggttttttttaagagaggagtttactttgctggtacttcaagccacagaaaattatgcatttgagacatctttatttccctttatttataaccacagacatcaaggggctgaaatttctgttcaactgctacatgagtgaaatcactactacatcaaatgagggattcttgaaatagtgattagatactttccctacctcccaagtcttttcacttttgtctgctgtttttactgaattgagaaagc

SEQ ID NO: 32419 - DNA, 1029 bp, Homo sapiens
tctacactttcattttacccactttcccccccccgatcctctcacacagtgttatgtgtgagaatagatttccagactcactgcaatgtctcccatccttcaaagggccccactggcaaccagtctgtgttggctttcaaacggagaaggcatatctggggcacttgatatgcacttgcactaccactggttcccagttttctatgaggtatctatatcagatcatggctaaaatgagtgggaattgcttggcaaatttgtgtttgtttttatctttatatttgcacatactgaataaagataattttaatcctggggaagaggtagaaaaaatctcatgattttagttttctctgttagtattgcacgacataagcaccagagagatgacttttttcctcctttggttcatttgtattttacttgtcctattccaaaagaacagtattgaaatgagacacaggtatcaataaggaaaatttccagagccagaagaaggaaggaactgtcagggaacaattagtgtgacgggaaactatgttatgcttcctcagaaagtatgacaaatatgttacatttacttgagtttctggaaactgcacatgagggatatagcattaatttcctttgtcttgttggtattctgttttaccattcatgaagaaagaaaaaaaatgagagaaaataaaaggtctcagaactcacagagtaaagatatttttctaattgaaagtcaaacttcagagttgtaattctctgttaaagtgggttttggttaaaaattattttctgtaaactaattttataggctattcctatctgtctgttcattagcacagttttggggtcagcaaattattccttatagtttaaaaatattttttataatctttgaaattaacaaacttttatttgatagctattttaagaagttgttacaggtgtaagactttttcttctctaacaaagatgtgcgctgatagagctgaaacacaatatctatgtaaaataaccatggtgcccttcaag

SEQ ID NO: 32420 - DNA, 1060 bp, Homo sapiens
tttcttaacaagagaggaaaggagaaagagagccatgatagtttttaatatctatcaagcatatgctcgaattaatactttaactctcaagagaagataaactttagttttaattcaaacatattactggtaagttaatgtttggatattttaacactgatatttttaactgtttaatgtctttatcatgaacctttactataataaaagtaaataaacacacaaaatctcacactgtttttagagttgacaaacatcattttgaattgctgactgttattgtaactacatgtaaactagaaatgaaacacttgctgaacttaatattgatcgagttccataagattagggccatgaaagcaaagccattgatgttttaatgacaataattagaaaaagtttaggctcagattttgcatcttcatttcagtagcgtccttctgtaagtcttaaacacatcttaaattggactttaagaattataagctaaatgcaagagttctaattgtctgaaggtcgtttgtatgttaaaactgctaaactctaaacatctatgtgctttggtgccccgttttctttgatttggagtttaggatgagagacgttgagctccaaactcagactaagaaactataagaaatatgcttcaatgaagaagctgttcaaaaatggtaattattcctgaaactctgtaacaaaaaaaagttttacagattatttattcaattgccttctcgaatcagaaagttttttattttatttttcctctctaactgttatagagtaagattgtttccttgaggcaagaaagaaatgcagaagtcttgacaaacaaaagaagagattgccttagggaaggggactacagtgaacactgagaacttcttcccacgctaagacaatctttacagagcaagactccgtctcaaaaaaaaaaaaaaaagtaagcataagaaggcaaaaggtggtgtgactcactagcttttgactatataattgaacattaaatcttaaattatttggtcattcgaaaaatgcttatatatgctaaatgggtaat

SEQ ID NO: 32421 - DNA, 1035 bp, Homo sapiens
taaaatcgtacctaagtttcttcctgactaaagggtgttatgagtatataatttggtaatgtatgaactcctggtagagtagttagtatacagtaggctgcccaaaattgatagtgattctacaaagtatgtcatattctttaaagattctaaaagtatgtcatacatgactccaggattgttgtgggtatattgagaggtagtcagtcacaaaacacgatgtgaactctgaagtactatgcacgttttagtttccttattacattatcaataaactggatgcaaaatatcgaaacacacatccatgcagcaaatgacacttattttagtgatcaaatggtcactgttaatgattcacttcttcctcaccaatcttgtccctgaacatctaggcctaggaagttttcctttgaccatcttgctgggctcttctgctggagtcctaggccctgcttccttgtgatctgggaaagcagtccagagactgttttatcaggtgcaatcctagctgattgattcccaagtctctgaagttaaaaaataaataaaaaatgcttcctctaactcagtctcaattgtgactcgtttttatgctgctcagtagaaaggacatcaactaccattctatttactacctccacgagatcaattgttttttagctcccacatatgagtgagaacatgtgatattgtctttccgtgcctgacagatcacctaacataatgtcctccagttctatccatgttgctgcaaatgacaggattacctccttttttatggctaaataatattttgttgtgtatgcgtaccacattttctctatccattcatccattgatggacattttgggattggttaatgagtacaaaaatacaattagataggaagaataagatctagtctttggtagcacaattgggcaattatagttaattaatttattgtatattttgaaatatctagaagcaaagatgagatggggcaaggacccctcataggggcctgctgctgcccctactgaagtataagaata

SEQ ID NO: 32422 - DNA, 1013 bp, Homo sapiens
gcaaagtttttattttagggagacaaaatatatcaaaatatacatcattgcagaaactaaaatgcccaatagctgctttgccatttgcctagtttgatataggcccattttctgctgcttttctttccagaccttctctgattttcctgccagtcttggccatgtcttttcatgcctgtcatttctcttctataattagaatacactgaggatttgtcattaaagtttaagttatatgaagcatccaaggtctttcatttaaggcactgtttggaataaggtagatgacactttccatggacatctggcttacagggtcttcccattgcaaatgaggccccattggaattattggactcattacccagctggccagacttgtgattgaagaggtgggtcctgagtgaggatccattctcttgcaggtgcttctgaagtgcttgttttgtctcagactcctgtggtggttgcattcattggaagactagttgaaaataaataggaaaaggccagtaagaatttctgaaaattccaagttgaggaatatgtagagaaaatggaaatttatttgtcaaaaatatatggaacatattgtatctgatgtaaatctgcatctacacatgaggaagttagaaagaaagataaaggaaataacctgctattaataaacagaacttttctaaatgtgtgctgcttgtattcaatcatttgtgaataatataatttatgtttaatcacacccaaagccttgccaagtaggtcccacaggaatttctctaacgaatacataagcatctcttgtattgagcccagtaattgcttatatgcaaatgattttaagtacttgaacagtttgacttaagaaggataaacattatgtctgtaatcttgtatatgatattcatttgcttagcaagccattttctgatgaattatataaaagcaaactttataatcaactgaatacaaattatcctgagtttggaaaaacaaattaatgaggttttatgatc

SEQ ID NO: 32423 - DNA, 1117 bp, Homo sapiens
gaattttgctcactgagcttctaataaattttagtggaacacatacattcaaaccatagcatctctcaagttcatgttgaaaaaatgattttaaaagaaaaatcagttagaaaagccaggtaccttttctaaaggtcagacgtattttcaaattaaagcaaaatggccaagattaacccctaaccccaaccttaaaaagttaaccaggtttgttctcctcgtgaatgtattctcacgggatgatgctaatgacacttagcctctggggcccctcacttacccaaggcccagagagagtcctttatggtattcataatatttattctttttttaaaaaaagagaagcccaaaactgtataagcctcaggctccacaaaatctgtatctacctctatatatactattaaagtagacataactccctcttggttattgcaacccaggaaaaaagaaatggacagtggcagtgggggtggggggtggtggaggtgcttgtttctattttcaaagactgttatttaaaatgaacaaatgatggaaatatccatgcctgaaagtaaggtgatcaaatgaacacacctaagtgctaaaagaatggaatattttaaagaactagctgctgtggaagctggtacaacataaattatatatacagataaactgaacatattttatggcttttaatgtggatatgtggcaaattccctcttcttcatattttcctcctttgagggtgactttaaggattgtagaagctttttttttcttttttcttggaaagatgtaataaggacttatgaacagaagacatgtctgtgtgccaggcagctgtgagacaaaatcgtggatctccgcactgtaaacccccagacccaggacttacataacctagggaaatgttgtttcagaagggatgtgtaggacagttgaagtacaagaacatcaaggtcatttcacccaagggcagaatttatggtaagtacctactcttacacaaggaacaagagataaactggaaattttagaggtcttcctggaactggggttaatcagaagtcaatatggtagattagcatccaagatggagtggctttggcttccacactccatcccctaa

SEQ ID NO: 32424 - DNA, 1057 bp, Homo sapiens
cttttagctgttctttaagggaatgtgtactatcagcaaattagtttatctttctatgggaatttctttatttcttctttgtttctggagaatagtttcactgattctaaaatacatagttgactatgcttttagcacttgaaaaacattgcaccatattttttctggcctccatggtttcagatgaaaaatctgtcattcaaactggttttccctatacacaatgtactgtttctctctggttgttttttaaatattttgtctttatttttcagaagtttaattataatgtccttgaattgaatttattttgttttatcatatttgagatttgctcagatttttgcatctgtgtacatatgtcctttgccaaaattgggaccctttcagtcatttcttcaagcaccttttcagcttcaatctcttttctccttttgagaatctaatgatatgagttggatcttttgctaattgtctctcaggttcctgaggcacttttcactttttaagatcagctttctctcttttgttcagattgtataaattctgtcgatcactgagtctgtcccttgtcatcttcactgtactatcaagctcatttagtgagctttttcccactagttattgtacttctcagttctattatttccatttggttattattatttacaaattctgctatatactccagacttcctgttttttcatttgttttaagaaatttgtaattgcttgttgaagtatttttaaatcacttttacagttttgtattccatatattcaattcatcattgttccttctcttttttaaaaattgtactttgttgaggtatttttatgatggctgctttaaaatcgttgtccgataattgcagcttctaattcatcttgctgttgatgtgagttgattgctttttttttcattcaagctgtgatttttctggttcttcatataaggagtgatttttaaaattgtattatggacagtttggttacgatgttaggaggctttggttcctatttaaatcttgattttagcaggccaggcagtcatcac

SEQ ID NO: 32425 - DNA, 2433 bp, Homo sapiens
aaaagcaagattgaaatttgaactatgagtctcctgcatggcaacaaaatgtgtgtcaccatcaggccaacaggccagcccttgaatggggatttattactgttgtatctatgttgcatgataaacattcatcaccttcctcctgtagtcctgcctcgtactccccttcccctatgattgaaaagtaaacaaaacccacatttcctatcctggttagaagaaaattaatgttctgacagttgtgatcgcctggagtacttttagacttttagcattcgttttttacctgtttgtggatgtgtgtttgtatgtgcatacgtatgagataggcacatgcatcttctgtatggacaaaggtggggtacctacaggagagcaaaggttaattttgtgcttttagtaaaaacatttaaatacaaagttctttattgggtggaattatatttgatgcaaatatttgatcacttaaaacttttaaaacttctaggtaatttgccacgctttttgactgctcaccaataccctgtaaaaatacgtaattcttcctgtttgtgtaataagatattcatatttgtagttgcattaataatagttatttcttagtccatcagatgttcccgtgtgcctcttttatgccaaattgattgtcatatttcatgttgggaccaagtagtttgcccatggcaaacctaaatttatgacctgctgaggcctctcagaaaactgagcatactagcaagacagctcttcttgaaaaaaaaaatatgtatacacaaatatatacgtatatctatatatacgtatgtatatacacacatgtatattcttccttgattgtgtagctgtccaaaataataacatatatagagggagctgtattcctttatacaaatctgatggctcctgcagcactttttccttctgaaaatatttacattttgctaacctagtttgttactttaaaaatcagttttgatgaaaggagggaaaagcagatggacttgaaaaagatccaagctcctattagaaaaggtatgaaaatctttatagtaaaattttttataaactaaagttgtaccttttaatatgtagtaaactctcatttatttggggttcgctcttggatctcatccatccattgtgttctctttaatgctgcctgccttttgaggcattcactgccctagacaatgccaccagagatagtgggggaaatgccagatgaaaccaactcttgctctcactagttgtcagcttctctggataagtgaccacagaagcaggagtcctcctgcttgggcatcattgggccagttccttctctttaaatcagatttgtaatggctcccaaattccatcacatcacatttaaattgcagacagtgttttgcacatcatgtatctgttttgtcccataatatgctttttactccctgatcccagtttctgctgttgactcttccattcagttttatttattgtgtgttctcacagtgacaccatttgtccttttctgcaacaacctttccagctacttttgccaaattctatttgtcttctccttcaaaacattctcctttgcagttcctcttcatctgtgtagctgctcttttgtctcttaacttaccattcctatagtactttatgcatctctgcttagttctattagttttttggccttgctcttctccttgattttaaaattccttctatagctagagcttttctttctttcattctctcttcctgcagtgttttgcatacatcagaagctaggtacataagttaaatgattgagagttggctgtatttagatttatcactttttaatagggtgagcttgagagttttctttctttctgttttttttttttgttttttttttttttttttttttttttttttttgactaatttcacatgctctaaaaaccttcaaaggtgattatttttctcctggaaactccaggtccattctgtttaaatccctaagaatgtcagaattaaaataacagggctatcccgtaattggaaatatttcttttttcaggatgctatagtcaatttagtaagtgaccaccaaattgttatttgcactaacaaagctcaaaacacgataagtttactcctccatctcagtaataaaaattaagctgtaatcaaccttctaggtttctcttgtcttaaaatgggtattcaaaaatggggatctgtggtgtatgtatggaaacacatactccttaatttacctgttgttggaaactggagaaatgattgtcgggcaaccgtttattttttattgtattttatttggttgagggatttttttataaacagttttacttgtgtcatattttaaaattactaactgccatcacctgctggggtcctttgttaggtcattttcagtgactaatagggataatccaggtaa

SEQ ID NO: 32426 - DNA, 1039 bp, Homo sapiens
gtttcctttgtgaatgctgtgggtatgatccacagaaaggctacataatgaaatgatagctttacaattaatttggctgtagagttgtagactagttagcatatcattgcatatttgtttatttagaaatgatttccaattgtggaacctcactaactgcctgcttggcttgttactaatcctagcattcaaagaatcaaaaggaatgatgaatgatggtaagtataaaatgcacttaataattatagatcagttaaaacatggacattggaaaacaaaaaagcttcttgaaaatgtggctcttttttagtaaaagggacactgtcagatgataaaggttcacatttcttgatgtatacaacttaaatctactttgctaaaaattgcaaaactactactgtaaaaactgtagggtgtcacgaatcagactccagtcatatggctcccagcaaagagaaattaccactttttgtaaaatgtttttcagattccgtgtctggtgactgtaactttaagatgccttttataaggcacataaataatctggcacaaatctttatcattttgacagagtttcttttatgcttgtgttggtgattttgttgcatttaacccatggggacttaacatctctgcttttccaatcaggagcttggttctaaccttttgggagatgattaaagagagaggttgagagagagagagagagagagagagagagagagagagagagagagagagatgtttcgtcctcagcttttgcttccattttttttttaagaactctgggctaataacttctaatctttatagaatatttcaaagaaatatatttgttcttaaagatacataggtttgagatattgagtgctacaagcatttattttggttttaccttaacatattatgattcctcagttttgttggcatttagtaattatgtttatgtttttatcttatcaaaaaatgtcttcttacctttgatatttataatcactcctcggtcatgtaaatagtttgctttatattttactgtttt

SEQ ID NO: 32427 - DNA, 1033 bp, Homo sapiens
ttcactttcccttcccatcaccaactttctgggtttttttctgtttcttcttagagtccagtggcagggagaaacttgtcagtccagtctgttgccatttttcctgtttgagaaagactcaccagcttttggctggctcacagattggctttccttgggtcaggacccacccttttccctgccagctttggaagcttgacagaattcgagtgtgcagtggtggtaaataaatagtaaggaacacagagcagtcctggaggcgtgcctccatctgctgatgagaaaatccagtgctgtcatccagcccaggtcccagcggaatgggcctctctgttcagtaggatccccctcctgctgagtggttcatggcatgtttctgttcaacgcttttccatctgtaggattcttattctgtatttatttgtttttttgggtttttttattttttgagatggagtctcgctctgtcgcccaggctggagtgcagtggcacgaccccagctcgctgcagcctctgcctcccaggacgagggagatcctcccacctcagccttccacgtagctgggactacaggcatgcaccacaggcatgcaccaccacgccagctaatttttgtatttttggtagagacagggttgcatcatgttgcccaggctggtcttgaatgcctgagctcaagcaatctatttgccttggcctcccaaagtgctgggattacaggcatgagccaccacggccagccttctcatttgttttttttataaggaagctatctcttcttccctccccaactagggtattctttttccctttcgtcactttgctcatgtactgtattccttcaacttcattaatgaatccatttggaagcagtgaaaaaggcaactcagaaagctaagaagaaatagatagaggaatactcagagctatctgagtattttctttagtttgttagctctttggagctttgaaactggaaagacccagggagtgatgtggagaaagagactgagcttgtaagacacaggagca

SEQ ID NO: 32428 - DNA, 1047 bp, Homo sapiens
actgagagaatcctggatgcccttctccattgtgtgccccccccccccacccgccccacatatcagggaacaatttaaaatcctggcacaataatgagaagggagagtgacaaactgataagttccagttaagaatcacttagacaggccaggtgtggcagcccacgcctgtaataccagcactttgggaggctgaggcaggtggatcacctgaggtcaggaatttgagaccagcctggccaacatgataaaaccctgtctctaccaaaattacaaaatttagctgggcatggtggcgcctgcctataatcccagctacttgggaggctgagacaggagaattgcttgaacccgggaggtggaggttgcagtgagctgagaccacaccactgcactccagcctgggcaacagagtgagactccatctcaaaaataaaaaaaaaagaatcacttagacagtattttttgttctgtaatcttcctctctgtcattgaaatgtctcatatttcttgtttcacatagaatctgggagtcatcaagtagtcatctagtctatctcatcatctaatttacgaattatttctatcacaccccaagtagctggcgattcagattttttactgaaagcttgacatgatgagacattattacttcccagaggatcttggtctgttatcaggcaatttcagttcttccttaaatcaagctaaaacttgctactattctcactcactgggagggctgtagtatttctctcaagtttatacctctctgtgatgaaaatctctgttcttttagccattgctcatggtttcgggatccccattctagtcatcttcctttggagcaattccctgttagatcttcaaatgtgatgagtaaaactgagctcaggactgcgtttgttggtcacacccttctcccttccaaatgactgctgctgtaactttctgacaggtcctgcttccctgtaatccattctccatgtggctgccaaagaagatttgaaataagtcaggttatttttcttccctatttaaagcctt

SEQ ID NO: 32429 - DNA, 1082 bp, Homo sapiens
tacattcagagacaagcagtttaattaataaaatgagacaaatttttcattctttcaaagttttagaattttaaccaaaaaataaaatcactagactttgaaagcaccagttctttgtcccagcagtagggatctaaaagctttcctttgggatttgtgccccctattttctgatgttaaagaaggctagtaaggacagttgcaaacatcagttgaaggcatattttttgtcttcagcagacaaagttgagaaagagaaaaaagtagaagtaaatttgagatacttctatactttcagaagtcctcaaagactaaatagaaatctacactttttgatgttatttgttaaatgtattattccttcatatacacaattacttatgaatattttaactatcaaaatgatgtaaaactctctgatcaaagccaccatgtatttgtctaatattaatattatataattgattgttagtttctgacatactccagttgagtgtactgtcttacgggatgttaatccttattcatcattgagcttcatgctctactttgattgatttttggttttagaacggactttctctgcggagcatgcaaattagattgaccaagagcccctctcctaaactgtttaggaatgaccaaggacagtttttattgtgaaccatgcccatgcgaggtacacagtcagtttgtgaaggttaaggtagttcatcattttgtagtacttagttaaatacatgctgcctattagggacataaaacagctacagttaaatgtcactttcacaaatgtattcacaaacaaggagcagggttgtcataaaatgacctgcagaaattgcaaacacaaagaggtcagtcgtatttaatctgctgctgctttgaatttgccattaaacaaaatgtttttcctctcaggcaaaggagcgataccagcagggaaatggaggagtgacggaaagaaccagactcctctctgaggtacacactgatgctcttgccctgcttctcacctgtcagctgggccccagccattgagaacctacaaatggtttaacactgctaatttcagttgcttc

SEQ ID NO: 32430 - DNA, 1047 bp, Homo sapiens
tctattattggcatataggaatgcttgtgatttttgcacattgattttgtatcctgagactttgctgaagttgcttattagcttaaggagttttggggccgagacataggggttttctaaatatgcaattatgttatctgcaaacagagacaatttgacttcctcagttcctatttgaataccctttatttctttctattgcctgattgcccaggctagaacttccaatactatgttgaataggagtggggtgagagggcatgcttgtctttttccggttttcaaagggaatgcttccagcttttgcccattcagtatgatattggctatgggtttgtcataaatagctcttattattttgagatatgttccatcaataccaagtttattgagagtttttagcatgaaggagtgttgaactttatcaaaggccttttctgcatctattgggataatcatgtggtttttgtcactggttctgtttatgtgatggattacatttattgatttgtgtatgttgaaccagcctgcatcctggggctgaaactgacttgatcatggtggataagctttttgatgtgctgctggatttggtttgccagtattttattgagggttttcacattgatgttcatcagggataaaactggctagccatatacagaaaacagaaactgtaccccttccttacaccttatacaaaaattagctcaagatggactaaagacttaaatgtaaaacctaaaaccataaaaacctgagaggaaaacctaggcaataccattcaggatataggcatgggcaaagacttcatgactaaaacaccaaaagcaatggcaacaaaagtcaaaattgacaaatggcctctaattaaactaaagagcttctgcacagcaaaagaaactatcatccaagtgaacaggcagcctagagaatgggagaaaatttttgcaatctatccatctgacaaaagtctagtatccagaatctaaaggaacttagacaaattacaagaaaaaaaaaacccatcaaaaagtgggcaaagga

SEQ ID NO: 32431 - DNA, 1056 bp, Homo sapiens
tatattcctgccagcactgtgtgaagttccaattgcttcatatctttgtcaacattcagtagtgttttaatcttttttattttaatcattgtggtaggtatgttatgatatctcattgtcattttaatttgcatttcccggttgacttatgaggttgagccactttttcataagcttatttagcttttggatatcttcttttgtgtttagccatcgggccatctgcttttccttttgatttatagaagttctttatatattcaggatatgaatcccttgtcagatatgtgtactgcaaatatctactctagctgtccttttcctttttgtattatgataaacagtgacttaactttaatatactcaaaatgattttttttggggggagcaagtgtggctaatacttatgttttaagaaatctttgcttaccccaatattatgaagatattctcagactgttttcttttttaagctttattgttttgcccttcagaagatttgcaatccatctaagtttgattcttgtgtatggttgtgaggtagaactcaagacttacttggttttcatatgtatacacaaccaacccagacagtttactgaaaaggttattctttcaccagtacactgctttgtcataaatcaagtgagcatgtatgtgtgagtctgtatctgtactctgtattttatcactttagtctatttgttgttatttgatactattgaaaatggtttcttttaaatatattttatgtttatttgttgctggtatatagaaatacaattttttatgtatatctgtatctagctgtgtgtgtgtgtgtgacttgttaaattcactttaaacagtaggcctgtaagttattttgacttttctgatttataattatgtcattcgcagataacatcaatcgtcattctttgtgagccttttgtgtttttactttctcttgcctgctatactggttaagaactgtagtcttattttgggtgtaagtggtgttatcagggagaatgcttccagtatttcagtttcaccattaagtatgatattatc

SEQ ID NO: 32432 - DNA, 1046 bp, Homo sapiens
tcagaataatatgttaaaatttaaatctaaactccagttatatcaataccttacatttgcagatcgttttgtagttttcaagtactttaaaacacatttctttactgaccttgtaaagtatttgggtagatgttatctccattttacaaatataaacactgaaatttataaccttgggacagtttaatcttttaagaagctaataagtcacagtacctgaatttaaactgcttctccaaactccaagtctattgctttttccgctttacctcataacaagagttgaacaaggtgtagatatgttttgattcctgcctttagcaagttgtaattagtaatgttggtgtttacttaatgtgtgtgttggagatgatgatgaccgagtgctcctcaaatgtgagaagaaaaataaaagtagagatgcacacagttattcttggaaagaaactgttgtttgtgttattcattcttatattgatggtgtaaacagagaactgtgaaggccacctgggattccttctggacaaagtagtttgagtactgagaaggagcaaagtaaattaatttgcttctgccagtacaccaattccttattggtcctgatttcaatttttcatcgcaaactacatgaggaagggtttttccaaatggtgtttttgtaaattatctaagtattagattctttggacaaaaattatataacataactcctttagagctaagactatgtatagttgtatttccacaagaggaagaagagtgaacaccaggtgtttgtggatggtcaaccatggagtactaatgaggcagaaaaccctttcatattttaaaaaacctggcaagctcatgatattgcccactaaagccatctgcctgagacagctgtgtctgactacagcttatgatggtttgggctgctctttccccaagacaaaattgctatataggttagtatcatagatttaagattttatgtctcatgcagcaggtggactcacaatgcagaggaaatattattttaggaaagttgagcatgatgaattctt

SEQ ID NO: 32433 - DNA, 1035 bp, Homo sapiens
tgataaaaattgcaaattttttttcaattagctgtcatttgactttgtttatggtttagcttttctgtgaagaattttttatttgtaattttttcatcatttttattattgtgacttgataatgttttagtattttataggagcaatctctcatatttatttgagaattttcctgtacacttgctcatttatttttctatattatttattttagactcatcttgtctagttaaaaaatagtgttgacacttgtttgaataatgttaggtttataggtttttagattaggaagaattgacatctctatgatgttaaattatcttttctaaaacatagtgtatcttttcatgtgttcatgatcttcagtagtactttatgaccctcaataatgctttatttgaatatagtttttataccttgttaagttttagctttttgtcattgttcattatatgttcattgtattcataaaatatatgaatatacatattttgtacccaaaccaatagtgaatttacctgaagaatccaagagaatcactaaaactactataaataataaacccgttctgtcatctgtaaaaaaatttacattttcatatccaagttttaaataacatttctcttatccagatcatttttttaatatgatgaaaaaggaatttgctcttggtgttaatggaagcaattttagtgttttcccattaagcacaatgctcacttttggattaagatatacgtgttttaacttgttaagtattcatctatttctattttactaaaaatttttattaagactgggaatgattgtaccaaaatggaaatggaattttatcagatcttttcgatatctataaagataatgtgacttttttctcttttttttagtatcatatcagtcgttataggctagtttgtgcttcagtaactaataaccttaaaatctcagtagctttaaacaacatggtttatttctggctcatactccatgtcagtggaattccatactttccttcctcccagagccaggctcata

SEQ ID NO: 32434 - DNA, 1046 bp, Homo sapiens
ggaaagactctggctgtcaacatcagtatgttcacctctttgcatgcaccaatacaaagtagtttcttcagtgtaacactcctgtttttccttttggaaataataagtaatttgtgggcagatactgcatataggctgtttctcttccaacttgcatctgctacttttagtattgttgataattcttacttgaatcagttattaatttgatggttggttgccaagtggatattttcctactttttaaaggtagaaaattgaacattttggtaattttataatgtactgaaaatagcagtctatatgacatcacccatatcattcacgaaattaaaatatagtacttagagtttttcagttaatacagcatttactttttttgcatattcttacaagcaaagcatgtgagatttgctttctgtagtttaagaaaataaataggcatgttaagcatattgatttttttttaactacaagaactttttgatattatttttctacccaaaccccctaatttgagaattgcctatttaaatcatgacattcaattcatttggatcatcactttaccttggctctcagtgattaccaataaatattaaatgagtattacccataataaagtattttggattaagaaaataattgtacatttccagccttcactaagtttacattctagataattaacttttaaaaattaaaacttggtcactgctcatgcctgtagtcccataattttggaagcctaggcaggcagatcatttgaggcaggggttccagaccagcctgggcaacaaagtgacacacgtctccacaaaaaataaaaaaaaattagttaggtgtggtgacatgtccctcgggctgcagtgtagtgagctgtgattgcaccgctacacctcagacatatatatatatatatggcctatttttttaaaggcagatgtttcattgattttttatgttgtgaataatgagcatgataagtccttgaaattatatacctctgtactccataaattgagagggaacattgtgaactcaaa

SEQ ID NO: 32435 - DNA, 1163 bp, Homo sapiens
aagtttaagtggatagataagactgaagaataaaagggtctataaaataaaagagacaaaacgttaaagaaagaaatgaatgaatgaaccaaaaattctagggaaaatcaatttatctttccaatttagacatcttgagacagcctagcctagtgctaccctatacaattttctgtgataatgacagtgttctatgatgtccagtcccatagccagtggctaaaagtggccattgagcacttgaaatttggcctttgcaactgaaaaaactaaatttttgattttattaaatttaattttgataaccatcctgttagataatgcagatctgtcccattctcacaagtatgtgtttaaagaactcaatttgccttttcttaaagatctatataaataattaccccattatatatatgtagtagccctttcttaatgtaattttaacctgtttatttctaatcttctctccctaaagaagaaagtccgtactgcagctttgaagaaggtgagtactaatcatcatccttcatctctttctgtctcttgtaacacctttcatattgtttctgttgtttttctgagtgcctttactatatcagttactttttttttcttgttggactgtgtacctcatattaaaaaagcaaaagtgtgtgtaaatattttttttctaaaaaaaaaaatttaatcaaatttgaaccaccaccatagtcagggttttgtatgtgtgtatgcatgtccatttcctaatggaaaaaacaaaacttaggaagtgcatcattatattaggattactcgcatcctcttaaaattttgctggggagagtttgtctccaaagtatacattaacacagttccgttactatttacacttgccacttgaacaaatagacacatctcataaaatttggttggttaaagtttatattaaattgttcattaatttaatgtcaggaaaaaaagaatgaaactgtatgctgtgtcttaggaaattatcaggtcagtgtccatttgggtctatttacttatatattataaggactagttacttaagaataaaaagagattctgtcatgagttagcactgtcagttaaatgaaaatatgtttgaatttctacttctacctttggtcattcattcatatgttacaggtacttatcaa

SEQ ID NO: 32436 - DNA, 1034 bp, Homo sapiens
aagacaagttgaaagtgtattctcaatttgtattatattgtttaatgattattcattttaaacttaccatgtaattgaattaactgaagtataatatttatagtatgtcttgaaatggttgttgtacaataaaaaataaaagcatcttaaaatatatgtatagagaaaacattaaagttatttttcttctcaattcttcctcctcccccaaccccaattccttaggcttcctccctagaggttcaaaaggcacaattagaaggtcgtttggaagagaaagagtccttggtgaaacttcagcaagaggaattgaacaaacactcccacatgatagcaatgatccacagtttaagtggtggaaaaataaatccagaaactgtgaatctcagtatatagacattatggcattttggaatttgtaatctcatgatatttttgatgtatttatctattggagggggggtgggtaggggagttaatttgtgacttcgtaacaataagaagttattatctaatttagtaaagaccctgatctgttgcatgttttttatttgatagtttgaatagaaatttaattttctaagttttactttttgtttctggcttttatggcttaaggttttctttggttcttacattagaaaatcatttttaacctccattatcatttttctaaggttctttcctttttcttagttgctttctattctgttttgcctgtcttatttattctcatttgtgattatttagatcttaagaccaaactttcttggtataacagtcctaaagattacaaaataaaaatatagagagagtaaaagtaaaaagtaaagtaaaaagagagaaggtatgattttactgctagagaagtttgtctctgaagaagcacaaaagaaaatattagtgaatttaaaataatttttatactgctgtagcataatttctaaatttgaaaaaaatgcaatggtaataaaatgtataaaaattagaaaactgtcattgtgttaaactattacatttaaatgattacattt

SEQ ID NO: 32437 - DNA, 1057 bp, Homo sapiens
agtgtatatatgctatataataaatactacatgattaggcacagttcatctcattaaaagctggttgcacacatacaatttaaatgtttctagagaagagaagcttatccatttctatcaccactattgaagaaaaacaaatctacattataactgctttgacttataaacacagatgtctgtgttttgagacataagctatttatattaaaattgtaacgtgagttggcatctagtctcaatctgtggaggaaacgttctacaaaaattaaagctgtagatagagtctatttaatatagattcaaagctcttcatatttcattgactctaaaatgtcatcaattgtaagaaagaaaaacatcacaaattaaattgacatgcagttttagaggtgataaaatgtgaagaagggtatcttctaattgatggactacatgtgtgtttcaaactgcattcaagtttaagatgactaagtgaacaaggttgataaccatgctctgagacagaatacgtagaaatgtgtgaattgagagaagagccctaaggttcttacattactttacatgtgttttttaaaaaaattgttttaggaaatggaaaaggacatgctcagaatgtgcctgagagtccattattttaagcaggcaatgtttttatatctttatatttataactattttcttattctcagtgcattcaacttctacagaagttaacatataatgtcaaaattttctattctggtgccaatatagatgaattaattacgttcctgatagatcacatgtgagtatgcaatcaaacataaaaccaaatagtttatttgtttatttttaaattacaaccatgtggtagattaatttttcttagataacattttctaacatataaactgagtgagactccgattcttatttgttctgcccagatgattttaaggatcaaaagttgtaaaagtatgtgacctcattcattggtgaaaaaatgtaaaaaggaaaaaaaaattgtaaagcaactttaattttcataagaaaaatttatggactgaattgattt

SEQ ID NO: 32438 - DNA, 1032 bp, Homo sapiens
gtttactcatctgcaaaacaaaatagtggtacctaccttatagagttattatgaagatgaaaagagttcacatatgtaaagtgcctagatcgatgcctaggccagagtaagtgctgtataagtattagttattattaaaataaattatctttgttttaagagattcagtataagtaaagggaaaacttgtaaagcaatttttattttacctagtgcatataattattacatgttagacaatttatgttaatgagatacaggaccaatcctatagagaatcatttttaaaacagcaagtgtcttattctggagagctagatttataaataagcaacagggtaatgcccacagtatttcctaccccagaatatctgttactggcatctgcactttcatatttggacttattttttcttgtatagacttttactttagtaatgttaaaacactccttgggaacagataatgtgaaactcttatcagcaaagccttagaagaaaaactgatgtgggtgagagaataaagggaggatacagaaaggaaagattagagggatgctaaagcagcctgcttaggcttgatcttattaaaataagtattcaggacagagttagtcttattctaaggtaactaatggttttgccatctttgtagaaaagatatgctttgtaataaatacatccataaagtatgttgaaaattcatgctttgagacaactgcttttggcctttagttccagctttacctcctctcttctctctttcactctgtgtgtgtgtgtgtgtatgtatgtgtctgtgcatgcgtgtatgtggcttatagattacaagaaagtaaaaaaaacaatggaataatcagaaataaaatttttcaatgccttgcctggctacttaaaaaaagattcacttttcacttccttctttaatcccttaacttctgagctcacctattgtctttgggaagaagcagaaggaataatcccataactaccctctgggcttcatttttcattctcctccctcaaagtaagt

SEQ ID NO: 32439 - DNA, 1089 bp, Homo sapiens
catagtaccttaaaaaatcattatgtttgccacattcaaatgtaattggtattaaagaatttttaagtttcattttaaattaaacaaaaaagaaaaatcacaaaattatttgagtggatttaaaatgagttgcctcaatgctaaaaggcagagtgccttcttacctccaaatgaccacagtagctccccactaatggctcttaaccagattgaaatggctgaaatgataacatagaattcagaagctgggtagcaattaatatcatcaagatttgggacagagttgaaactcaatccacagaatctaaggagttcagtaaaatgattcaagagctaaaagatgaaaaaacaattttaagaaagaaccaaactgatctgatggagctgaaaaactataagaatttcataatacaatcagaagtattaagagcagaatagaccaagctgagaaaagaatatcagagcttgaaggccagttctttgactcaacttagtcagccaaaaataaagaaaaaagaattttaaaaatgaacaaaacatccaagaaatatgagatgatgtaaaggaccaaacctatgactcactggcatctctgaaagagagggagagggagcaagcaagttcgaaaacatatttgacgatactgcccatgaaaaatttctcaacctcactagagaagtcaacattcaaactctggaaattcagagaagccctgtgagatactatacaaaacaaccatacccaagactgtcatcatattctccaaggtcaacatgaaagaaaaaatgttaaaggcaatcagagagaagtggtaggccacctacaaagggaaccccttcattctaaaagtggacttttcagcaaaaaccctgtaagattgaagggattggggcctatattcagcatccttaaagaaaagaaattccaactaatagtttatatttaaccagactaagctttcaagcaaaagagaaataaggtccttttcagagaagcaaatgctaaggaaattcactacgagacctgccttacaagatgcccctaagggactgctaaacataaaaatcaaaggccataactggccaccac

SEQ ID NO: 32440 - DNA, 1028 bp, Homo sapiens
cattgcattagctgcattaatttcattgttattcgactgtaaatattttcttatttttatcacttcctttttgatccataggttttttagaagaacatagttcattttgaaatatttgtggcaattttctgatatctttatgtaactgaattctagttgaatttattcatgaactgagaatatttgttgtatgattttgattttttatatttgctatgatttgttctgtggcctataatatggtcgattttagttaatgtttcatgtgcactggaaataaatatttttctcttgtttggtagagtgttttcttaatgtcaattaggacaggaggttatagtgttggtcaaatattccatatattagcttattttctgtctatttgttctaccaattttggggggaagagttttgagatatctaagtataatgtctgttttgtctatttctcaggtttctttctggtttggctccagctattttaaagccctggtattatgttcatcaacaattctgattgtaatctctttttggtatattgacatctttatcattatgtaatatccctcttcatccgtactaatatttcttgttataaagtctattttgttttatattaatatagacactctagctttttaagtaatgtttgcatagtttatctttttacttattgtattcttttttttttttttttttttttttgagacggagtctcgctctgtcgcccaggctggagtgcagtggcgggatctcagctcactgcaagctccgcctcccgggttcacgccattctcctgcctcagcctcccgagtagctgggactacaggcgcccgccactacgcccggctaattttttgtatttttagtagagacggggtttcaccgttttagccgggatggtctcgatctcctgacctcgtgatccgcccgcctcggcctcccaaagtgctgggattacaggcgtgcgccaccttaaccagttattttatattcaaaatggattacttgtagacaacatatactt

SEQ ID NO: 32441 - DNA, 1057 bp, Homo sapiens
aaacagaaagcagtaacatcaacatcaacaaaaaaggatgcccacacaaatacaccatcgaaaggtcatgtgcatcaaagatcaaatgtagacaaatccatgaaaatgaggaaaaaccagagtgaaatgtgaaaattccaaaaaccagaatgcctcctctcctccaaaggaacacagctcctcaccagcaagggaacaaaactggacagagaattagtttgacaaattgacagaagtaggcttcagaaggtgagtaataacaaactcctccgagctaatggagcatgttctaacccaatgcaaggaagctaagaaacctgataaaatgttacacaaactgctaaatagaataaccagtgtagagaagaacataaatgacctgatggagctgaaaaacacagcacgagaacttcgtgaagcatacacaagtatcaatagttgaatcggtcaagcagaagaaaggatatcagagattgaagataaacttaatgaaataaagcatgaagacaagattagagaagaaagatgaaaaggaatgaacaaaccctccaggaaatatgggactatgtgaaaggaccaaacctatgattgattggtgtacctgaaagtcatggggagagcggaatcaagttggaaaacacaattcaggatattatccagagaacttccccaacctagaaagacaggccaacattcaaattcaggaaatacagagaacaccacaaagatactcccagagaagagcaatcccaagacacataattgccagtttcatcaaggttgaaataaaggaaaaaatgttaagggcagccagagagaaaggtcaggttacccacaaagggaagtcttcagactaataatggatctctctgcagaaaccctacaagccagaagagagtgagggccaatgttcaacatttttaagagagaattttcaacccagaatttcatatccagccaaactaagcttcataagtgaaggaaaaataaaatcccttacagagaagcaaatgctgaaggattttgtcaccaccaccagacctgctttacaagagct

SEQ ID NO: 32442 - DNA, 1038 bp, Homo sapiens
aaatttatattgaaagttactttagccttgaaaacaagagttcacctttaccaccactgactatgatagctggtagctccatgttctgaaagtaaagccattaaaataaggtattattattcattagactgaaattgaactatgatatgtatctctgacatcagcctgctgttcttcacagaccatcatggtaaaggaatgcatagaacattcccaatagagcttttctacttgtcttctgacaaagcaatttaggaaaaggtaaatgtagccaaataattatgtgtctatgagctgaatgtaactcttaatcacctttaaaagtgaaatattcacttagtactttggtggtataaacaccctattttatggactaagctctcttctttctaatggatttatggttagcagattacgtgctagttaactgtatttaccattttttttatagtgccgtgctataagcggtgcaaacagatggaatattcagatgaattggaagctatcattgaagaagatgatggtgatggcggatgggtagatacatatcacaacacaggtaagaggagaataaaatgacatatatttagtttaaattaaactctttcacaatcttttataatagccttgatttaaaaaagaggatacataaggcatagttttgtcccaatagacttacatgaaaaaagcaggaggacaaattttaaaaaagaagcctttagagtatgccaaatttatttctttttttgagacaagagtcttgctctgtcaccaggctggagtgcgatctttgctcactgcaacctccacctcccgggttcaagcgattctcctgcctcagcctcccgagtagctgggactacaggtgtgcacccccacgcccagctaatttttgtatttttagtagagatggggtttcaccatgttggtcatgatggtctccatctcttgacctcgtcatctggctgcctcggcctcccaaagtgctaggattacaggcatgagccactgcgcccggccagagtatgccaaatttct

SEQ ID NO: 32443 - DNA, 1045 bp, Homo sapiens
tacaagatttctgacataactcactggaagttctgtctcctcatcacctccaacaatcttattactttaaactgaactcgcctgaaagtgtaaaaccagatccagtcacgttaagtcactttaagaatctctctacaatttggttatcttagaactgactgcagcacccaacctctgttatgaaactgaatcattttagatgtttcgaacctactagattgaatatgaagtctcggaaggctgtgtttcatgattgcagcaaatcacctgtaatatattttgttttaggaaaatttgatttgggggtatcctgaatttttagcccttggcaagaaaaactatcattcagcaattcatgagaaaactttgttttcttgatccttagaaaataaacttagatgttattaagtgttctctgagaggatgcaggagaaaaggacattttgtcagctatatcttagaatagaaatgcaaatttcagttttggcattgttgacttcataaagcagtgttttgagggctcaggattcaggaaatacaaacagacatggcagagcagtttgctttgggttggcagaaagcaggaaaataaccagccttcttggattgcccacagtttttgtagactcctcagttctgagtggagcagaggggcatgcttaataaaacagtcaataaagaggcttttctttaaagatttctgcaactccgtcagaattctaagttttccccatagtttctcatgtcccctgccattttctttcaggttttacttgggccatttgctggttttgatatagatgaggagataatgaaatagatttactagagatcatctttaacaatcacctttgattatgcataacattttaaactaattgaagagtatccttttggtttgggggtaagtgctcattgaagttcatggctataaccattgcaggataatctcactgacatttggaatcctgttagtaacagagcatagctctttagattaagagctctgtattaacgagctactcattgaggctgttccaggata

SEQ ID NO: 32444 - DNA, 1053 bp, Homo sapiens
gatatacctaattaatatttacccaatccaagtcttgccctctacaaacctaacacatgtatagcatattccaaactctatgttatatacttaacaatattacctgcaaaaaggccagttgtttctcttggtcttctttgctttatattttctttcagaaccctggaaatggtctaagctaagtgttccaacagtttggtcctctgaagaagagcatcagcatcacctgggaacttgtttaaaatgcaggtgctaaggccccaacccagttgtactgcttcagaagcctgaggggaggggcccagcagtctgcattaaccagccttcccggggattctgaagcacactagagtttaagaatcactggtctaaacaaaagtcccaaagtaagaaacaatgttgtttattccatgaaaagtgaattaggaggattgggaaggcttataattgaagattagatgtgaaaggaagactagaatttgaatattgaggggtctttttccactgaagaacttttgagtgaaggatcaaggcagtgtttgagaaggttaatacctaacccaaatcttcacagactgagtagtcagtcaacatttgttgagtcgatgtgctttgatcagtccagatacattggagaggaaacagcttagaggcaggagatcagctgaatgggagaggaagttactagttatctgtctctttacacagtatatgtttacatgtatggcctcttcacataggatatttcatttaatccccaaaacagtactttctaaagctcagaggagctgagtaacttgctgaagctcttagagctaatgcatggtgaagttagttttgaaattcaggtctgtctgcctccaacgctgactccattgcttcttacaatgatgtaggcaggaattgggatatagttggtgacaacaaaaatgtgtcaaatatcaaaagccatctcaaagtaagaataaccaaaatttgattgagtctggtgaggagaaggggaaagtgaggtgacttcaaagtaacccactggaatgactgggcatgagttgg

SEQ ID NO: 32445 - DNA, 1025 bp, Homo sapiens
ctcgaagtacttcataatgaggagaataatacagtatttgtctttttgtgactggcttattctatttaggataatgtctttcaggtttatccgtgttgtagcatgtgtcagaattttcttcctttttaaggcaaataatattccattatatgtacatgccacattttgtttacacatttatttgtcaatgggcagctggattgcttcccattttttggctattgtgaatagtactgtgatgaacatgagtgtacaaatatctctttatgtctctgcttccatttcttttggatatgtgcccagaattgggatatatggctggaccatatggcttagaagtggtgaataacactgcagttagcttgttgcctttctccatctctagatccaatggggaagaagaggagagcctagaacatgagggtgagaaggaataagttctctccattctagggagagcacagctcacagccatggggaaggtgggtagtgagtgttccagaagactttatgtccctactgagcattagctgctggcctcttcagcataggagaaggacactgggctggctccacaatggagctggcagggatcagagtacatgttctggtatatgaggctgccatgcaagagggcaaccccttgtatgggggtggggctagctgaggggaaatcaaagctctttactgagagaggccaggcaggcagccacaggccagcacacacgtgcacatcatctattcatcgtttcatttgcgtcactgattagatggccaccacattatacatgtccgtggggcattacttacatagaatagaaagtgaatagcccctcctggattgtgcataatggcagccatgccaattgtactattctaattcaaatgtaaattgtaacaattatgccccaatacaaatttctgcactataaaagaattgaatcatcttgctgcatattaaggccttcaaacttctcttaggggacagtctggtcattgagaaagtcctgttacaagattatgtt

SEQ ID NO: 32446 - DNA, 1068 bp, Homo sapiens
ggcgagagccacagtgcctggctatctttttttttttttttttttttttactttgtctagtgtatctttggatacagatgttttaaatcttaatatagtaatttttttaatcaatctacttatttatggtttgtgcactatgtgtatgtgtgtgtgtcttgcttaagaaatccattcctattttgaggtcataaagatattttttggtccaaccattccactactgggaaatgaaattagtaatcagtatgcagaagagacatctgcagtcctatgttcactgcagtattattcacaattgccaagacacggaatcaacctaagtgtccataaacagatgagtggctaaagaaaatgtggtatatgtacacaatgaaatactattcagccttaaaaaagaaggaaaccctattatgtgcaacaacatggataaacttggaagacaatatgttaagtgaaataagaggcacagaaagaaaataccacatgacatcacttatatgcagagtataaaaaagttaaactcatagaaacagaatagaatgatggttaccagggtctgtggttgtgggctggggtacagtttggggagatgttggtcacaggatacaaaatttcagtgagatccaaagaacaatttcaagagatctattgtatactatgatgactatagttaataacaatgtgttatattcttgaaaattgctaagagtaaattttaagtgttctcacaacatgaaaaagaaagtatgtgaggcaatgcttaagttaattagctcaatctatcaatctagccattccacaatgtgtgtgtatttcaaaacagcatgttgtatatgataatatatacaatttttgtccatttaaaaagatcattttcagtagtttcctaattagttgtgcccttcacatttgggtttttaacccacttaaaattgaggtatatagtataagatgtatggtataaagataattatcttttaaaatactttagtaatatttgatatgtggaacatacatataagcagtggagtattacaacagaatgaacccacccacccaacttat

SEQ ID NO: 32447 - DNA, 1034 bp, Homo sapiens
tgctgtcccagggtgtgtctggagatatcatctgggacctagggcctggaataggggcctcacaactcttcctggtgccctacctactgtagcttagctggtatccaagttgcaagaccaagtcctctttatttttccccctcctctccttaagcagatgggagaattatctcccagagctgcgagctgtgctgcctggggttgggcaagaggtggcacagacactctcttggccacccaggctggtgtctcactatattgcatgccctccaaaatccactggctctgagcccagtacagcaccaggacttgtctaggaattgcagtccttatggcctagactgcctttcaagtttatttaggatcgcagagcactttaggctatggtggtgaggcttaccagaactcaggttctgactactgggctgaaccattcccctctgactcgggctggtctaaatactctgtctgtgggcactggctgagttgtgcccaaagctgctttctgttgtgacaggcagcactgtgttctgatgcagtctcacagttattgctctgtccttcccccaagtacccagattatctcttcatgccacacagccaccagagtggtgtcagcaattcaagactgtctttcctaccctctgcagtgcctctttcagtgatgtaaagttaaaaccaagtattgtcatcactcacctgatttttgattcttagcaaggtgtttttgtgtgtgtgtagatagttgttaaatttggtgttcctgtggggaggtcaattggtggaggcttctaatcagccatcttgctctgcctcctccctattctagccttgtccctgcctctaaccaccttgcccttcagtagttcaggaagacttattgattgtacaacctaggcatctcttcctctgtatcttctttgttcttcactgtttcatgtaatatgcttttgaacttgatcttctttgccttaaatgacaaacacaaaagaagacagcaatagacaaaagacagacaaaagacctacagacta

SEQ ID NO: 32448 - DNA, 1029 bp, Homo sapiens
catacctgagactgggtaatttataaaggaaagaggtttacttgactcacagttctgcatggctggggaggcctcaggaaacttacaattatggcagaaagggaagcaaacatgtccttcttcacataatggcaggaaggagaagtgcagagcgaaggagggaaatgtcccttatacaacatcagatcttgtgagaactcatacaccatcatgagaacagcatggaggtaacagcccctgtgattcaattacctcctaccaggtctctcccatgacatgtggagattatgggaactacaattcaagttgagatttgggtggggacacagccaaaccatatcactcttcttaaattattttatttttttagtacctcagcaaacccctgctccagctgtggaagaagcagaggaggaagttaagaagaaaatatcagagagcttcttctatgattatatggagcttgcttcgatgccttttgtgactctggattcaaacataccactggatcttctcacacttgtgtatccaccctggctaaatatgtataattttgggattttcatttcttaggtcagaggtcagcaaactatagcccagggagcccaaatgtgccttcccacctgttttggtaaatcaagttttattgcaacacagccacatccatttgcttacattttgtttattatggctgccatcacacaacaaggacagggataagtagttgtgacagagaccatctggctcacaaggcaaaaactatttactaccttccctttataaaaaaatgtgtgccaacccatattaggtaattctaagaagcttgaattcttagagatttgatagaaatgcatgatcttaatttaaactaagcttttgtttgatgccaaataaccatacagagaaatattttttctggctgtcctttgcacaagtggaaaggctgcagttcatgagatctgagtgaaggaaatcagaaggcttcttcttcccatttacttttgtcagtgcctgtcaagttacataatc

SEQ ID NO: 32449 - DNA, 1030 bp, Homo sapiens
ggattctcatgtagaatgaataaaagtccttgtattccacccaagcagagaagttggagtagactttttcccatacttaacaagaggtttctgctatctctgagttctattaagaaatttaggtcgagtgtaccagctaaaccatccatcatttctcacgatggtgaaggactgttagttactaaggcattgatttcttatgcttatcaaaggactaaattattgcagaccttatttaataattttgggaggtattttgttcttttctattttcaaaaatattttgtgtagaattggtattatttcttccttaaatgcttggtagaatttaccagtaaagctgtctgggcctggaattttcttgatgagtgggaaaattttaaccatgaattcagttttttaaatagagggctctctatttcttctttactaagttttgcaagttcgtatctttcatgcaatttgcccacttctcttctcaattgtcaaatttgttgacataactttgtaggatctgttttcattcttgatgttgcagatttatgttgtttctcttttatttcttcattggtgtagctaggagcttatcaatgttgttgatcttttcaaagactgattttggctttgctaatttactttgttttttttttttttttcatttatttttccagcttcttgaggtggaactttaggtcattgattttttttgacttttgttcttttcttacatatgtattgaaagctataaatttccttccaaggactgctttagctatatctcaattttaatatgttgtattttaataaattttaatttgaaaacttttctaatttctttgttgatttccctttgacccatgcattatttttattgtgtaatttaatttccaaatattggactttttttcaaggtatcttatcattattggtttctaacttacctctgttgttttcagagaacatatctattctatatgatttcaatccatttaaatgtattaaaactggtcttatgtcccagcaagtgatc

SEQ ID NO: 32450 - DNA, 1024 bp, Homo sapiens
agatcaaagagtgggtgcttatagcccaaattaaatgataggggaaagatattaaatgataggggaatgatagatacccgaattgtccagttctaggagatttgttctttgctacttcttatattctacaaaagctttaaagtaagctaatttatataaattattcttagttcctggaatttagtagcatttaatttactaagaccaaataactgcctttttatcattttaaaaatttatgcctatgatagctataaaacactggacttaaaaaaattatgactcctaaatcagtaagaggatctgttgaccaagtaatcagttatttggtagtatctctgttagagaattaacattgccaataacaatttaatttccagtaccattcaatggcacaggatgactttgttttatgcacttggtctaaatgatctgtaaatcttgagtagtctcatgtttctaattaccatctaaattttttccgtgtctttgttcaacagattgagaaacagaatgaagaaggctggtttgctctttctacccatgtatcataagtgaagtcaagtctcactgagtttgttcttaataatttattacttccctttccctgctctgacttttaagtttttatatccttctttcagataaaacctacaaagatcctgtgaattagtactaatgaaacagagaaataaagcaattattttttgactttctcaaataagttttcaacaaccaactgacctacagctccctgtgaatgaaactttgactgtagagaagttaaagttttgtattttaatactttcttaagtattttaagggttttttttattaatacatttttacctttatctttattcagggttttttgaggtttagtatatcttagttgatccatttatttatttattttcctgaagaactaatttgctttgcatgtaacttacaataaaattcctctgtgtgattagagtctggctttcaggaatatgtaacacccacttttctttcttttttcttg

SEQ ID NO: 32451 - DNA, 1045 bp, Homo sapiens
ggctggagaggctttaaaatcatggtgggaggcgaaggaaacttctaacatggtggcagcaagagaaaatgaggaagaagcaaaagcagaaacccctgataaacccatcaggtctcatgagacttatttactatcacgagaatagcatgggaaagaccggcccccatgattcagttacctccccatgagtccctcccacaacatgggcgaattctgggagatacaattcaagttgagattttggtggggacacagccaaaccatatcactattaatgaacaaataaagacttacaggttggtgaaaataagttacaaataatttacctcgttggacctaagttagccatatgttttcaagctcttgccagtattgagaattgtcagttgtttgcataatcttttaaggttaataatgatagctcactctcttactctgttttatttttcatgaatagatcttccggggctactggtaattcttgttctccactaaatgccacctcaggaagtgggagattcacacctcttaatccaagagcaaaggtacacgttaaaatgtaattgtgaaatgcatataggggtgagggtagaaggtggctgatttagtgatttccattcttaattatcattcctgttatcctaaagctggtatgatattcttaaaagaaaagaaatactaatttacctttttaggaaaaacaagccatatacttcttctgttttctagggtaactaaggaataaggtaaaattcaataggatattcaacagtccttaaagactggaaattactggtttcaggtagagcttcccatatatttacggcaggacacacaggtgtgccttgaatgggttgtagatctactgagctattggttcccccagtccttgtgcttgggtggggtctgggacagccagagcactgggtccagtcacttttcctctcattttatccctgtgtgccatatctgactgtgccattggttagataggttatggtaccagggaaaaataaatgtcttaatgtgttcttcatgtattttg

SEQ ID NO: 32452 - DNA, 1465 bp, Homo sapiens
tgacctaaagaggtgtgttgtgatttaattttttcccgttcctttttcttcagtaaacccaacaatagtctaaccttaaaaattgagttgatgtccttataggtcactacccctaaataaacctgaagcaggtgttttctcttggacatactaaaaaatacctaaaaggaagcttagatgggctgtgacacaaaaaattcaattactgtcatctaatgccagctgttaaaagtgtggccactgagcatttgattttataggaaaaaatagtatttttgagaataacatagctgtgctattgcacatctgttggaggacatcccagatttgcttatactcagtgcctgtgatattgagtttaaggatttgaggcaggggtaattattaaacatattgcttctattcttggaaaaatagaagtgtaaaatgttaataatacaaatgtcactgtgacctcctccactgagaggactggtttatgccagatcattttccggcacacacggagtggctttgacagattgataactttgtaagatgggagacatctgaaatattcatgttttccttttgtagtcccatctccactatttagaaatgttctcagactttaaaataatgcacagggcttgagctttctgtcatttgactttaaaaggaagtttcattcatatttatcctcttatgtaaaattgcggtataaagtctcatttccaaatatgttaaatgacaaaattattttataaaatgtttatgcacactttataaccttaagtttttatttgagaatgtgaaagtacaaagtgcagtagacttcaacaatcttgagtgccaagaataatacagaaaaagaagacagttgatgaatgagtttatagggttctaatcttaagatggtaaaaatgtagaaagaccttgctggttttttgggggtattcgtttcttaaacaatccaaatctaagcttagaagaaaagtttagcgttaagcacctttatcttcatgaataagcttcagcttgctcttggcaagagaagagtgcttgagttacagaaggcataagtagtttgaagaatgcagcagcctttttgtaaacttcccagatatcaaaatagactttgatatataaatggttttctgagatgacactgcctctatttctataaccatttcacctggactatctaatcagtcctatgaatgtatccctaaatgtggttattgaaaacctaatagctgcctcatgacaagtacatgttatttaaggaggaaaaaatattaaattttgaattgagtgtgtaggctccctatcattatatatagagtttctttttccacggtagtcagtgacttaacctgaattgtaaatgtttgtaaagggttaattgtcctacatcaaacttagttaaataattccatccacttatggaggaggaggagaatgtggaagaggtaaaaagctgggc

SEQ ID NO: 32453 - DNA, 1041 bp, Homo sapiens
ctttcttttattgattgaatgaaacagcagaaaggaagaaacacttccaaactttctttgaggccaagataaccctgataagaaaacatatcaagaatattacaagggctgggtgcagtggctcacgcctataatcccaacactttgggaggccagggtgggcgagcctatcacttgaggccataatttcaagaccagcctggccaacatggtgaaaccccatctctactaaaaatacaaaaattagttaggagtggtggcacatgcttgtaatgacagctgtttaggaggctgaggcaggaggattgcttgaacccaggatgcggaggttgcaataagctgagattgcaccgctacactccagcctgagcaacagagggagactccgtctcaaaaaaaaaaaaaaagaaaaggaaaaaagtgtatcaagagtaagcctttttgagataccatgtgaacaaagacttggagttaacatatactgcagccaaggatggagaggccatcaattgacaggaaaaactgcaagcaaagcagattttggaacaaagatttgaaattgtttgcagtatgttcactttgaagtgtctgctggagattgcttggatctaggaatgtagagttcaggagtgaactataggctagagacagaaatttggaaattggcagcattaaagccacacaactacaagattgaatgagatcaccaagagaataattatagagaagataaccaaatgcgtccatatacgaggccgtcataaaattggttctttttcagcttccgcatttatacacaagcatacttgatgttttagccatatcaaactgactgattttcggactacatcactgctgttttgttcatgttttattagactgcatctcttgcccttccacaggataagctagtcgttcttcaaaatgtttcccattgtcaccttcattctagtattatttttgtactatatgtacatacactgttagtagcacattgtatatacctgtctttcctaccagatgtaaacacctttgcattcc

SEQ ID NO: 32454 - DNA, 1034 bp, Homo sapiens
ggtaggctgaggcatgagaatcgcttgaacctgggaggcagaggttgcagtaagctgagattgagccactgcactctagcctgagcttctgagggagactgtctcaaaaaccaaacaaacaaaaaacctgtgggtcaaatagttgtgaccacatggctgatttaactcttaggctggcaatttgtgtcttatatacagagtaaaggtcttaaactactgataaattaagatagtctacattgttacatcatattacattcttaacagaagtaagcaaacaattcatgatccgttgtgatcatataggatagtttttccaatgacccgttctctatgcccatccttagcccttgtttccctcagcagatttctcagatttaggaatttacgcacatgccgtgggaaatttaatttagatgggtgttaaatttggatgatgatttacataacaagcttaattacaaaagtaaagctgccaaggtggaatttgagaatctgaatttttaactggcaagatgattctggtatataaccaggtttgggatccattctttgattttgtaacactactcactctccaggttttttcctcccttctcttgaacattgtttcttggacatctttgtaggttcctgttcttttacgtctaaaattcaagtgtttcttacattcttttctttgaccttcttactacagacatccttggtagtctcatatagtcccataatcaaaggttatatgctatgaattagttatgtttcaggaaatagctgtcaaagcaatgtgttataaaagagaattctttcatttaaaaagtccaagtgcatttccctttactacctagtttttatttaacattagcattgcttcagtctcattgggtaacatttagactgcattatataaatcatttttaaaattgcccattcataccttaaaagcgtttgacactagttttgatggaaaaaaaaactatcagaacatgtatttataggtgtttattccaaaagcaaagatgataacagactgtctg

SEQ ID NO: 32455 - DNA, 1035 bp, Homo sapiens
tacttcttttggataatttcctaagaatgaattttctggatcaaaaggtactgacatttttaaagctctggtgtttcttgccagttgacctccaaaaagatagtagcaatttattctgtcagcaatgtatgagaatgtccttctctttccaagggctaacgaaagggaagggcacgtggaaaaacctcaggaaaacatattgtggctgacatttcagccatgaatggtataaattttctttgcgatgcgttcaatacatttaaatacattaaaatgatagaaataactaatagcttccttacaagttgtctttgagtaaatattcacattttgctttaactctacttttactttgctgattaggtgataaacggcatttccttttttaaagatttgatgattatttagtgaagtttggacatataccatttttactggtcattttgtgacgtaagttgtttataacttacccagttattaattgggatgatgattgccttaacttcaaattgtaaaacaaagatgatattctttagagagtaggggtgagacattagggcccaggtcatttgaaataaaaatttttagaggtgaaacttggtaaacaaggataagcaaggaaaatattttgtacttaggagcacttcaaacacttctttttccagaaaattagggtatatttaaaggtatgtttgggttcccctgcttctagtgtatataatttgttacttattttaaaggaaacttactataatgcaaaaagcattgaactaaaagcaaccaagttttagttttatgtaccacaaatgatagctagcagtagggtcactaataaaggtgtttcaacctctgggccttggttgtcttttaagggaatggcttgaatctgaataggaatggccaaagattctagcttgtgtgccagttctattttgtaggtatctggggaagcagaattaacagagattaaaataggacataaagaatacatagaaaactaaatttctctattggatgaacggtgggctcttcata

SEQ ID NO: 32456 - DNA, 1020 bp, Homo sapiens
acaaatgaactaactcccagatgagatgaaactttttaattttttttgcttctaagtctgtatttaagacactcaacaaatgagttgtgtgaatcttacttgtgcttgttcggatactgaacctacaacagtataggtttaaaataagttaagcgccttgagttccaaaacttgtaccacagtgcacagtgtggtcgattttaaagtcctgactcttaatttggaatggcctgtaaaaacgaaacagtggtcctggttatgtggcttttgtatgaaattttatttgctaagtattctattgtatattgaggtaagtaaacagtaaattgaaatatctaaaattggaaactgcggaagtcccaacacgaagccagtcaaatatttaaaattgtacactgttgcctatgttgcctatcatattgaaacttaaaacttagctggtttttcttcatatttttaccatgagtatttttattagtagtagcagtaggactttccattgtattggcatgtctttcctccatagaagataaatttccggttattaactactgaatgtaatttatatgcacatgtagaagtttgagatatactaggaaatgttgcttacttttgaggttggctgtttttatgaaccagggacattgtagtttgaatttgtgggtgatatttttatctgttcttctctagggaaggcgatttcaagcaagaaggtatgccacagataaccatgactgaggtggcaatgtaattaggcagtgtaatggaaagtataataaaaccaaatcatttagccttcaattgtagtaaagaggtgcaaattagttctaataaaaaatgtctttaacaaaatgtgaatacgtgactaagatgggaaagtaggtagcagtaatataaatatggaacaatgttgactactaattggaatagtaaagggagccattttaccaaataaaattaaaatgtaagattctgcagtcagaaacaaaactttaaaaactccgaacagtggttacctct

SEQ ID NO: 32457 - DNA, 1050 bp, Homo sapiens
gaaatgtacgacaaatatagaaaagtgcttaaatcatacaaatacagcttaacgaatgactgtaaagtggacaccctttgttaccaccactgaggtcaaaacgttgaacattgctgtcgcacaggctccttcccaagtctctcttaaactactctcctgacatttacaatgaacatttgcttttctttttacttttctcctaagtatgcagccttcaatgctatagtttttcctggtttggaactttatatacatggaatcatactatatgccatattaatatttaaaatacagttatgttttatttaatccagttgtctttgagaaataaggtattctgtataagtaagttttatatttgttttctaattttaagcatttggacagaatgttcttaatttcattatgcacttccctttaagagtggtgatttggtgtcattatgagcatcagttagtgtgccgggtgtattcagtgatgcctccagcttttttgaggtatgaagactgttgtgtgggtgtataaaaatgccccttttctcaacattactctgttgcccgggctgaagtgcagtggcatgatactgcaacctctgcctcctgggttcacgcaattctcatgcctcagcccgccaagtagctaggattacaggcacacaccacgacacccggctaatttttgtctttttagtagaaacagggtttcaccatgttgactggtgctgttttctttttatttgcatgtttgtgcatgggtgtttatttctgttccttgtaatagtgttcctatcttattgccatgagggtgcctacctccaccaaaacctgtttgtccttgtttaattcacagatactggaaatcagtggagtgggaaaacagataagcaagttgattatagttttgtttaaattaaaacaaataagcaataagtgagggcattcagaggacctccctttggataaatgatttagctttagagtttgaagtttaggactcaatatctatgtgaccctgaacaaataacctttcaaagcctccctgttcctctct

SEQ ID NO: 32458 - DNA, 1047 bp, Homo sapiens
tttggttggatttttctgttaaagaataaaataataatgatccaaagaaatcatcattaaagttatgcttgtggcacagcaccttccaaaagtccacctcaaactaaaccaaggaaatgtagggatactatatatggaaaagaagcctggagtttttctctgacagaatgacgaaaactgtagttaaatatctcatttatataccatgattcctttccaaagatcttagttttatcaagactgcctacacaccactgaggcaaaaccatttctgagctgacacatagcaaccatcctctcagcaatgttttcttatgttaggggagggaaataaaggaaaagcctctttagaaataaaacgacagaaaaagagaaatgccagcacacataggaagattactgggattcatataactctcccctctaggtttattgccaagggcaatgtgtggtatatgtcttgggaggggtttaaagcattattatattttactttatgtagctaactctgtaggaattttccatctaaaatgttaccagttttggtaaagaaattgtttgttatgttctttctttcctgaccctgtaagtaacccagatgtcccattctcacagaggtgacagtgagggccaatttacctaaatattgtgctagtgttttgcatttcaaagttccatgaagtcttttttattacagaggtccctatttttaaatgtattttttttgtctttcaaaaaaagtactgattacattttgatttttaaaaattgaaaaaagagactttggcacaaatgaagcccattccctaaaattgtatagagtagaatatttcccccctaaacactagacatttcagatgaatattataaggatcttgagagccatgtgggtgaggaatgaaagacatcacgtcattgtcttactatcacagtatcctggaggtgaatcaagcatttgtctgatatattctgaagtaagctatgttcttggcatagtttgtgtttatgtgtgtggccaaggatgaagggtgggcaggtaacagggat

SEQ ID NO: 32459 - DNA, 1130 bp, Homo sapiens
aaataatatgggaaaataggtctctaccaagtgacttcataaggagtgaatgatattttcttgactctaactctaatgagatcatgttttcttctggctcatgtctttgcctgtatgttctgttttctacatctttttcaaattacccttcacttttcagctttattcctctgcttctgtctgacttaaagctaatgtatgaaacgcacaagaatttggatggaaaagcccatggcaagttttggcagaggttccaccagtctttccataaagggcaggaggaaaagtcattttcagaataggtcaggtgacaatataaatatcggaaagtacagcttttctgaataaagttttcatgtattcattcctttaacaaatatttattggacacctgttgagtgccaagcactgttcttggtgccaggttctccttgagaagaagataagaattcctgccaacattctacctgagggagacaataagtgattaaatatacgataagatggtaagtactatagagacaatcagagcagaggacggggagaaggagagctggaggagagtgtttacagtttcatatagggtagtcaaagaaggccttactgggaaggtgacatttgagcaaaggcttcaggaggtgagggaaggatgcctatgcgtatctgtaggagagcagttcaggcagaggataagcaagtacaaaggccctaagctgggaacacactgagcatatttgaggaggaacaagcaaggaggtccgtgaggctgaagtagaacgagcaaagggaagattagcgagagtcttggaaagctcacaaagggctgcgtggcaggacctggaagcgcattataaggactttgacattaattctgattgagatcaggagccactgaaggcttttgagtggagttgtgacacacattatgtggctttcattttaaaggagtcattcactgctgtggtgagaggctattccagaaaacctgtcaggaaattgttgtgctttggaccaacatggtagcaatggaggtgatggaaaggggtcagattctgtatatattttaaaaatagagtcaacagatgtcctgatcaattatatgtggggtgagaaagagagagatagattgg

SEQ ID NO: 32460 - DNA, 1033 bp, Homo sapiens
atcttagcagggttggcgagaatctgtggaatctctgtcaactcttgatcaggcctaggaaccaccatgctgataggatctgttttcttactgtaaagaagctgagttagtacagcaattaagaacatttaagaaaaagtttacccaatcttgtttctgactgagctctcagtaagagttttaacagtgaagaagccaattgatatgatgtagaagtctttgccttggcctcctccacaaagccccttgcttgtgcacattttagtgtggcagagggcagtaggatgtgctcctttcaaaaacacatagccttgtccatattggaattacttttcagcctgattatgcttctccatccctgggtgaaacctagatcaggctaaccaaagaggaaggctatgcatgtggtaaagtcctttaagatgacagatagggaacagtgcaataaacactgaaaaccagtgaagtgaaaggtttattttgaaacaagctaggccaacttggacattggaggatggattagaacatactagctgctccatcatagactatccttactaagcagaagaccttaatagtgcctaaaagtttagttttgaaattggttttttcctaacttttctttgttaaatttatttttattatcttttttaatcttagaagtaatcagagtttgacagctctttagtaactgttaataaaagaatctttcatcacaggataagcaatagattgtgtgggaaataataacacaagagtaaagatgctgaaggactcttctggaactcaaagtgacagttttgaaggttctggcacagtaggaaaggatcacaacccatataaatggctaatgttgaatttctctgaacactgtcacatatggggcatcaatttggaaaattctcaattgaggccccttccctaagattacaacattgataacctgtctttttctctctcttctttactatccgtccaagtctactattccaagtttaaatattgttcagaaagttgtcagccttgttagtca

SEQ ID NO: 32461 - DNA, 1029 bp, Homo sapiens
tggatctggccaggagtcacaggatatacacccattctggagctttcctctgttgttctagaagatgttatttgattagttggggctgggagcaggggatatatgattttgtggaaaaggtatcagataatcaaatcaggtctgcctctgctatagccagtgtgctgctgcattaaaagggaacaaaaggaaggtgcaacgtaagagcagacacaacctgagatgcccttgagatttaggagaacaggagggcgccctttctgttgtgacctgactcttaaaagaaatcttctaaaagaattctttaatttggtaatgagttgaagtccagggtaatggaagctctagggcagagaacaaaagaattgcaaaatgtattcagcaccaaacaatgctaaaccaagaaacatccaatcacaaaactaggaagtttggcaagaagtggttagagaaatctctgggcttttccatgggcagggtcgacagactctcttttcagtgatttctggctctgagaaacctctttactcactagaaaagaactttatttaaatggccaattttgttcctcagaaaaagaaattaaaaaaaaagaaaaataggatactgaagacagaaccatgtgacttggtgacaaacaaaaggaggggtgcactagaatttcaataggctccctaattccatagaaaaagcaaagcaacccaatgcctcctgagcctgcagtgcatgaagagagtgcttgagctgacccagccaccaggccttctggggctagacataacttcccactggaacagcagcagcctctttcccctctttgtgttttcatgaagaaaacggctgttctcttaggtagccaggaaatagattacatggggcaaactttcaaaagcaatctctaccctggtgctcaggctacatacagaggcagaaaaggggcacggaagagcccttgctcttgagagagagtattttcatattcccaagggctttccgtgtagagttgctatttctgatatcacttaaacc

SEQ ID NO: 32462 - DNA, 1030 bp, Homo sapiens
caggttcccacagcaacagaaactgtccccttgagtgctggcatcacagcagattctttcattccctgattacacaacactgggtgtggggacattgtttttatccacgtatgtggaaaggagcacagcttttatcctttgatttttttcctgtaactacagttgaggatatgggtctttagcttccctcccaaaaccatctatacgtattatcctggaacggaagactattatagctctacatgtgcacacggacagaattaaagttgctgtgggaacattaactctgatttccggacttccgtgccagtcacatttaaaccataatgttgtaatttttggcatgtaataaatgtgcatttcatgtacacagacagaaagaagcataaaatgtattttaaagagcaattaattactaactttgtgattaaaaaacatttggtgcatgttccttcccatttagcatcagctgctggtcttagccaggcctaatagatgacatactgtgtctcatcctgtaactcagatgtacttactgtatgttcctgttcttccagataattaattcccttagtaaagctgtagggggaaaacaaaatggaaggaatatgcaagcatgtaaatagggtaagggatatttcgaaggaaattattcatttctgtgaataaaccttttagtccctgataacgagccagaaatctgctaagtgggtgtagacaaaggtttctggccatcttagagcatctggttcggggccattagaacaacttgaaagcagatttccccttgaattgcaggcatgcccactgggggagtgattttactctgtaaaaacttataggcttaaggcttaaaaagttattttactctataacaactttttagtctatgctgtattcaaactggaaagtaaaagttatagggaatcaggtaagatgagggctttgctaaagaacccctgacttaaagagtaattttttttcttcctttacatttaaatctggtttacccatttgtgttagagaaggc

SEQ ID NO: 32463 - DNA, 1025 bp, Homo sapiens
cttccatggagagtgaagtcatcgcttcaacttagcataataagaaagggagaaagcatactgttggtgaaatgagggagtttctgctaggctatgaccagattcttctgtttctgctattttttctctaactgaaaagagttattgtggtaattcacctgcacttctgaacctgtgtgcatacacccaagacctactcaaggtaaagccagaaagagattaagagcagactttcatccaggggactcagcttctttttagtgacttctgcttgttttgttgttgtttttaaataaatttgtgtttttagaaaatatgtttgaattcccagacattgatatcctgggcatccttaggttgtgacagaaacacggattagtgactgtgacaaatgtcgcagaagccagtgcagttgcaatctatcaaatatgttggcagaccccaggattttctgatccttgttgcagaattcagttgtgtccttaccgtaggaagacagggttaactgagagttttgagagttgtggtatgtgcttttccatttgggtctgggtagctctgggactggaataccttggtaaaaacaataactaaaactagggccagcttcatgggtatacaacctgtgcagttgcacaaggtcccatgtttggacgggccctatgcctggcttgatgtgcttctgttgctgtcctgaaattcttaataattttttaataaggagccctactttttttatttttccttgagccccacaaattatagagctggtcttgcctagaatttatctttccctagcataccaattgaaagtatcagtcattttttctcttactgaaaatgatacctttttcaattcctcaaaagttaattcctccattaaactctttgaagatttctgtccacataatgtggttcagaagaactcatctctccttctttcctccaagcaccttgagatgattatgatcaaggtgatcttgttttgtaatcagaaactctatagctgtctcagccaagttttg

SEQ ID NO: 32464 - DNA, 1020 bp, Homo sapiens
ttgttggtatgtaatacacacaagggttgtcattaaatgagtcattaaactaataattttctgaagctctgaactgaaatttagggtgagaaagaactagacgcactggggggattttagaaagatagattatgatatggtttggctgtgtcctcacccaaatctcatcttgaattgtagttcccataatcttcatgtgtcgtgggagggacctggtgagaagtaattgaatcatggaagcagttactcccatgattttctcgtgatggtgagtgagttctcatgagatctgatggttttataaggggcttttccccctttgctcagcactcattctctctcctgttgcccggtgaagaggtgccttctgctatgattgtaagtttcctgaggcttccccagccatgcgaaactgagtcatataaacttcttttctttataaattacccagtcttgggtatttcttcatagcagcatgagaacagactaatatggattaagattcagcataaggaagaacagaacagaaagaagtatcctacagtggagagttccgtgccctggtggtatgcagcagagactgaatgatcactgtgagcaccagattaagacccagaccatgggttgtttaatgttctttaccatatttttgccctgggatcttaggattcttcaggcatggggatttttcagtagctattaagaattctgtgtttgggagacatcaagaagttaaaaaaaattggaaatactataagaaaaaattttacataagctaaaaccactcttgtgacccactctgagcatacactaaaagagaccagggaatataatgcagatctcactgagtttattatttgccacccatcaaggaaaggagccattccacacataatgttcaggagacattcctcactcaggtttccactggttggacacatattcattttaagactgagtaactgcaaatgcttgcttaccagcttgatttgcatagctctgagttacatacgaatggga

SEQ ID NO: 32465 - DNA, 1192 bp, Homo sapiens
aattgcactttttacccatgcaaatgcaactgcttttagtttgggatcctctagggtgcctctatttcttagctacaatctgaatatatttgcaaggtattttggttccaacattgttttatcagtatttctgtggaagaatgagaggtagagttttccactctgccatcttgctgacttcacccctattatttgttaagacattaattttacttgaaaaaaatatgccatttggactggctgatagacaaagtattaagatatgcacccctcagtaacttggcatttctaacatgcctatgggtctatagctatttaattatgtttacttgttactttaggcttcagccttcttgattaggttaggatacatcggattatttgagctgaatagtgcttcttattttgacagaagaatgtctattttgttttaattcagtgatatattttcagtggcagatctttaaaataactcttctaaaacttgtaatatttttagtattggacttagttaagttacttatctgggcctcagttgtatcatctgcaaaatgaggcaacaggatttaacatggtctctagttaattcgagctctaaaattgtgcgatctcatttgtcatttcaattcaacatatgttaacgaatggaatacttacataatgtaaatcaatgaggtagaacttgggtggatacagagatgaatgtgattccttcatgcaaatagcttataatttgatgccttcaaaactgagatgtgtattccccaacacatcctagttccttatgtttgacatgtcatttataaataagggtatattatttatttttgaagtggaagaaatttattcctttgttactatttttcatctctagatttggagaaacaaaaatgtggcctaaactatcattttaataatattgtgcatttgtatttcctcttcattgcaaagcatttacaagattctggaatcattttcttatccatccctaaagtagcccagtgcaagtagaaaaggacagttattccccttttagtgattagaaaactggaccctgatttttctggagttatataatatgccactgaatgagaacaggtaaaaatccaggaactctcatttcaagactgcccagccaggttcctttgtatgttacagtttcttttagtaagttctgcagagcctgattcct

SEQ ID NO: 32466 - DNA, 1065 bp, Homo sapiens
aacctcaggcatagatgggttaaggggcacgattacagtgtaggaaggaaattttgatgcagcttttaaaaagtagagaacttttcattttacgcttttacacatttcatatgtaatctagaatatcaccaaagcttttattgccttctatctatttttaaaataatcttgtccagcccatatctgtttttagtatttgcatctcacaggaaaaggaactggtggtatgactctttgcaaagcattgttctgtggaatttcaacccatagaaacgagacaccacgttctctgtagtctgtcctatctctaaagggaacctcatggacagttttaaaacagaaagtgaacagtttatcacacattctagttactctaaaacctcttttaatgtacctcctggttctttgcaagtgaaaagaaaaatgcttcctctcttatttaagaagtcttcagcaacttaccaatccctagcatgtgcaaaatcacaagactatataggatcactgttcttagattctgaatttggaattcctgataactgaaccatgattttcaaataaaaagaagggttttgaagtctatcaccacttactagaagtttttattggcaaagaaagatcacacttctttctgtctgcatacaaaaagaaatagctaatctcctttgttgccaggtgaattaactgtattcagaggaaataggcaaacttgtagaagaaagtctaacagattttttagaattctttcatgatatgatagaaatattatggtttatatcaggtgaaccactgttaacttgtaaaatttctactgaggcaaggaaatcaaatcatttcttgattgtagaaagtgtattataacactggtgctgttggatgccaactctagatagcactactaccgctactaagaactatacagtcttttggcttctcacagggaaatagacaaagggaaaagggaaataagtcaggaaaaacggatgagaaaggagatagattagagacttggatgtacagccatgatagataacccccagcgaaaatcagagaatgcaagggaca

SEQ ID NO: 32467 - DNA, 1081 bp, Homo sapiens
acaaaggaacctttcttgcccgattgttagaaagtgttttgaatgatgcataactaagtagagtaactaaacaattgcttttgagcatctggagcttgcccattaagatttctatagccctttattttcctttctgtggtttaagaagtgattcacattcaatatatgaaagttctgggttcagccccttgagcttttggtagaagaatcttcatgaatctaataaataaataaaacaaataatgtaagagctgaagacggttgagctcatgtgagtttatataccaaagcattttcttcctgggaagaaaaggtatcttctatatattttggtttcctaaatttagatctagaaatacaccattgttttgttagagtgtattcttagggtgtgtatgtggggaggcagattgtaagcaaccgattcaaaatttacctggaacttcatagaataatgtcaatgctttttaggtagaaaaatcattacctacaaataggggatacattatgaacgtatttcaactaagcaaaagcatagtcaagtgccttcataatgctaaattttagatgttgcactgatgagatattttccctacaaataaaagaccaaagtgtacaaaacctcaggacatgtggctgagttagaattacaatgcagctgtcatttttgcatttcctggctttcatgaatcattactagtgatcctctgtcatttaaatcagttgagaacatggatttatcttaattttcaccctttgtttccctttttcgtgataacagtttgagatatgatgatgtaaagtgtttctacttataatggtttcagccttgtcccttggcagcctaaatcttctggctaattcactgatcagttaaatagtcgaggttattattattataataattattttacatttatatagcactttcctccaaggggctcaaggcattttacacacagtaaattaccaaataggaattaatccttatatcaccctgtggggtaggtacagtcacataaatgaaattctacggaagtactgcctgtgtcacagtgctgagctctaccccaacccccag

SEQ ID NO: 32468 - DNA, 1027 bp, Homo sapiens
ccacagttctttctagcttatgtattatatatttcacccaagtgaaccatcaatgcctcatcattctaatagctgtaataacaataattattattaatgatagcatttgcttcttggtgtatgtacgcgtacacctttttctcttgcttcaggtttccttatgcttggcctctttggctcttggtgctagttcagttgttgttacatttgtgacctcacgtatcctcaagctataagacatttcttagaacgaactagtacgatacaccttccacctcctttcccccagttaagctcagaattgtggttagatgattctgcttacatgaggcagggaatccttggcagatacccccaccaaccaagattttcattttagacctaaggataccaatacatgtcacaaaagcaagataagtggtttgttcagatcatcagatccctgtttaatgaagctgacatattttctgaataaactttattggatgcataacacaggatcatgcacaactgctataggatgggatttatgacattaccgtaatgagagaactttggtgattctgctctacctagagtggtgaaggaaggataaaaaccccactcaagacaaaaatattcaagaaaatggttctgtagtcagctcattcctttcatggtggaagtgttaacgaaagaaatcttcacttatttttctcctcttacctagagaatactttcttcttacctagagtctgtgatatgaagaatatgctctgtagatggtcttatcttatgtggattggtccatgggacactatgctaggctccatagagaactggttatgtatgttctgtcctcctctatgaaaacattcctaaccgtactgttgatgtatacatttcggtcaaaagtaatttgctttctgggtatttgatggccactctgtgaatcaacctaatgtatttgtggtatggaaatctgtaacctctcaatactaagtttaaagactcttataattaattattgaaaggcactttagccctt

SEQ ID NO: 32469 - DNA, 1014 bp, Homo sapiens
taatattaagcagcacaaaaagcctaacatgaaatgatatcacttaaaaagattttatcaaaataaaaattgggcaatgatatagtgcttattgtacaattcaattgttattttaaatgataaatatatttaccatatctagtatatttatatcaaatttgatgaaaagatattttaatcatagcaaataaagaagttatttagagaatagtagcataaaaggaaagctcaattttaaagtctcacattaaattatcatattgacctagtggctatattcactgtaagatcatactcttgcatattgttatttttcaaatacccattactagaaaaaaagcaagaacacttaattagcagaaagggtgatgtttttcttttcatgatgattttggaagtttatacagttcatagtaaaatgggaatgaatgtgggatatttttcctacatagagatttgaaacaatatacatttaatactggtttataaataactaaatgtaggtttccagcagagtagagtgatttcacctcaaaaagggaagatgatcagggctttgatgaaaatatttctacccatgtcttcctaaaacagccttcctaaggaggctaggcttttggtaatttaaatgttttatttctgataaaatttcatttgtttcatgaaatgtattaaattccatttggaaacaaaaattctgaaaaaaatttccacattttgaataatctcatagaagttatccgtgtagattctgaagaaaattcttcatttgctattcccatgaatagcagttttggttctgtttagttgtattttcattttaacactctagagagcttctttgacttgtgttaagcttgcttgttccatttcagttgggtttgttcatgctgtcttgatagtttattctatcaggcatgatgttactttaccgtctcaatcccttggcagtatttttgtttttagtttttaactgaatttaatgctcttgaaaatagagaggtgggtccatat

SEQ ID NO: 32470 - DNA, 1026 bp, Homo sapiens
aatctctaaagagtattgctaaaatgaccaaattatttaggcttaatagattttgtagcatggataccagacctactcacagagcaacagtcctggctgaatatattttatctgggttttactgcatgtggtgatttggctgccatgtattgagtgacctctctgtgccaagcattttacatttaattcttaaaacaattttgtgagatgggtaccattatcttcatttaataggtaagaaaatcttgacctagagaggctaaatgacttgttaaaaggtggaaatgggatacaaaccaaagtttctaagactaacgttcatcctttctccatttccacatgcttgtgcctggttatatatttacattattggtaatgggaaagaagtttatagtataattcacttggaggcatagccaatttattccttccttccttccttccttccttccttccttccttccttccttccttccttttctttctttctttctttgatggagtcacggactgttgcctgggttggagtgcaatggtgcgatctcggctcactgcaagctccgcctcctgggttcaagtgattctcttgcctctgcctcccaagtagccaggattacaggtatccaccgccacacccagctacttttttgtatttttagtagcgacggggtttcactatgttggccaggctggtctcaaattcctgaccttgtgatccgcccaccttggcctcccaaagttcatggattacaggcttgagccaccgcacccagctgccaatttctttaaaacaaagtgttggtgagattttgctatgttgtcatgttatagaactatgaatccaaggctatagattgactagatctccagtagcaaaaggtacataagtataggcaacatcctttgattttccctttggttttggaggacatgttattgtcagttttgaagaaactacaacttaatatgtgtggcttatgtactaggcattcctgacttctcatcgagtgcctcctgtgacttgtc

SEQ ID NO: 32471 - DNA, 1079 bp, Homo sapiens
agtggatttagttggtttgagtaatgttgcactgttagtatagtattcttgcctgtgaggaagagcacatttgtgaagttccttggtgaggacaatttgcacttgagtagatatacactccctgtgttctttttcctttagtctcgaggtattttactttctctgaggatatgactaaaagaaggaatatcggggaaaatgtatttatagtgttaagaactttcttttttcatagtagtggttcctgtcccaattctttactctatgattttaaactaatgtgtctgttggcctttggactgggatagtatgttggataatatatttgttttctgttgctgttgtaccaaccacaaacttagcagcttatgacaatacaaatttattatttgacagttctgcagatcagaagtttagattggctctaccagtttctctgctgtaggctttacaaggccaaaatcaaggtgtcggctggattcttaactggaggaaactctgaaaaaaaatccactttcatgcttattcagttcctcatggttgtgggactaagatctccatttccttgctatcagctgggaaccatctttagatccttgcatgtgtgctgtccctatatgtcagagccagcagcagcaccttgaatcattattacacttgacatctttcaaatttccccttctaccacacctcttttccaaattccagccaaaaaagttctctgcttttaagatgattagactgggccagcttggataatctaggatactctccctgttttagtgttaacaaccttcattacatttacagagtcgctttttcatgtaacataacattttgccatgtaccacaggttctgggctttaggcagtgggcattttggggtgcaattattttgcctcccacagatgaattctaaaagaatgagtcacctacctccatcatacatttctagagtactctgagtattctagtgcttttgatctagaagtagaagattcagtatgaattctcaccttctaaatgctattagtagatttttttaatatatatgttatgaaacttggtaaagagtattt

SEQ ID NO: 32472 - DNA, 1040 bp, Homo sapiens
aatatatcttttgaattgtttggtctcctcaggagaaaaaaaaatgttttcaacaatcttataatattttgttaaaaatccaattctggttcaatgttttgttctcaaaggaattttgaatgaagaaaaagcttttgtaagagggaggaagcttatctaatctcttcaagactgatgagaagcaatcaggagcttgtgactctttgaaacagtaaatttctagggaattgggcacacgtttctcaggaacaataaagagtgttacacttcaggttggctctaaatgcaccccttcatgtatcccaaaaggcaatttgaaagcaccgttctctgagtcaactggaaaagggaggaagccatgctgagctgagattctttcagggggtcaagagacactgaatacagaatgaagatcactcttctgattactgtcgaattctcagttataaccttttttaataaaatgtcttcaaagatgtaggaaaataaattggctcagacaagagagttactggatattagaagatttagatttttgacaaggtcttctacttgtttgcaaatgtactatcttgaccatataaaatttgcctaacctttgctaaaatttcactgaattgttctttgcttacattacttgatattttaagactttgttagataatcaataagtgatagatgtgtagcattgttactgttgccatggttaccatcagtgttctcttcccttctctaggttagggttggcaggtacagctatgaacctgggttccacatctaaccccacatctgctcatcttcttgtagcactggaaagtgtgaggggcctgactagactctggctgctcagtagttaacctacactcatctcacctgaaaaacttgtcagtgaagttttagtcacaagccttttagaagatagaaaaacagtttgcatggaaagctctcatttttaaataaaaactgattatatcaagctaagtgagactctctaattgatgacataatactgtctacgttatcattgcttaccactagca

SEQ ID NO: 32473 - DNA, 1130 bp, Homo sapiens
atctaaaattcacctaaacaaaaggacctcatcacgtcattatttaggtaagtatagacatgatataaacataaaactaaattctgtttgaacagaaggaaggatataacaaagataagaacagaaatcaatgaaatagataatgaaaataatagagaaaattaatgaaaccaaaacttagttttttgaaaagatcaaccaaaacttagtttttcttttgctagactgatcaaggaaaaaggagagaagatgacagattaccaaaatgaggaatcagagagaaggtatcaccaccaaccccacagaaatgaaaaggattatgaggtatagttatagttaatactatattataaacaaatagtataacctcataatcattctcatttctatggggttggtggtgataccttctctctcattcctgatctcatactatactatgaacaaatattataacctcataatccttttcattgcttgatagttagaaatacaacctgtgactgatcattggttgacctcaattgtcattgcttaacaattagacaattgttagcaactggacaattgttagcaattagctggataaaatggactatcttagaaatgcgcaaattaccaaaactgactcaagaggaaatagaaaatatgaacagactcgtaataaaaagacatacaatttatacaatttatagttaggagaaaatcctagatgtagatgactccactggtgaattctatccaataccagtatttcacaaacttttctagaaatagagcaagaaaggtcatctttcaattatttgtacaatattacactgagagcaaagccagacaaagacatcacaatgaaagaaaactgcagaccagattccctcatgaatatagacaccaaaactcaacaaaatattcacaaaccaaatgtggcaaagtagaaaagcattatacagtgctgaccacagaggatttatcccaggaatgtgagtttcacttaacatccaataattaattaatgcaatatagcatattaatagaataaaagagaaaacacatgaccatttcaatagatgtacagaaacatttgagaaaatccagtatccatttgtgatataatctttcaacaaaaggaa

SEQ ID NO: 32474 - DNA, 1053 bp, Homo sapiens
ggcaaagtacacattctttgtttcaaagtattttgcagacagtctggtctattaagaacaaattctaggactaggtagtagggcttagaagttaccatgacccaaattgattttttcatttctcttaaagttgatggttcattttttgatgaaagtagcaatcatatctataaaaaccaattttgataggcctatcaaatctgaccataaaacagaaagctattttacattctacaaacatattattaaataagctcactgtgagtatacaagtactgtatgcatttttacttatgaaaatctttttaaaactgaagaaattttgaaacttttgtgatgataattaacaattatatgttaaaagccagtatggaagcctattttgtcataacattataacaaggcaacaagttttaactgaacaatggattcctgagcttctaagcaaatgcattttgacgtgttatttttcactatatgcaaatttagaagagactcagtttatcatgacctgtatgatacctcttagaatgttaaaaagaaaaaaaaagatagaaagaggaagggccacagtacacataaatcttgcctgcagcttccactaaagttactctggaaagtaacttaaggaaaagagatgattaattaatttatttaaatttggtgctatttgttaatccacagctatgttctaggcacagatactatggttcaaaaatatataaggcaaatacctgatttggaggagcttattttcagtgggaggtaaaggaggaggaaaaggatatcagaaaaaggaatgagcgatttcagaaaagagcaaagtgctgtggcagaggtaagcatagatttgaggaatcgtgggcagcaaagtaaagaaggctttcctgaagaggtcgcaggtaagtggaggtctaaaagatgaagaggactctgccagggcagagtctagaaatggggaaagttggggaaggtacattttaggcagtaggaacaatgcttggtgcaaagatccataggtgtagggtttcaacagatctataactcgatgag

SEQ ID NO: 32475 - DNA, 1086 bp, Homo sapiens
tatacatcatagaactttgcgaactctctgttaataagaatgagcaagtaaataggttaaaagcaatttgggatttgcttttcttaaaagaaaacatgaaataaaaatgcaaatatccttatgagttaagataacttcttatgatactatagcaaacaccgtgctatgcctcctcaaaaatgtatatgcagtggtttagattgtatatttgggccacgttttactgagtacttgtacacatatgaatgtgttagctttcagttttctttttaaaactatagatattagttggcatacacaaactcagctacctgggtcataaagatattatagaaatgcaaatgttttccttggcagatttctaattttaagtattcctttttttacagacaaataaaaagaagtgttaagaattgcctttgggactctgaaggctgaaggtaatgtccagtggtattttcctgaatgggctttatcttcttgaattgtcttataatatttaaggtcttggatttgctacctcaacttttcttttattttattatttttcttttattgtccttaaacacattaaatatctttttctatgtatacctaaaaataatatgaaattgtaagttaaaaagtagaaattttatactctttctgaatatttcagcttaattaggtgttgctctaactcttgttccttctatttcattatgtattatgtccctctgtcctcctttttttttttttttttaactggtttggaactcatgattttaaactgtgttcttttgttaaacagacatattggcttaaagtcagaatgtcagtaacaatttctcctgaggaagagctttacaattaactataagaaataaaattgtatttgttggggacattgaaactcttcagatgagatttagtggctactgatagtcagaagtccagaatttcaggcaagaagtttacaatagactcgtgtggctgcattgtgtataaagagctcacagggattgaaggaggcttcttagacaagagggggctgtaattacttttcttcttacatgcatggttagattttccagtgagactaacatg

SEQ ID NO: 32476 - DNA, 1032 bp, Homo sapiens
agataagggatttctataactatacaggccaggttttgctatggcaataaacttggctctgtcaggtaaacatggctctaagttactcttgactatttctaaaaagcaacgaaaattaaagagcagttgtcagtgaaaatattcaaaatgatatgttgttggcactgaaggtcaacattgttcgcacattgtgcaatatttagagcaatagctatactgtttaaagaactgtctcccaaggcaactactttgcaaagaataatactcattttggttgcataaattttcattatgtaatagacagttccttttgtttaaaagtatgttttagaatatcaacttgagtctttttatatatgttattaaataactaaattttgtaaataaattatacttttaaaatttttataaataatactttttccatgtggtaaaccatcattccttaatttatcttttttacgtatcctaaattttcaaaatttaggaatttaaaaatggagattgtctgaactattatgtgaatagattcaaatcttttgaacaaatgtctcaactttttcttcaaaactgttaataaagtgtcttaaaggccaaaatgttgctagtattcagaataatttttcaaaatgaagtgattcctaaaattattatgctatggagtaaattaaatatttatcctacctggaatagccactttcaaaatgtctccattcaaatttttttaaattttatttatttttaactaagaagagcattctcagtggaaatgtataaaatattttaacataatatttagtttgacaaatatacaaacatttccattgttacactacacatattttaagtaatgatgacttattttgagtgtgggagagagtagattgtttgaattataaaagtagaatttcttggtagcagaagaaaaaggatcctttttacagaactcagtttatatagcataacacatgcaaatatgttcatttgagaaaatattcatgtttgaacagtgactcaagtttgcattcatta

SEQ ID NO: 32477 - DNA, 1051 bp, Homo sapiens
ttgcagtctttggcacataccaggctctgaataaatgtctgttgaatgaatgacagtgattcaatcagtcagtgagtcattcagcattatataaagccataccacttgaaataaaaaaaattatatatgtaactttgttattatttttaattgacaaatgaaattgtatatatttatggtgagcaaaggatgttttaacatatatatactcagtgtgaaataataaatcaagctacttaacatatctatcatctcacatacttatcatttgtgtgtatgtatatgtgtgtgtatggtgataacatttaaaatctatcctcagcaattttcaggtgtgtagtgcattatttgttaccaactatgtgttttcatgctgtaaaatagatggccataatttatatctcctaactgaaattttgtaccctttgaccaacatgtccccattctccccactacgcaagccccaacctttggttaccactattcaaaaaataacttttgaaaagcaatgtccagtgcataaacttcttcttaaattgggaaaatgaacaactttttaatactttgctaataaaaatcagacacttgtaggttgataactgcagattccaggccacactgtaaaaacatccaccactcagcattattaaatattttaattctgagctttgagaagactaatagaatcatattgtaaaactgctttaaacacctccagtctctgcttgaaatatgttcactaatatttcaagcaacacgtcatctgtgagcaattctgatgttaagaggttcttatttactttgagttgaaacctgtatctagtattctcaacccatcattttattaatagtatatgccttgggaacatacagagtaatctcatttgaagttttcaaacatttgaaacgttttctatcccgattgttttcctaatcgcatagtcaacatgtaatacccttgattctttctaccattccaaatatgttatgattctagtctttcacccttcctcttcccccttcttaggatattattgtgcttctgggtcat

SEQ ID NO: 32478 - DNA, 1053 bp, Homo sapiens
tgatggttttataaggggcttttcccccttttgctcagcacttcttgctgctgccatgtgaagaaggatgtgtttgcctcctcttccatcatgattgtaagtttcctgaggccaccccagctgtgctgaactgtgagtcaattaaattttttcttttataaattacccagtcttgagtatatctttattagcagcatgagaacggactaatatagacatctttaaaatgctgaaagataaaaagagtcaacctagaattctataaaataaagacttttggggacataaaagctgaaagagaaatcatcacccacagacaagcactacaagatgtgttaatggaggttcttcaggaagaaggaaaatgataccaaataagatggaaatttgtaataacacaaagtaaagaggagtaccagaaatggtaaatatatgagtaaatataacacacttttttcttttaaaattttatttaaaaggtaacactttgcagcaaaataattaacaatgtattgtgggttatatagtagtaagatgtttgacataaattacataaataattggagcagggaaatagaagtgtgttgttgaaatggtttgatattatatatgaagtggtatattattatttcaaggtagccttgataagttaaaagttacatattgtaaaccctacaataatcattacaaaataaagagatataacagtaaggccaaaatagagataaaatggaacattgaatactcaactatttcaaaaaaaggcagacaaagagaaaaaaaaataaagaacacatgggacagaaaagaaatacgaagttaaagttaatggatttaaactttcttatatcaataaatgcaatgacaaaaattgcaatcaataattgcaatgacagttgcaatagcagctcatccaccagaggtgttagagaagacagaaggataatgaaaaggggttaactgttttgactctataataattttgaaaattatgtttaagtaattagagtatgtagattatttttattctcaacagaatttatacaagcacat

SEQ ID NO: 32479 - DNA, 1115 bp, Homo sapiens
aatgatggcagtagatttagggagattcataagttatttgaaaaacttcccccatatagtcatgtttaattttcttttctgaggcaagtatttgtgaatagcctactaaatacaaagcaatttactgtccactgtgggatatctttttgaaaaaagagagagtaaaacatggaagctcctttcaagaacttaattgcttagtatagaagctaagaagaaaaatataaatcacataaatgccctgtgatgagtatcttaagaaagaatcctctcagcatggatcccgggaaagccttcctgtagagatggcattttaactgaaatggaattacggatagggtttgcatataaagaaatagggaaaaggtttgcaagtgataacattagctcacattcattgactgtatattgtttcttttattcttcataatcattttgaggtagactatattattatttctacatggacatgataatatgaagtcaaagatgctttaagtataacttgctttataaactagttgggtcaggatttgaacttagacagtttaccatagatctcattctcttaaaaatagaatcaagaagatgggtgttaaaagaggttgtttgagtaatgatacaaagttaagcatggctaaaatataggtatgcccaaaggaagatagtaagtgaccttgtttgatcttgtcgtcttaaatagtattttatatatcagtggtttgggtgagaagataaggaattactatacaattttcaggttattcaaagatgaaacactgaataaattcaattcctgtattttatttcaaaatagtaacaacataaccagataccatataaaagacatggttcttgaaaataagccctgaaatttgtatgacataatagggagaggtatacacttaaaaataatatcttcttctgttgcatagaaaaaattttatgcttggatgtactttcctgatcataatgtacagaagggaaacctaaacagagcacagtgatcacactgagattaggagatagaaattgaaattcagggagatgaggcagtagaatttgcaggtagaataccggaggaagggagatatgcagacaaggaactttggaaa

SEQ ID NO: 32480 - DNA, 1112 bp, Homo sapiens
aatatcaaaatttcagggttcaacttttttttacctcatggttgttgtgaggaccaggtgagatgattaacataaaagacctaataaggtgccgagctcttgataggtgtttgagaaaatgttagttgttttcatttctattatcttgttattaccattgctggtttcttcattcccaactacctcaacccccatatcatctaccccactctctctctcactcttcatatatatatatatatatatatatatacacacacacacacacacatattcttactgataatgttgttctatacttagactaaaatgtatgaaatatgtgccataatggtcattaagaatagacataaaataatcgtctgtaattttccaatattgaagttagctaagagtgaagatcctatgagtgaaacatgtgaaaactttagttacttgtggataaaatttctgaggagttgtgaggatgaagaataatttctcataaagaattttaggcacactttatatatagtttatggtttaccagagttctggcttagcactcagtgtgattattcctccatagcttcatattgctcttttattcattcattcatatcaaaaacaacatagaatatctattagcaataacacgttgttctagatagtgtgagatatacaaataacaagattagttatatgaattgtctctatatttaagaagtctattaggtgattcagatagggaagcaatgaggttatgtgcatggactttggagccagattttctgttttgaattcctgctctgaaactcactagttatttcacttcaggcaagttatttagcctgggtttcagtttccttatctacaaattgaggctaaaagtagtacctattgggttgtcctgaggattaaatgatttggtacaagtgcatcatttagagaaataccgtggtaagctcttttcaagatactaattttagtttcttttgataaatacctaaaagtgagaattctgaattgtataacagttctatttttaattttttgaggaaacttcagactatcttccatagtgcttcaccattttgcattcctaccaacagtgtacaaggattcaaatttct

SEQ ID NO: 32481 - DNA, 1047 bp, Homo sapiens
agactaaaaataattcctacattatagggtaattgttaggctttaaagagttaagaaataaaaagtacttagaacagttcttgacacatagtaagcacttaagcattggctttaataactattattatgatacgctgttcaattccgtccttttaaatttgttatttttagcataggaagaaactgaaactcaggatggttgcatgacttgacgagggtacgcaagctatttgtggcaatgctgggaccagaaccaattttcttttaatttattgtttaatagacttttttttgagtaattttagtttcatagtaaaatcgatggggaggtacagagatttctcatataccccctgccttcacacatgcacagcctccccatcatcaatatcccccaccagagtcatatatttgttacatatgataagccaactttgacatattattattactccaggcccatagtttacattaaggttcactcttggtgttgtgccttctgtgggtctgaacaaatgtatgacatctatctgtcactattgtattatacaaagtagtttcactgccttgaaaatcctgtgttcttcctgttcatccctctctctaccctaaactcttgcaaacaatgagtttttgctgtctccatggttttgccttttcagaatgtcatatagttggaatcatacagtgtatagatacgtacagtggatagaaggcaatcttttcagattggcttcttttgcttagtaatatgcatttaagtttcctacatgtcttttcatggcttgatatctcatttcgttttagcactaaataatatttcactgcctggatgtaccataatttatccattcatctactaatgggcatattaatttcttccaaatattggcaattatgaataaaattactgtaaacatctgtgtgtaggtttttgtgtgggcataagttttcaattcctttgcataaataccaaccactgcaattgctggattgtatatgtgtttagttttgtaagaaactgccaaactgtcttccaaagtggct

SEQ ID NO: 32482 - DNA, 1943 bp, Homo sapiens
tgatgggctttgctttagtctctgaaataatcatatttttctgaaatggatggttaaatttatcatattgttctagacacttggagtgtaataatgaacaagagagaaaattgcctgcccttgtggagcttacattctaatgtcacacacactttgtgcattttagattgttaggggaggagattttttaatgaaactttaaaacctagctgctttcttgtcttaggaactacagtttgaaagagcctacagaagtttgagaaggaggaaggtgtttaccagttggcagtgataggaaagaaagatcttagtttatttcttatttgtaccttttgttattgtcatgaaactttctccatatatttcagttggtaattttaacagatagggatttttttcatgattttaataatgtctttgaaattaataaaacgttgctttatattaaaaaaatcttgtgtcttgaaagttactataaaattcctacatagtattatcccgttagcaaagtatggtaaaacaaaagctagaatatctgttaatttttggttgggatttgtttttaggaacatatctgaaaaatcaagtacctaaatctttttcagttctgggtttctttttcgttttttgagatgggaatctccttttattgcccaggctgtactttaactcctgggctcaagtgatccgccctcctgcctcagcctcctagtagctgggactaaggtgcatgccaccatgcctagtttcagttgtgattttatcaagagaaggtgaaaatttattgtaattagtttataggcgacattaaagaggagagacctgcaaaaaatgctttgttatttaaaccattttttcaaaagcatttgattggcacttttctgctttaatagacttatttgtaatgcaagaggaacattacagaagattttagcaatactttaatcatttagtctgtaggtgtaaaaatcctgggtttctaatagaaggaaagttggtacctggttaaatgagtatatgatttaatgctgagattgtgacttcaagtagtgggtgtctcacctttccaaaacctagttcatagttctcaaataacagtttttcctttttaattttttttcccatctgtcatggtgagtcttactttgttagccaaatacaagtttagttcttaagtggaataactttttttaatacaatcctccctcctccagccctcccatcctgtgccgtggagggtttgtcacgcttatacctacattagatctctatttatgctaatttggaacataatcagcctcttccaggaagggtacatattaatgcactttagagcagtttgtgattgcctctggctatttgtatacggacttgccagcatctgaaaactataaataggaagatttaggaggaaacagactttataactaatggaatacattgtttcagttgaattttttttttttttttttgatggagtcttgctctgtcgccaggctggagtgtagtggcacaatcttggcccgctgcagcctcccctcccagattcaagcaattctcctgcctcagtctcctgagtagctgggactacaggcgcgcacagccacgtcctactaatttttttgttatttttagtagagacagggtttcaccatgttggccacgatggtcttgatctcctgacctcgtgatctgcctgccttggcctcccaaagagctaggattacaggtgtgagccaccgtgcccagcctcagttgaattttttttaaagagcaaaatggaagaatggctaattgaatgttaaaaagtaagaccatttcctgttttctggtaaggatggttgatcgatgtgtgtttgcatgtgtgtgtgagtatatatttataaatgagcagtttttgaataaagacatatcaatactggataaataattccagtcctgcc

SEQ ID NO: 32483 - DNA, 1031 bp, Homo sapiens
acttattaccagccacataagcttgcctaagattttagtttggagagcagtaatttattatagactagcactagaattcattttcatatgccaaaatgctaatgtgaatgtgcagaaagaacctttgtctctaggggtaaaggaggcggtggatccattaatgttctttctttcctgccctacttccctttcattttcttttctgcttgggggtgagttattttgacatgattatgtactctcatttctgcattcaaatccgctattccccacccttgcctgccaacctccatctattgaatctacgtgtatatgtgtgtgtttttgtctctgcgttttctagcatttatctaaatgcttcccagcacagatccaatgaatatgaggcttcttattcccactaagcctgacataggaatccaacttttttttggaagaagaactgctgtgtcatcttttttggtgcatggatactacatattgatgctttgatttagaatatttattggcactaagcccatctgtagacagtttggaacctcagtttcttttgtgactttcttggcagtcagcattcctcctgtttgcttagaacagggaggtcagtggatctggggagctcttgaagcctacaacatagccatttctaacacttagtccaggcttatgtacctgatctgatcagccacaggcagaacagtcatagagctaacaggtgaggctgccacatcatctaatggcatacccactgctcagtattcagtcatttcaagtacaaataaatggagttaaccacagatggcacatttagttcacactatgactataatattactcgctatttacagactagtataggaataaacatgtttactctgataattctgaatactaatgtaaaatcatcttgctatattcactcatggattggatggaaacactctgcagaaagtgttatttcatgctattttggagatatgtatagcttctcttgcttcctcactgtggtgggtacaatgcaaaaacctttg

SEQ ID NO: 32484 - DNA, 1044 bp, Homo sapiens
tctcagttcagataaaaaaatatgcaaatgatgatatttaaatcaaaatgacagtatagtagaggatggaggggcacatttattccctttcttcccaaccctttctcttttttatatctaaggaggagtttctaactttatggatgagttgaagattaaggaaaagttcatacctgcacaccaagtaccaacttagaaagaaaacattcctgaccttgcttcaaatattctaaattgtccctcttttattcagataacgcatttggtttttgtgacttttctgcattcaaaactatcttacatgttttgagtacttgatgtgggccaacctttatgctgggcttttaaatatgttttcatttaatccatatactcatcctccaaagtaaacatttttatcctcattttcactcatataaaaatctaagtgtggtccaggtacggtggctcatgcttgtaatcccagcactttgggaggccgaggggggcggatcacgagatcaggagttcaagaccagcctggcaaacatggtgaaaccccatctctaggaaaaatacaaaaattagccaggcgtggtggtacatgcctgtaaatgcagctacttaggaggctgaggcaggagaatcgcttgaacccaggaggcagaggttgcagtgagctgagattgtgccattgcactccagcctgggtgacagagcgagactccgtctaaaaaatacaaaaagtaaaaacccaaaaacctaaatgtgatgttgggacgtatctaacactaatggatccaagatcactgaccagaaagcgagggatgcaggcctgggattgtttcattctaaattacatgtaattgtcaccaacaagaaaaggggtagatatgctcagggtggacactgaagtgtgtccaacatctctgttcatgagtagaatagaagactaaaaacattttcaggtctatttttaatgactctgaatcatcaacatgaatgcaatccagaaaaagatgcacaaatattgtgcagtgactggaaggagcatgcagataattt

SEQ ID NO: 32485 - DNA, 1032 bp, Homo sapiens
ggaaaaaagctaaaaagtaagagatgtgtataatatgcagtgcttttaatttatgttgaggtcggtgtgaatttaggattaggtatgatggttttaggtttttaatatagatgaaattaaggcttgaaaggtggctcacgcctgtaatcccagcactttgggaggccgaggcaggtggatcacgaggtcaggagatcgagaccatcctggctaacacagtgaaacgccgtctctactaaaaatacaaaaaattagccaggcgcggtggcgggcgcctgtaatcccagctacttgggaggctgaggcaggagaacagcgtgaacctgggaggcagagcttgcagggagccgagatagcgccactgcactccagcctgggtgaaagagcgagactctgtctcaaaaaaataaaaaataaaaaataaaaaatattttgttccaaaaaaaaaaccagagccaaaaataatttttcttgtgtagtcaaaaattactcttacccggatgacttaaataattatctccagctttgatatctcatacaatctccagtccttcacatccagctgcccactacacaattccttttccttctcctccttttcctcctccttctttatttttcatagacatctttgaccaattttcagaagtatatttctattcctaacttgctacattatttttttataatggaacgtttaatttgatcataatgctgttactatgtttattgaggtaatcacatacttgtccttttgtctgtgaatgaagtaaattaaatatacagatttttctaataatgtgtgaccccttgatacctgatataaaatcaactaggttctggtgcattatgtttttcacacatttatgcatttttttattagtgtcttgtttaggatttttgtctctacatttattattgagattgttttagacgtttcctttctaatgtgatccttgcttggttttggtttctgtgttattctagcctcataaaatcaggcaagttttctctgtttctattcactggaaa

SEQ ID NO: 32486 - DNA, 1071 bp, Homo sapiens
cctaactgttagaaggaaaactaacaaacagaaaggaatagcatcaacatcaacaaaaagaatgtgcacacagaaacctcatctgaaagtcaccaacatcaaagaccaaaggtagataagtccacaaagatgaggagaaaacagcacaaaaaggctgaaaattccaaaaagcagaatgtttcttctccaaaggatcacaactccttgccagcaaggggcaaaaaactggatggagaaggagtttgatgaattgacagaagtaggcttcagaaggtgagtaataacaaactccatcgagctaaaggagtatgttctaacccgttgcaaggaagctaagaaccttgaaaaaaggttagaggaattgctaactagaataaccagtttagagaagaacataaatgacctgatggagctaaaaaacacagcacaagaacttcatgaagcatacacaagtatcaatagctgaatcaatcaagcagaaggatatcacttaatgaaataaagcgtgatgataagattagagaaaaaataataaaaaagaatgaacaaagcctccaagaaatatgggactatatgaaaggaccaaatttacgtctgattggtgtacctgaaagtgatgggaagaattgaaccaagttggaaaacactcttcaggatattacccaggagaacttccccaacctagcaagatgagccaacattcaaattcagaaaataaagagaacacctcaagaagagcaaccccaagacacataattgtcagattcaccaaggttgaaatgaaggaaaaaatgttaagggcagccagagagaaaggttgggttacccacaaaggaaagcccattagactaacagcatatctcctggcagaaaccctacaagccaggagagagtgggggccaatattcaacattcttaaagacaagaattttcaagccagaatttcatatacagccaaactaagcttcatacatgaaggagaaataaaatcctttacagacaagcaaatgctgagagattttctcactatgaggcctgccttaaaagagctcctgaaagaagcactaaaca

SEQ ID NO: 32487 - DNA, 1043 bp, Homo sapiens
actttcatgcccacttacctggactcataggagtcttcctgaatgctaaccctgttgcctcagcattttctcacccaacagggcttatcatcatgtgagaaggtggaggtttcactgccaataagccctttaacttttttttttaatgctgtaagtaatactggtttcagcatggataccttgaatggtggggacaggggtgatagaaaggatgggtggcacaattttgagtcttctagattcggaggatgtaatttttttgtctttgtcctccccatctctcagaaccaacaggcattcacttcttcaggtgcttctgcctgcctttttaagtctgtgggctctaggcgcttacactcacattagcccacttctgtcagaggacagatacgtgcctctgattgcagagacctgtaactggttcatctttttgattggattttgaactctgcttaaagtgtgatatgaagaaaagagacttgactacagcatcaaatagttatgtagatcctgactgtcactatctgcacacaagtgagtaatttgagtttctttcgccatctgcaaagtggagattctagtatctatgacataaggctgtaagaagagacaatgaaaaagaaaatcacggatgatatgtgtattattttgtatcctggtcctcaggatattttatttccttttttgatagctgcccatcctttcaccaggacgtcattattttcccccttctgccttaatagaggtctgctcttctttattctgcctgtctgatctcttagtctctgctttcctaattctgttgcctgccagataattcctatctagtgttgctaatctctgactaaacaattcctttattcagtcacttttttaaagaaagcaccctcacaaaccagttttagaaattctctgattctcgataaattacatgcttgcccattttttcccacagcttacatatcaattactggagcataatttccccttacattatgaatagcaaatgttgagcagaacagccctgcccagttgcagaagcc

SEQ ID NO: 32488 - DNA, 1019 bp, Homo sapiens
ggttaccaaaaaagagcctagatatctccataaacacatttgagaagattgaatgctcctccaccttggcagatagagaaaaatggactgtgttatttgataagtatttttatttgcatatgatagaatccagtctgctcttttaaagcataaaagaatttattagaagataaagatagttgagaatcactgagaaccctgaagaaacaaattccagaccaaactccgaaaaataacttctaaaaccacaccagagagctaggccactaggtaagctgttatctttgccgtggtctagagtctagaaagctactgaatcagaaagccactcacccaattagaaagctgctatcacagctgccaactccagaactatctccattctactttgatcaagttgtagcaatgtcaggaagctgccactgaaattactcactccaaactctactttctttgccagactccttactaaaactatagatatgctgtgactaccccaccgttccagttcccaattaaagtcacacaagtattcgtgtgattgttgatgcaagtaacaagagcactagccaaaaagaagcccagggaatggagctttttttttttttttcttagtgctcagttttatctgccaggatcatgtaggtgtagacgtttagcaagctattcattgtatgtgctgtaaagctttaggacaggggctttaacttgtgtatctctatatatttctattgtattgttcatgtttcccagtgggctctatcatagaaatggcagaaggatatggaagaaggtttgagaggagcgtgttcccagaacagaatgctcaggaaaattgttcttgaagatacctgctcagaatttaatactagagtacatgtttggtccttctattgtctaggcgatgttaaaaaccgttgccctacattcggcttattcagcctcagcaagactgaaatatatccacttcacagattcctataaagtgtacatttttaaaaaatggtacagaaaatgat

SEQ ID NO: 32489 - DNA, 1018 bp, Homo sapiens
ttaataaacttttatttgaaagacagtgaaaagaggtttgcttacctttcagaggtgccactctcatgctagcaaatcaagctgaaacaatcaccaaaaagaataaacacagcaaaatactaacagatgatatttatggagcatttgatgtgggccaggggctcagcaaagctctctatcacacctttaatcttcacaacaaactcctacaggaacactattattattgccattttgcaaacaaagaaactgagacatggagaggttgggtgattttttttttttttttttttgagctgcatttgcaccatggtggtttcaaagcaaagacaagcctcgttgagaataatgctctgatggacaggaatgccaggacctgggtagaaactcaagtttcctctcctgtaatatttttatttcttttctattaagctgtctttccaaagaagaacttttaaaaaaattcaatgagggtacagttttaaatttaaatgtagaacaaacaaagacgaaacagaaaatggacaaattgaaacaggaaaaatggtcaagataggaattgcacacaagtgtggctggagttcctggaggaaggttctatttctccaaagtgttctggaagcagagctgcttacctaaaaccagtgcacaggccaaactatgactgttctcacacttggcaatgctgacccaggctgtaggctgtaatacctccttgtttgggggacttaattacttgtttccaggcacagaggcaaagaagcattaactgtgtcgttcaaagacagtcataaagccagtgtggggacaataaaggtaaaaatgtatggtgctttttaggttataagcaagccaaagaggaactatgctgagaatgcccacaaagcactgaagtgatactcaaattacatttgcgtgattgtttctcctatggaaatcacgtattcattgctatgtctccagcgtttaatacagtaaatgccattgtaggaatctgatagatattcattgaactaaa

SEQ ID NO: 32490 - DNA, 1054 bp, Homo sapiens
attgagagggaaaaatgaaaggaatatcacctatttatacatttttctactttaatcacaattaaaagggaatttaagtctccatatgtgcgaaagactagattattttattttattatttattttatttttcagacagtcttgctctgttgcccaggctagtggtgcaatctcagctcaccacaacctccgcctcccagttcaagtgattctcttgcctcagcctgccaagaagctgaaatcacaggtgtgcaccaccacgcctggttaatttttgtatttttagtagagacagggtttctccatgttggccaggctggtctcaaactcctgacctcaagagattctcctgcctcagcctcccaaagtgctgggattacaggcatgagccactgtgcttggcttttattatttatttatttatttatttatttatttatttattttgaggccaggtcttactctgtttcccaggctgtagttcaatggcatggtaggcttactacagcctcaaactcctgggctcaaatgattctcctgcctcaggctctggagtagctagaactacaggcatgcactaccaccacgcctggctaatttttttattttgttagagacggggtctcactctgttgcctaggctgggactgtagaattttttaaaatacgtatgcttacagctattcaaatttgtagagatgcacaaaactttgcttcctaggaaggcagaatgataatttctatctagaatcaagaatatttaacattagtgtaatttatgttccccatttatttagattaccggtgtgctgtccttttagtgtcccctttgctaagatattggaaaatgtcacaagcttaatttctatttacttcaactcagcatattttggggtggaccctaatatttgcctatagaaattttcccatattttaaaactccagagggaaacatgagctctgctgtgtgtcttataatgtctggttatctaataatggctgaaatttcaagtacaaagtatctgataattatttctgttaagacagaatattt

SEQ ID NO: 32491 - DNA, 1099 bp, Homo sapiens
tcctatttcattgtttcctatagattccagttcataagtgaaatttcccatcttgtcacctattttctgaatatatttggcatagtaattttaaacctatgtctaatagtgccaatatttatttttatctatgggcctgtttctagtgtatttatatattttttctttgtggttttaatattgcattcttttcacaactggtaatttttaacctggtgccagacattgtccatggtaaattttagaggctctggataaaattttaccttcctccagtgaaaattttgctttcctctggaagactgattaggacacgtttcttaagcattttaaattattaccttactaatcagacttttcagacattttgtttctaagcattcttcccatgaaattgtaatttcatgccccagatagactgcatatctgtttttgaatgtctctatatttgtgctttacacataaaaagagtaagcataaagcttattctttttttatttaatacatgattaagaatgactgaataaacaaattaagttaaaagttaatttaggccaggtatggtggctcttgcctgtaatctcaacattttgggaggctgaggtgggaggattgcttgaggccaaaagttcaagaccagccttggtaacaaagggaaacctcatctctacaaaaaatattttaaaattagctgggcctactggtatgcaccagtagtcccagctattcgggaggctgaggtaggaggatcacttgagcccatgaggtcaaggcagcagtgagccgtgtttgcaccactgaactccagcctaggcaagagaaaaagaccccatctcaaacaaaacaaaacaaaacaaaacaaatcaaaacaagacaaatgttaatcaggacaaatagctaatgcatgtggggcctaatgcctaggtgatgggttgataggtgcagcaaaccatcgtggcacatgtttacgtatgtaacaaacctgcatgttctgcacatgtatcccagaacctaaaataaaataatttttttaaatgttaatttaacaactaaaaaactcttaacatttaactttacaactgtgtttgctgagcaactt

SEQ ID NO: 32492 - DNA, 1043 bp, Homo sapiens
taactcctctctgaagtcctcccaatcacttcacagactataacccctcattctgccccttttgggaccagtgaaatagtattcacacgtttgtcacctcactgcagtttaaatttcttgtggcctggcctgtctgttattcttcttttatacataacattcagcagtatgtctgggacacagtaaccatttctattcattcttagatatgcaagtgaatgtagaaacaaatgaatagatgaataaataaatgaaagaaaaaaattactgacttggcagggactttcacttgcctactttaccaagttcacacttctcagcaaggtcacaaaagcccactgatctatacttccttccattgagtttgtctctaatacctgttggcttggccctggtttgcctaatggaattcagttctcttcacatagaatttttttttttttcctttctatattaacagttcatggcattctcttttcttggaacatcctttcatatacttcatcattttctttcggtacaaagtctgctccaattatctccaattctgcctcttaccattcccttattcacatatgatcccaatagactgatgaagatctattgttttcatgggagttttttgaagctagggtttccaccaaagtgttggtatgatgtcatttagcatatttggcatcagatgtccaatgaccaggatttcagtttcaactctaataggtgacctgtctatgagtctcagtatactcatttgataagtgaaaattaaaatgactagctacttcatgcaatttttgtaataattaaaggaacctctctatgtaaaagatgcattagccaaatatcttgaaaataattttttccactataaagtattacataaattttctttgaattattgtaactacttttttaagacccaagagcaaaaggcaaacaaagaaataaatgtttgttatatcatcattgtattaattaactctatagttctcatgtctctgaagactttattttacatatctcaactaaattaaccttcccga

SEQ ID NO: 32493 - DNA, 1037 bp, Homo sapiens
tttcttatggttgctgaccactcagtgatgctgagcaagcctccattgggcaggtctatagccctgtttatttttttcctacatatcagtgtcatgcaggtctatactaaaacgtgtctgtaatttgggtccatctcctgttttcacttcacataatctatcctctatagcagttcaaaacatctgagtggcagacactacttcaaaaatattcccattttcatcatcacccaaaagaatttctaaatcctcaccatctcctttattttgcttatattctcaaagacactagctatggatttataagatatgcttcccacaagtagcattattaagttaatgtttatgctcctctgaactgtttcatttgagtacaaagctttgatgcttcttaaaacctgtgttgattctttacacacctgtttgaatgagtatataaaataatttctcaaaatagatgttggtcaggtcatggagagtgacagcatgaaggtcctgggtatctggggaaatgtagcaggcaggagtcattctactggaagaacaagaagagaagaccataataaggcaggagatatttttgccgagtagtcaatttctcctagtgccaatgtgatttctgtcacactttctctcttaatgagtaaggcataagttctctggtaataattgtctactttcagaagttgcatgtacgatgaaatggtctgcctcgggctatctatgttgattgttttcgggaaaatataggataagctaggaacatatatggtacccattacattctcttttccaaaccagatttatttgtttcaagtttgttggcttaggtcaagatgagagcaagggtagaataaaacagatagtaaggtagatgggtgtatgtgttttcataactttaagactaaaaaacaaaaacctccaaccaataatgtaatgtgagagtgcttttaaaactgcgtagtggttatttttatgggttttatcatttcccctcatactagagactgaaaggaagtccatagaaaccatgtata

SEQ ID NO: 32494 - DNA, 1065 bp, Homo sapiens
gaggaaagtaagacacagatggagtaatggatttgcattagagaatagttattaatgttttctggatcatagactcttttaggaatttgattctaactatagcccctctcacctagaaaatgtatatagaaaaaaataaacattgtttgtatagaaactcatgttaataatctctagcctaggtaacaagtattagcctagccagaactatagccctgttaacctggcttttaaaccttgttcatttctatgttccatcctacctattaactatagcagagacatacttttattattctctctctcttaatcttgtgttaagattaatatattttctttaaaagcttactgaatatttctcctttctgtacaatatgtgatataaaacttctgtaaattaattcttctcgtttcctcttcttcacaatttctactaaggttttttttttcatgctactttcctagtccctatgggatgtggagacagcatatgatgatctgacagtttcagactgtacaacttgtgcttcacacatcaaagaacagggacttagtaagctgtgccttgttttcctgttctgccactgaaaaagtgatatattaggtttctaaatattgttcttatgatgtcaaggttaacttgtggaataagtccatatgagttataggaattcactttatgtttccctcaattgtttttgagctttaaataaaaacagagggggatgagactagaaagataatacataacactcttaaaatacacaaaaaaaatctctgtcttttgttatctaattgcttttttcttttttctgtatactttttattttctgtttgcctataatactctcaaacatataataacatctttttctatgtctttttcccttaaaataaaactttattaaaaaattatccagggcttttagtttttatcatttactctgtatcatttttatcaccagattttaaatgaaggagagtctgtgaattagacaagctgcaaacatttttatattgagtacttaaacacaatcattataattaattttgatacagaggttg

SEQ ID NO: 32495 - DNA, 1051 bp, Homo sapiens
gggctgttgtgctagcagggaataaaacaacattagtctccttgtacacttccatcagagctctaaaatgaacaggtgtactgttaatgagcagtaatcttttggaaggaatcatttctgagcagtaggtctcaacaatgggtataaaatatttagcaaatcatgctgtaaacggatgtgccatcatccaggctttgttgttccatttctagagcataggcagagtaaatttagcagaattcttaagggtcttagaatttttgcaatggtaaattagcattggctttaactaaaatttgccagctgcatttgcctctaacaagagattcagtctgtcctttgaagccagactctggctgtgaaagctctagatggcattttcttctgaaaaaggctgttttgtctacattcaaaatctgttgttgagtgtagccatcttcatcaatgatcttagctgtatcttgtagataatttgttgcagcttctacatcagcacttgctgttttaccttgtacttttatgttgtagaggcagattcattccttaaacctcatgaaccaatctctgctagctgcaaacttttcttctgaagttttcccacttctcccagcccttatataattgagtagagttagggccttgctctgaattaggtgttccttaagagaatgttgtggctggtttgattctacccaagccacctaaacttcccctgtatcagcaataaggctgttttgccttcttatcatttgtgtgcttactggagtagcactttaaatttccttcaagaacttttgttttgcattcataacttggctgtgtggcatcagaggcctagctttcatcctctctctccttttgacatgtcttcctcactaagcttaatcatttatagcttttgatttaaagtgagagacatactactctttctttcacttgaacacttagagcccagtgtagggttaatattcacctagtttcaatactgttgtgtcttagggaatagggaaacctgaggagagggagagagatgagagaatggcccgtccat

SEQ ID NO: 32496 - DNA, 1043 bp, Homo sapiens
tccattgataaaaatattgaagctatcttattcttattcatctttcacatatcctttacttactaaaagtgactgactcccacaagttaccagtatatgtaacacagaaatccagtgttctttttcttaaaacaccagtatgttagataataattcttgaataaattctataatgctatttttaaaaaatcaactcaacactgatttcagtgaagttcaggtactccatttgggtgaattttaactggcaacgtgaaaaaaaagaaaatttggaagatgctcaaataggattgatagaggttcattttgtgtcatattttcgctttatatggatgttgatatgttctcagaataaatttataactgcaatagaaaatggaatgactattgattattttttagttacccaaactaattgtcatataaagctttgtaaatcttttaaaatgagtatgggtgtaaattaaaaacgaattaaagcagaggcttataaagacactatctccccttcaatgggttatgtatttttgttgtgtgttaggaagatatctcttgatctccacacccaaaactccttccaaatgaacaaaggcctacacacaaaaattatttcaattgctaatagccagtttttatttttcaaaagtaaatgctttctttttttgaaaagtaaatataactattttaacaaagtaagatttaaaaaaaaaaacaactcagaaaaaagtgccatgcagagataacagggctgatctgtctgttatctgcagcctctatccttactgttaacaagccttttatctttgaagacactaaacatctgggatctaagcactgacacctattagttacagtggtttccttttacctttctaaactatctgatagataaacctccaggaatcctacaaaattaggcccttaattgaccaaacgaatgtctgtctctctttttcaatctaaatcaaaaaggagtttgctcctaggagatgagatgatgtacagtggaaaaaaatatttcagctgcaactccactggtaacc

SEQ ID NO: 32497 - DNA, 1028 bp, Homo sapiens
ggtgcatgaccctgggtcttttggtgatgtttggaagaactgattctttgtttgcaataattttggcctagagacttcaaatagtagcacacattaagaacctgttacagctcattgttgagctgaatttttcctttttgtattttcttagcagagctcctggtgatgtagagtataaaacagttgtaacaagacagctttcttagtcattttgatcatgagggttaaatattgtaatatggatacttgaaggactttatataaaaggatgactcaaaggataaaatgaacgctatttgaggactctggttgaaggagatttatttaaatttgaagtaatatattatgggataaaaggccacaggaaataagactgctgaatgtctgagagaaccagagttgttctcgtccaaggtagaaaggtacgaagatacaatactgttattcatttatcctgtacaatcatctgtgaagtggtggtgtcaggtgagaaggcgtccacaaaagaggggagaaaaggcgacgaatcaggacacagtgaacttgggaatgaagaggtagcaggagggtggagtgtcggctgcaaaggcagcagtagctgagctggttgcagctgctgatagccttcaggggaggacctgcccaggtatgccttccagtgatgcccaccagagaatacattctctattagtttttaaagagtttttgtaaaatgattttgtacaagtaggatatgaattagcagtttacaagtttacatattaactaataataaatatgtctatcaaatacctctgtagtaaaatgtgaaaaagctttgagtgttccttcgtgttttttattgttctttgaggcctacagatatgttcatttcagtatccataattctaaagagcttaaaaacagaacaaatgaaacaaagccctccactacttctgtctcccgtccttctgtccctctcttgtttgtctcatttgtgacctccttgtggaaccagctccaatcttacgataggcccgtccatgtct

SEQ ID NO: 32498 - DNA, 1043 bp, Homo sapiens
attgatattaaataaacagatctatttattattatatatgggaacctgtaaatgttaaattattttagaaaaatcaatgcaagaataactgtagccattacttttctatgaaataatgttttacttttttaacttccttacagttcttatttcatcgaccattaaggctgttaaatctgctcatccttattgagggcagtgtcgtcttctatcagctctattccttgctgcggtcggagaagtggaaccacacactttccatggctctcatcctcttctgcaactactatgttttatttaaacttctccgggacagaatagtattaggcagggcatactcctacccactcaacagttatgaactcaaggcaaactaagctgcctctcaacaatgagggagaactcagataaaaatattttcatacgttctatttttttcttgtgatttttataaatatttaagatattttatattttgtatactattatgttttgaaagtcgggaagagtaagggatattaaatgtatccgtaaacaaggtgatgtgatctttcatgtgttagtatattcgaataatatacatatgagaggtatgcctgtccagtaaagagattgatttgtttgtatggctctggaataactcattcgtttatgaacacatctcatgtattacttgacacagtacctttggtatgtctgcttttctttcaatcctcattatctttagccctcagctggccagtacttattgctaaagaaagggagatcaatggagttgcctaccagcacccattctcttttagttcagctggctaatagtattggaatacattgggaaaagagtgggttaaagtcctaggtggggttctctttgttgcctaccaggagaaagcagtaggcttcctttctaagatacggactcagctggtctattttaccctgtgacatttaaatatacttttgaataagctactatcctgaggctgagggttttgctgccacttttcctgtgtttccacttctgcttccaaagattttcctct

SEQ ID NO: 32499 - DNA, 1042 bp, Homo sapiens
taaataaaattcccgccgggcgcggtggctcaagcctgtaatcctagcactttgggaggccgaggtgggcagatcacctgaggttagtagttcgagaccagcctcgccaacatggcgaaaccccgtctctactaaaaataaaaaaattagcagggcgtggtggcacgtgtctgtaatcccagttactcgggaggctgaggcagaagaatcactcgaacccaggagatggaggttgcaatgagccagagccaggatcgcgccatggcactccagactgggcgacgagcaagactctgtctcaaataaataaataaataaaataaaataaaataaaattcccaaatcttgtgtatatggagttttgttaaatgtggacatacctgtgtgacttaatcccctgtcaagacttcagagcgttacacatactccacaagattctgtcatgccactttcccatcaaaccccaccactgtccagagacggttgctttttttttttgagacagggttttgctctgtcatccaggcgggagtgcagtagagcgatctcagctcactgcagccttgacctctcaggctcaagcaattctcccacctcagcctcccaagtagttgggactacatgtgcacaccaccatgccccgctaatttttgttttgttttgttttgtagagacaggattttaccatgttgcccaggctgaggagtaaggtttttttgattccagagtctttgtcttaatcattactgtatcagtagttctcaaaatgtagtttctagaacagcagcatcagcatcacctataaatttgttggaaattctcagaatctaccccaaacctactgaaatagaaactggaaagtaggacctagcaagttgtgttttaacaagccctcaaggtgattctgatgcatgctcaagtttgagaattactgctttatattatttatggtgctgaagtgttagcgtgaatttatgtgggtaattacaaagtataaaatcaagtcataattagagattgtgctaataaggatgacaggaac

SEQ ID NO: 32500 - DNA, 1034 bp, Homo sapiens
catttggacattcattcattaaacaaatacttcatatagagtgccttctgtatgtcagatgccgttctaggaattgggtctcagtctggaacaggatatatgtcagataacctaaattccgaatttttgtttgttttattttgttggttggtttaatggaaacataataaggaagaaatctgaaatcccatcagtctacaataggacctctcttcgatgacattctcacctctgtctctctctctctgtgtgtgtgtgtgtgtgtgtgtgtgtgtgtgtgtgtgtgtacaccttttactttctttttttttttttggctactctgataacactgcaatagaagtctccttatggaaagtctttacaagtgtcctttactaatcacttcagctaaggatgggccagaggccatgcgtgttttcaaggctttgagtgaggactgcccccaagtgatctctagaaaaaatatatccatttacaccttagtgtctgagagcactgattaatctctgagcaacacaatttttttaaacttttgccagtttggtatgcttgcctgatttgtaagggaactgaaagcaccctttttggcctctgcaacacttaaaagtacatctcacaagaccctctgcccaccctttcctagtgcttaagtcttcccaaagatgaggtacagcatttcggtaataatgaaaagagatatcaccacagtcacttgaaaagtgaagaacttggcctcctagtgggtaacaaccacattctaatgcacctctttgctaagcccttgctcttcacaataatgacaactcaatacggatatattcacactattctctctagtcccccgtttgtctaaccttgaaatgtttgacttgaaggttgatgaaaacaggatcatatccttaagtaaggcctatcttgggaatactatgtctttcataggtctaatatgacctatgatgtgatggaaaaaccatggtccttattttacaggtgagtataggtgcttggagaggataaggaaatcaccctga

SEQ ID NO: 32501 - DNA, 1051 bp, Homo sapiens
ttagcaagttttcccagctgtgcactgttcatttattttcaagtgaactagactccagctgagtgttcatatacagctgatcccagctgtagcaagagctttgactgaaatggtctctggctccctgagtctgcaacttattcaaagacactgtcttcccggtaccaggaccatgctgaggcatgaacttaaatccaagaatagagaaattcagatttcatagtgttggccttatttaaaacaacgttccaaataacagcttggaaggccatacagttcacagcctgcagttgaaacagtgtacttgttctcttttgttgttatagcattgctcatgctctctcttgggactttttgacttgcagatgctaatactggagaccgtggacagaccaataatgctgcttctgcatcagcttccaactccacctgaacagtcccgagcagccagctgcacaggaaaaaccaccagttacttgagtgtcactcagcaacactggtcacgtttggaaagaatattaaaaagagaaaaaaatcctgttcattttagtgttcaatttttttattattattgttgttcttatttaaccttgtaaaatatctataaatacaaaccaatttcattgtattctcactttgagggagatccagggggtgggaggggttgtggggagggggaaagcggagcactagaacatacaatctctctcccacgacaatctttttttattaaaagtctgctgttgtatactttaaaaacaggactcctgcctcatgccccttccacaaaagaagaaaacctttttctgtgctgatgggtttttttgaactttgttttcttttaaagtctagtgtgagactttggtatagtgcacagcttgaaattggttgggagcttagcaggtataactcaacggggacttaaatgtcacttgtaaaattaatccatatcttcgggtatttatagacttgcctttggcatgttggtggcaggtgtggcagacaaagaaatgtgtatcattcgtaacccagggaggtcaataaagtttgg

SEQ ID NO: 32502 - DNA, 1033 bp, Homo sapiens
tgttctgttgatttggggtggagagttctgtagatgtctatctacagaacttggtccagagctgagttcaagtcccaaatatccttgttacttttctgtttcgttgatctgtgtaatactgacaatgtggtgttaaagtctcccactgttattgtgtgggagtccaagtctctttgtaggtctctaagaacttcctttatgaatccggatgctcctgtattgggtgcatatatatttatgatagttagctcttcttgttgcattgatcccctaatttttgtatttttagtagagacggggtttcaccatgttggccaggctgatctcgaactcctgacctcaggtgattcacccaccttggcctcccaaagtgctaggattacaggcgtgagccactgcgcccggcataaactggtagtttaatgcagaatcttattttcactcttaccaataaaatagttttgcatacaaagttaagagtggactctaacatttgtgtcttaaccttctatagaactgtcaagtaatccacctctggctaccatccttattcctcctcatgctcggattcaagcagctgcttcaacccccacaaatgccacagcagcgtcaggtaagaacgttctaagtctcttctataaaaacatattctgggctgggcatgatggctcacacctgtaatcccagcactttgggaggccgaggtgggtggatcacctgaggtcaggagtttgagaccagcctgaccaacaaggtgaaaccttgtctctactaaaaataaaaacttagccaggtgtggtggcaggtgcctgtaatcccagcttctggggaggctgagacaggagaattgcttgaaaccgggaggcggaggttgcattgagccgagattgcgccactgcactccagcctgggcaacagagcaagactccatctcaaaaaaaaaaaattctgtttttcaaaaagatatgattacctttcatttcatttgatgagtatgaacatttaatatcttttatatatcaaaaacagcaca

SEQ ID NO: 32503 - DNA, 1038 bp, Homo sapiens
ggaatttttcttctgtgttttgcagtataaaacaatgcagcaaaatttagttaaatggattttgttaactttttggttgattcatatctatatttaaactcattttgcttttgtttaaattgtgcattaaaatgtttaattatggaacacataattattgatgcaccatcaaaacatttgtagttttccctaataaactacgtggctttttaatgaatagttttcatgacttcttcagttggctgaagaaatttttatcacattaatttttctaaagttttctggaatttcttgccgttttgttttaaaccatgtctctaggtaacacagtctatcttttatccttcctatttttcattttcctctcacttctccagagctgtcccacttcattatggacctttttgttcttatccccctactctcaagcttagcacacatatctagtaaataaatattaccttacatttcaatttcagtctcttcaacactcctctgccttcaagaatacatacactgtgtctgatgctaacaggtgctgttactttgctgtttctatcctccaaaataccaccattttttctattctttcactgcagtttatattcaccctcactgactccatttccttatcactcattgccatgggtagacaaagtgattagaagtaggtagtaatggttgggattaaaaaaaaacattttgaactggttgacatagccctatagaaatgcccatagtctgtccccataaaaagtgtggacttacagtggcaagaataggactatagcaagagtgcaaggaggcttcctcacagggaaaagttgtaagtaacagttaacaacctctttgaagtagagaagactgaacagatgaaagcaatggattttaaggattgcctgtaattaaggaagagaagaagaacaatggggtgtagaagttggaaggatgtagaagtagtagtgattgttcattttagaattcttaacttttaggttcttgctagaaaaaggttcacaaagtaccccccttcacatc

SEQ ID NO: 32504 - DNA, 1045 bp, Homo sapiens
acacttataattcgtcaattaattaaaaacaaatgaattcagaatgaatcaaagacctaaatgttagagccaaaacgataaaactcttagaaggaaacagatataaatctttgtgaacttcaattagtcaatattttcatacatgtaacacaaaaagcacacattataaaagaaaatagaagtaaattggactttgtcaaatttaaaaacttgtgctttagaagacagcatcaagaaacttaaaagacaattggagaaaatttttacaaattatgtctggtaagggatttgtatctacagtatgtaaggaattcttacaactcaataataaaaagaaagcccacttgaaaaatggacaaagaatcggcatagacacttctctaaagaagatacacaaatggccagtaagcatacaaaaagatgctcaacatcattattcatcaaggaaatgcaagtcagtaccataatgaatactattatcacactctccataatgactaaaataaaaagacagtaactaatgttggtgaggatatggggaaactggaaccttcatgcattgctggtgtggttgtaaaatgatgcaaaccttgaacaagtttggcacttcctcaaactattaaacattgagttatatgacccagcaattcagcttgtaggtatatatcctaataactgaaaacttacatccacacaaaacatgtacgcaaagtttatagcaatgttatatagccaaaaaaggaacaaataaaatttctagcaactgatgaatagataagaaaatgtcacacacgaaaggccacatattatataattccattctatttatattaaatgtccagaagagacagattgtggagacaaaaagattagtggttctggggagctgggggaaatgagaatgatggctcatggatacaggctttcattttgaggtaatgaacatgttctaaaattagacagcagtgatgattgcacacctctgtaaatgtagtaaaaatcactcagttgtataaggggtgggtttcatgatacatgaagtaca

SEQ ID NO: 32505 - DNA, 1067 bp, Homo sapiens
ggaagagtagggtggtggaaaaaccatctgattcatctgtagctcaatttatagcctctattcatggaattttgtaccttcgggaaaaactatatgatccttaatgtcaacttgatacccagaacccattgagttgtgtttattacttattatatgtatattgtaaaaatttgtgtctaccagcaaattagtgatgcaacccctaaatcttacagtagtgaaatcaatttgaggtatctttaggtttaattctgtttcaaccattgtaatggtcagttcctttgctttgctttcaattacacatggtccccacaattcctttgctttgctttcagttacagacagtccccgacttaggatggcttaatgattttttgactttccaatactgggaaagcagcacagattcagtggaaactgtattttgagtacctgtacaaccattctgtttttcatttttaagacaatatttaataggttacatgagatgtttgacactttatcatgaaatagtctttgtgtttgattattttgcccaactgtaggctaatgtaattgtgctgagcacatttaagggtagtctaggctgagctgtgatttcagtagattggacatattgtttgcattttcagcttaggatattttcagcttactatgtatgggtttgccatgatatgaccccattttaaatcaaggagcttctgtacagttcaaccttattttcaccatcttcatttagcaaatattttggattttaattatccctgtcctgtcctatagtttgttcagtgcccatgtgtacctacactcttgtttcctgacttaacattttcattgtcagacaatctttctttttctttttcttttttttttttttttttgagacagagtcttgctctgtcacccaggctggaagttcagtggcgctgtcttgactgactgattgtgttagttggtacttaatttgttcttgtattatcagttaaattttttcatttattgctgatcagagcagcagctcttaatagtttttaaatcatggactactttgaaaatctattagtaat

SEQ ID NO: 32506 - DNA, 1041 bp, Homo sapiens
catttccttcatgccatctccattatttaatataaaatcagcttaaatcactagtagttttgctagatgcactgattctgcagaagtatgcacccaagatgtttagtcatagaaggaactgaatagagaccattagctttaatcatcattgaccttctcaagtcttcaccccagatgtttagtgataggaggaactgaatagagaccattagctttaatcatcattgaccttctcaagtcttcaccccagatgtttagtgataggaggaactgaatagagaccattagctttaatcatcattgaccttctcaagtcttcacccaagatgtttagtgatagaaggaactgaatagagaccattagctttaatcatcattgaccttctcaagtcgtcacccaagatgtttagtgatagaaggaactgaatagagaccattagctttaatcattattgaccttctcttttactacatcttagcccactagccaggagtgaacagagagagcatgatcagctggacatgaataggaagctaacaaacaaggagcaactttaagctggatgtgcaagtggaaaccaaaattattttactcttacatattgtttctgaagagaattcctttagtccagaaacaaacaaaagcatgcaaataataaaccaaaaacatccccacagtaacagaaaaccaaaacaaacaaaaaacagacctggcctggtgcagtggctcacacctgtaatcccagcactttgggaggctgaggtgggcagatcacttgaactcaggagttcgagaccagcctgggcaacatggtgaaaacctgtcactaccaaaaattagccgggcgtggtgacatgcccctgtagtccccgctacttgggaggatgaggtgggaggatggcttgaggccaggaggcagaggttgcagtgagctgagactccaccactgcactccagctcggtgacagaatgagaccccccctctcaaaacaacaacagcaacaacaaaaaatagaacagaccttgtgacagtttttttg

SEQ ID NO: 32507 - DNA, 1033 bp, Homo sapiens
gactgtcctcattttactgttttctaatttcagatgacctatcactttgcaggccatgactctgttccctgaactatttttaaaaagggtgaaagatagtaaaactcttacctggtgtttgaaacaaagcactactacttgtctataggaaaaactgcccaaatcagatatgttttattgttaatggggtgtcttcaccattgagagtgactgacttggtagggacagactgagacaccaaggttagaagagcttctgttctcatatagtgtcaaaacacttggtacagcccattctcttgggacataaaatagctttattctgataaatttggaagagggatttcgcttgtttgatagctcatttttataaaccctctgatttttttgtttttaacaaaattggtttggtcagatggagtttgggaaacactttggactgtacattatcagattggtaatttgaacaaaatactattactttcttcttatttttttactagatgaaaaggggccaaaaagtagctaaagaactagttgggctatttaggaacaaaaagctagatgtgatcacaatattgggaagtagttaaaaccagtctcctctgtaagagaggctgctccgtttttgtagctccatcaggtagtgaaaaaacttcaggctacaaagcttgggtattaacgttttgtctcgtaatgaattttctgaacataattagcatctatcttgttaattaaaaagcatcctttagaagatataacagtctcctatcaattatgctgaaaactaaatgtcataattttcatgcagcctaaaaacagggattagtatttattaatttatgaaatggttattgtatgtcagtacttggggagagggttaaaaaacaaacttcaaaactagtgatgaaggaaaaagaagttaaggttagagtcatcattgactagaaataaatggaagaaaagaaatcccagtcattgaaatccttgtgactactttcatctgtctttaccctggttttccagtaccttta

SEQ ID NO: 32508 - DNA, 1025 bp, Homo sapiens
tctctttattttgagtctgtgtgcgtctttgcatatgagatgggtctcctgaatacagcacactgatgggtcttgactctttatccaatttgccaatctgtgtcttttaattggggcatttagcctgtttacatttaaggttaatattgctatatatgaatttgttcctgtcattatgatgttcgctggttattttgcccattaattgatgcagtttcttcatagcatcagtggtctttacaatttggcatgtttttgcagtagctggtaccagttgttcctttccatgtttagttcctccttcaggagctcttgtaaggcaggcctggtggtgacaaagtctctcagcatttgcttgtctgtaaaggattttatttctccttcacttatgaagcttagtttggctggatatgagattctgggttgaaaattcttctttaagaattttgaatattggcctccactttcttctggcttgtagggtttctgccgagagatccactgttagtctgatggccttccgattgtgattaactcgacctttctctatggctgcccttaacagtttttccttcatttcaaccttggtgaatctgtcaattatgtgtcttggggttgctcttctcttggagtatctttgtggtgttctctctatttcctgaatttggatgttggcctgccttcctaggttagggaagttctcctggataatatcctgcagagtgttttccaacttggttcccttctccccatcactttctacaccaatcaaacgtagatttggtcttttcacatagtcccatatttcttggaggctttattcatttcttttcagtcttttttctctaaccttctcgctttatttcattaatatgatcttcagtgactgataccctttcttccacttgatcgaatcagctattgaagcttgtgcatatgtcatgacgttcttgtgccatgattttcagctccatcagtttatttaatgtcttctctacactgtttattctagttagccattagtc

SEQ ID NO: 32509 - DNA, 1052 bp, Homo sapiens
ttaatgatgatagcagatacttactatatgtattttttgacatgagcagttttacataattcttaccattagtactgtgtgattgatattgttattatttggataaggaaacctaagtacaaagaaattttaaattaacttgtcagggtcacacagttggcaagtggatggatgagcaaggattcgaatctagacagactctccagtgccttaccacattttatcctcgctgtatcaagcccctctaccccttctctctttctctcacagtattcatcctctttctatatcatagtatcagattctcacagtgtcataacctctttctatcaaaatatttaaaccacaccctctttctccttctcaagagagattggttttatttcattctctaatggttgcattatattttattgtgtggatataccctaattagccattgttcaattgatagctattaaaatttttttccctgccaaacattgtatatatgtgctttatcagaatacagtttataaaagtagaattctagggtttaaactttaaaccttgatataggagagcactttaaaccttgatataggctgtcttccagttagattttatccatttaaatgtacgttatttgaatatgagtaatgcccatttcctgtgtagcctttagatattaggagtatttttatgtttttcagttctgtaggtgaaaaattatttttatattttgttactttcttttctgttttaaattttttgtagagacgcatctcactacatggcccaggttggtcttgagctcctggcctaaactggttctccctcttggcttcctaaagtggtgggattatggtctgaatcatcatgcctggccctgaaaaattattttaatttacaacaccattttacatgttgtgaccctttttaccccttttagagtgtgtgtcttccttactcatttgttaaaacccatttaaaatgtaatcttgtagagcaacaaagattttattatctcagtgcttctgtgcgttggaaattcaggcatggcttagctagga

SEQ ID NO: 32510 - DNA, 2837 bp, Homo sapiens
aggcgtggtggctgatgcctgtaatcccagcactttggaggccaaggagggcggatcacctgaggtcaggagttcaagaccagcctggccaacatggtgaaaccgcgtctctgctagaaatacaaaaattagccagacgtggtggcaggtgcctgtaatcctagctactcgggaggctgaggcaggagaattgattgaacccggcagacggaggttgcagtgagccgagattgtgtgactgcacaacagcctgggtgacaagagtgagactccatctcaaaaaaaaaaataaaataaaaaataaagaatatagtttaccttgtatattttggcagttttctctatttaattccttacagttctcgtgaaaaaaaaatttcctttcttcctttaggagacaaggacggcagcaaggtgacaacagtggtggcaactcctgggcagggtccagacaggccacaagaagtcagctatacagacactaaagtgattggaaatggatcatttggtgtggtatatcaagccaaactttgtgattcaggagaactggtcgccatcaagaaagtattgcaggacaagagatttaaggtaaaatgtccagtatttcatatattttgttgctgtcgtaatacatataccataaatgattatttttttagttgcttctttttgcttcaaatttcttctattgtgcgcatttttgttcagctcaaccattgtagtgattttatttctagtcatgtattttgtagagataacattcactgaagattgcagtattacttttgtagtcattacaaatgacatatgtaatatatgtattttttaatcctgtgaaaggtaagttaaaatttcttaatttatactataaaaagtgacctgtcctcaccgttgtactgtgttgatgtagaccagaggaacactgcctgtagcatataagcattttatgtatttgactatgcttccttttttcaaaaaatttttttaatccatgttgcaacttgtgttagtctgtttttgcatctctataaaggaatacctgatattgagtaatttataaagaaaagaggtttaattggctcacaattctgcaaactgtacaggaagtgtggtgcagacatctgcttctagtaattgtctcaggaaacttctaatcatgggcagaaggtgaagggcgagtaggtgcatcacatggcaagagctgagcgagagcatgaagggggagatccagactttattattattattattgttattactattttgtagaaacggggttttgccatgttgtccaagctagtctcaatctcctgagctcaggcaagtcgcctgtctcagcctcccaaagtgctgggattacaggcgtgagccaccatgcccgtccccagactctcttaaataaccagatctcctgtgaactaactgagtgggaactcactcatcaacaaggggatggtgctaaccccattcatgagtggttgacccccttgatccaatacctcccaccaggctctaccccgtctctactaaaaatacaaaaaattagccgggtatggtggcgggcgcttgtagtcccagctacttgggaggctgaagtaggagaatggcgtgaacccgggaggcagagcttgtagtgagccgagatcgcgccactgcactccagcttgggggacagagtgagactctgtctcaaaaaaaaaaaaaaaaaaaaaaaaggagattacatttcaacatgaggtttggaaagggataaacatccaaaccatattacaacactatccatttttctcgtaactttttttttttttttttgctatcttcccttttttttcttgtccttctgcctttagacactagcaatcccaaaattcagttctcgtcatgtattttcattttctgtacctcattaggggagcctatgcatggaagctcagatgtcatctctatgttgtggtatagcagagagagtcagaagacaccgggtgtaattaagcctctgtcactatgcagcgttgctccctttactactcttccaacctctgcaacattttagtgggagcctccaatgtaccaagatctatggtaaacatgaagggatataacaagaagaagtgatcactgttctggtataacactagttataccacattctagtgtccatctgctgtaaatatctggaacattctaaagaatttttaaaaattcagttgtttttgttttcagttctcacctctcccccaagtactagtctcatgttgtcaaatgcccactggatcttgatatctgaatattgtactgttatctcaaattgtcaagccatcttatctaactatgacttaacttttaagactcaatggaaatctctcctgctagttcccagaactttggatttgccttttctttttaatggttttataattcactgttattcagactgttccatttgctcatccctaatatccagtcattgtttaacttgattttcttttttcctcatactgccttgtggctgtgtctcttctttttctttctcttcactactattctagtcagaacctgtcattatttggcttaaccacttataaacgtgtaccttagtcttctcctttctaatctcttctgtgtactaagactagaataatcccagagttctcattggtcatgttgtttctcttgcccataaatcttctatggttcttcatagtctagaaagtaaaacctgcctagtttacttgtgtacgcagaaacttccatagtcttccattttctccagatacttaactttccaaactttttatgttactctccttgaaatatgttcttctctatgaccactc

SEQ ID NO: 32511 - DNA, 1054 bp, Homo sapiens
tgctgattatactcaattttagaactaaggataaattattcaagaaatagttgctgattttttagtttgaagtgttctataagcatattggatttttttttagaacccagtgacagtaatacttctttggaaagaatataattgaatatctttttagaactttaagcaaatttatctttaaaacattttatatgctcagtgtagataatttggaaattacagagagatacaaaaaagaaaataaaaatttgcctgtattctcactatctagagaaaactgtttactttttggtgtgtttgtgtagcatttgttttcaaaattgggatcacaatatatagcaatttgtagctatatactctgctttttcatgtaatcttatgtcatgaatattttcctaaaccattaaatattcttggaaaatgtaattttaatgagtgcttaatagtctgttcattgtgagtgtatcatagtttacctaatgattctctgctattggacatctggattggctctaatttattgatatggtaaataatgccttaatgaatatctgtgtaaatcaattattttcttccagtttctttttactttcttttgccatattcctagaaagggaagtactgggtcaaagaatagggtttcatttttgttgctctgctttttttttttttttcctgagacagagtctcgctcagtcacccaggctggagtgctgtggcgtgatcttggctcactgcgacctccacctcctgggttcaagtgattctcctgcctcagcctcctgagtagctgggattacaggcacgcaccaccacacctggctaattttttggtatttttagtagagacagggcttcaccatgttggccacactggtcttgaactcctgacttcaagtggtctgcctgtcttggcctcccaaagtgctgggatcacaggcgtgagccaccgtgcctggccgttcctgctgctttttttttttttttggaagtcttgccctgtggctcagactggactgcaatggtgcgatctcagctcactgcaacctccgcc

SEQ ID NO: 32512 - DNA, 1012 bp, Homo sapiens
aactcttacagttcaataataaaataaagtccaattaaaaatttggcacaggttctgaatagacagaacctatgtatatctacttctacaaggaagatatacataatggttgataagtgcatgtattagtctattcttatactgctatacagaactacctgagactgggtaatttatgaagaaaagaggtttaattgactcacagttccaaaggctgtataggaagcatgggtgggaggcctcaggaaacttaaatcatggtggaaagtgaaaggggaagaaagcacatcttaccgtggtggagcaggagagagagagagagcgagcgagcaagcaaagggggaagtgccacacactttcaaacaactagatctcgtgagaactcactatcacaagaacagcaagggggaagtctgtccccatgattcattcaactcccaccaggcccctcctccaatacatgaggattacaatttgagatgagatttgggtggggacacagagcaaaaccatatcaatgcacgaaaagatgctcaacatcattagccattatggaaataaaaatcaaaaccatgagataccacttcagactcattaggatggctagaataaaaaagtcagattataaccaatgtttgttaggatatggagaaattggaaccctcgtacactgctgtgggaatgtaaaatggtacagctgttttggaaaacaatctggtagttcttaaaatacacacatagagttaccatataacctagcaattctatgcctagttatatatacccatatgttcatatatacacatgttcatagcattattcataatagctaaaagtagaaaaacaacccaaacatctatcagttgatgaatggagaaatcaaatacgggatttccataaatggattattactgaggaaccaaaagaaatggaccaaagcatactacaacatggatgaacctggaaaacattctaagtaaaagaagccaagcacaaaagaccaagtatcata

SEQ ID NO: 32513 - DNA, 1017 bp, Homo sapiens
gttctttaaagcagttttaggtttacataataagtgaacagaaagtagagtgagcctatataatcccttacccccacccatatttccccatttcccctgttattaacatcttgcattggtgtggtacatttttcccggttactaacatcttgcaatgctgtggtacatttgttacaattgatgaactaatattgatactaaattattaactgaagtatataatttaccttttataatttccattagggcccacactttttattgtatagttctgtgggtattgacaaatgcataatgtcatgtatccacgattacagtgtcatgcagaatagttttactgcctccagaatcccaacatccacctatttagccaccttctcatccccctcctcccatcccctcctcccatccacctcctcccatcccctggccaccactgaactttttactatctctatagttttgtctttttcagaatgtcctatagttggaatcatacagtatgtagcctttttagacgtggttctttcacttagcaatatatttaacattcctttatgtctttttctggctggatacctaatttctttttgtccctgaataatacctcattgtatggatataccacaatttttttagctgcttacctattgaaagacatcttggttgcctctacttttgggcaaatatgagtaaaactactgtaaacatttgtgttcacttttttgtgtagacatgttggaagtaaatgcttggtgctgcaaagtgaaaccagcactcaggcaaaagttttcttagcaaggcagtttatttttgcagaagggcgtgtctcgtggatggagcaatggcgagagcacagggaacaaaggagagaaggggtttttatttctgatgtgtagtccctacctcagtgtcactcccctgtgggctggggttgaaccgcacaatttaagctgacttgattggctacttgtgaatttttttttttaaataaggaagagggaaggggaaggtgag

SEQ ID NO: 32514 - DNA, 1002 bp, Homo sapiens
taagataattgcccgaaattggaagaattaaggttttttagggtacggcttaggaacttctactttttgtagtgttacttatggaggagaaagtaattgtcagtcatatataagtacagtttattttattttaaaataaaaattttaagagcaaataccttgcttttaaaactgatctggctagctataaaacagtggctgtgagagatgggtaagaagtgtagttgaaatccatattgcaaaatcagttttgagcctgagctcctatccttttcttttcttctttgagatggggtcttgctctcttgcccaggctgaagtgctgtggtgtggttgtggctcactgcagcctacctcctgggctcaggtgatactcttgcatcagcctttcaattagctaggactacaggcccgcaccaccatgccaggctttttttttttttttttttttttaattttttttgtagagatgaggtctccctatgttgtccaggctgggcttaagcaattcttctgccttgtcctctcagagtgcagggattatagatgtgagccacagagctcagtcaggatcactttaacagatgaaactgaatcttagagaagttaagtaactcttgccaaggtttcatagccagcaggtggcagagcctggattccaacccaggtaatttagtctagagctcttattcttaactactttactgtcctaagagtatgcgaatgtacagaaatggagccttgctacctctggtaacttgaaggcaccaattttgcgttcagttaacatatcatagtttgatccaaggcaagaacagaagtgttaacacttcacctgcctctgtccttattatttcccatggttattggtctcaataatttttgttgttgttttatattattcttgcactggaaaatcctttgtacttagttgtcatttaataaatgatgaatgttgaaaaataagccagaaattgaaaactttgaatcttaaatatagag

SEQ ID NO: 32515 - DNA, 1032 bp, Homo sapiens
ctcccaaagtgctgggattacaggcgtgagccaccgcgcccagccgcccatttttaaatagagttatatgttttcttgctgttgagttgtatgatgtttttataaatcttgaatattaaccccttatcagatatatggtttgccaaaatgttttcccagtctgtaggttgtctttttattttgttgtttcctttgctgtgcagaagctttttagtttgatgtagtctcatctatttttacatttgtttcctgtgttttggtgtcatggaaaaagtcattgccaagaccaatgtcaaggagatttctccctatgttttcttctaggaattttgtggcttcaagtcttatgtttaggtttttatccattttgagttggtttttgtgtctggtgtaagatgaggattcagtttcattattttgcatgtggaaatccatttttcccaacaccatttattgaagaattgtgttgtcttggtgcctttgttgaaacatagttgacggtctatgtttggatttgttgctgggctctctattctgttgcactggtctgtgtgtctgtttttatggcagtactaaactattttgattatagttgctttgtaatttaattttaactcaggaagcgtgaagcccccaacttttttttttcctcagaattgccttggctgttcagagtctggtggttccatgtgaattttaggattgctttttctactcttgtgaagaatgccattgggattttgataggaattgcgttgaatctgttttgttgctttgggtagtatgataattttaacaatattcttttgatccatgagcatggaattctttccatttatttgtgtcctcttcattttctttcatcagtagttttagttttcagtgtacaggtctttcaactttttggttaaatttattcctaagtattttgtttgttgatactaacacaaatggggctgttttcttaatttctttttcagcttggtcattatttgtgtatggaaatgccatgaattttttatgttgatttta

SEQ ID NO: 32516 - DNA, 1029 bp, Homo sapiens
atctttttttgtgttaatttcttacatatagctgagaaagcctagactttctaaagtctaggaaagaggtgagaaatgctgctgtggaccataggagttggggtgggggaagaagctaattagaaaaaagtttgtggtcatgatagattttgagtttctctggatgctgttaatgatggccggaattttagaattcagattcagctactctttgaatgtttattgtgtgccaagcactctcattccatttaactttcataatgctctgtgacaatatttgccccatttaatgagtgaagaatctgaggttaaaaaaaatatatttttttaattgatttattccggggccttacagttagtagggaataggttccagatgttgatcccaggccctccagacttgaagtaaaggaagaaaattttttgagtacttaccatgtcattgtacaatagtaagcaattaatttaaaataaatgttactatgtatatttaagatatacaacatgatgttaatatgatacatattataataaaatggctactgtagtaaaagaaattaacatctccatctcacatagttacccaccccctctccctcgcccctaccaagagcaactgtaatctactcaactcttaacaaaagcctagatacaatacactattattaactatagtcttcatgttgtacattagatcttttgacatgtttatcccaggtatttgctacttcctatactttgacctacatctccccatttcctcccctgctcaacctctgctaaccagtttactctctatctctgtatatttgacctttttttgaaaaaagatttcacatataattgagatcatgatatatatttttttctgtgtatagtttatttcagttaatgtccttcaggtccatccatatgtgtgtgtacacacacacatatatatatacacacactgaagtttaaccattcgtccattgatggacacctagggttgtttccatatgttggctgttgtgaataatgctgtagtga

SEQ ID NO: 32517 - DNA, 1060 bp, Homo sapiens
ctcagtaaatatgcatccagtgatcctgggaggaaagagatttaaatcccaacggtggctgctgccaacaaagtgactgggaaaatcatgcatttcaaggttagagaactatggagtacagtcttttcagctgtaacatgtttctataatgcaaagtaatactcaattggtattacccagttggtaataagaaaattatgtcattgattcatatgttacttttcccccagcaaatcaataatttaaacattcaggggcaagctttctcacagctagtaaaggaagctttaagcttggcagttccttcccttggtgcaagtagtgtctggcttaatggcttaagaacttgtgtcttccctacaagatgaggctgtaggagtagatgaagaagtggagaagacatttgccttatgtttaaaaacttcagttgattgttaaagaaagcacagatccagagcagatttttaattttttgacaatgttatctactggagatgaatgcccctgaggacctgtgtcttgagatttaagactgtagaagttgactttgatcctgggtacaaatgctagtggacatttactgggtggtagtgttttagttggaataattaatattttattaatactcttgttacaaagttaactgttttgagtgttatgaccccatcctattttccccacagtctattatttttacatataattttgcagaatacaaggtttatcaagtatttatatatcctgttaaaacaggaacacctgtaaacagcattatactagaaacccttatatttctttcactctattaaatattttgctgcctgttttgtttgcagtgggagcatgacttggcataaagaataaaatattaagaggtattgtgaataaaaacacattttacaattaagtggcttacaaggtcagacaaggaaagataaaataacccagtttcaaaagtgttttattgaacaatacatttgttaaaagatgcagcatcacaatcagatgctttatttcgttacaattctgtggtctctaaatttgggactgtgtgtgtgag

SEQ ID NO: 32518 - DNA, 1045 bp, Homo sapiens
attccagctactcaggaggctgaggaaggagaatcgcttgaacccgggaggtggaggttgcagtgagttgagatcgtactattgcactccagcctgggcaagaagagtgaaactccatctcaaaaaaaaaaaaaaaaaagaaaatatttgcatctgtgaactgtcttctgtgttgaggatgtttgtggcagaaggagatagacgtaggctctgtctacgtctgcctggtgcctccacaaggagcagtgtatgctcagagaatagaagtgaattttactattagtataggtgacccatattgaaaatgtttgtaaatctgctaccagaacaacacagtcattcaaagacaattaaaaatgcattttatacttcctgctatttataattattcatggatctgctgcctacagtcaggtagtaaaaggagagccagaaggaatcatagtgaacatctcatacaatgctatctttgttgttggtttgaacataagcatttttgcgtgaatttgcgtgtaggtctcttttatttctcttattgcataacctgaggctgaaatacttcaagtaatgtatctatttgctcatattgggtagaaacatccctattattccaattttcccttctcctgcttaaaacatatagtgaaatgaaagatgcagagataaggaaatcagggaaaagaaaaatagtcataggatactaaaatgagccacagatacctgaaactgcatagttgctataaatgagccataaatttgattctgagctttccagtggccccaaaaagataaacataatagtatttattccatgacataaaaatgtatttgtatttctctgtgttcaagaggaagagaaatttgtactatgggtcctcatgaaggagccactaagtcagtgttgtagaccacacattcaacgatatcgtattaatacccatgatgatgaattcattcattcaataagcatttattgagtacttactttgtgctgtatatgtttcagtgtattgcagtaattattctttttgatgctcaaattgtc

SEQ ID NO: 32519 - DNA, 1070 bp, Homo sapiens
ctctttgtgggagatgcagctacttttgccagaacgcccaagtatctaagcctccagggtctccacgcatgcctgagtggctgctttgctgagactccatgtagccctgtctgccagactgaagactgaaggccctgctgctagtggagtggattcacaaggagatctcctgacaggagggttgcaaagatctgtgggagaagcatggtttccggggtcgctcattcacttaccacttccctgggcaggggaagatcccctggttccctgttgctcccaggtgggctgttgtcctgtcttgcttttccttgttctctgtgggtcaggttgtttccttgattaatcccaatgcgagtacccggatgtttcagttgaaggtgttgtatctactcgtcccttctgttcctctccgtgagagccatgtacattacctgcttctggtcagccatcttggccactccccatccttatgaaagtttacactgtattacaattgcacaggaaagttactgcaggtttgggagtgggacagaggatagaggatgttggcttgttttgtcaagagagtgacattcttaagtctatgttggtggtggggacagataggaggcaagaaaatcagttaggaaattattgaaacaattcagccccagataatcgaagcttatcaagagcagcagtgtgagaatgcagagaagtggacagttgccagaaacatctcagaggtaaacatggcaggcctggaagatgaaaaccttcagtgcctggcaactgaggggttggaaatactccaatctcagaaaagagaatactgggattggaggtgggggccaagctgggagaaagatttcaatgtcttgcagaatatagagaggggttgatgagaataacagccgaagagcccaggggaattcccaggttaaaaaaaaaaagccccacagagatcagaagggcaaatcctcaatctagagccacagaagtgaagatttggctctagactctgaagtcagctctcctacggaaaaaagatggacccaggcctttttaactcaggcagcccccatggagga

SEQ ID NO: 32520 - DNA, 1075 bp, Homo sapiens
ttaccattttgaccatttttaagtctacagttctgtggcattaagtacattcacattgttatgcaaccatcaccatcattcactaagaaaataactatgtatattaagacaagcagggttgatctggggattttagtggctgaaattaaattcaatccttttaagacactggcatcctaaaattcaagattcaaattcctgggacaggaagtgtatttgttttagtgtggcttgtgcccactattgtggtcaggagagtggggtttcaagattggcagaccactagaattgcatgggagggacagtgggaggcagacattttccaaaggagtgaacttggggcaggaaaaaaatacttgatgaccactaaatgtggttaccatttagtggtcataatatatttgttaactagaattttgtttaatcaaaatggtttatataatgtgatcatgccagataataatatacaaaaaatttgtactatattatagacacaactgtgtttgtggatggggcaatgtgaactaatattaactgagcatggaattagggcatcagatggtgtgtcatattccagaataagctgtgaaatactgaaatagaagattggtttccctaggaagtttgaaactgcaaactattttcatttcttaagtgctatattgattctagttacaaaataaatgctacatgagcttcatgtcaacctataaaagttgtaatggcttaaaaaattacaagcgtagttaaaagataaatgatagattggggaaagtgcttccatacataacaacatattaaagagttactatccataatatgcaaaaaattcctgcaggttgaaaagaaaaagaccagtagctcaaaagaaaaatgagctaagtatacgaataagcaatttacagaacaaaaagtccttagagggaaaaagacttcagtagtagtcagtgaaatacaaattaaaggaacaacaaactatcactattcacttatcagaatggctaaaattatgcagagcacattgttacagccttttattttattaattaatttatttatttatgtatttattttt

SEQ ID NO: 32521 - DNA, 1048 bp, Homo sapiens
cccaggacgtacaaaagatcttatattaaccaatcctctgtgaattttgccatatcaaacattgtgccttattttaataaaactgttttgttggaatccagttctatattaaagtctctataatgttgatatttgcctgattacttgttacatcattgaatacatacattaaatatgtactaacattgactctgttctagatgcaatggataaaagataaattggacttgtcttctagtcttccttctgcttccacagtctcaatagacttacgggtgcatgctctaataagaaattggtgacatcatcttgctgactaaggccagttacttcttgtatttagtacagaatcacacagtcttaacccacagtaatatagttctaactgagctcattgacatagcacttcataccaatattttatagtgccattattttggcacctgacatttttctagattccaggatatggaaaaatattgtggttttaagttggggtaaacagagtggataggaaggacatgtactttgcaaaacagctaatgtttcaaatgtgctaagatggaagaaactcagcacttccctggttaatatataggatggtgatatggtttggctgtgttgccacccaaatctcatcttgaattgtagcacccataatccccacgtgtcatgggagggacccagtgggaggtaattgaatcatggggcgggttttcccatgctattcttgtgatagtgagtaagtctcaggagatttactcactagggcagttctcctgcacaagcctgctgccacttaagatgtgcctttcctcctttgccctccaccgtgattgtgaggcctccccagccatgtggaattgtaagtccattaagcctttttctttataaattacccagtctcggatatttcttcatagcagtatgaaaatgggctaatacagatgactgcttggcaaagacaggcccaaaaaatttgagggagaagagaaaacacatagagtgtatgtgtttgataccctctatgtgtttgtctgatctcttt

SEQ ID NO: 32522 - DNA, 1083 bp, Homo sapiens
tacaactgtcttttggtaatttttaatgaagtctacatttagccgtcggttttatctttcttaaatctttgacctaaacttttgtaagagcagctaataatttctaagattttccctgtttctttttcctacctttccttttctcataactgattggagaaattaatcagaagtcaaatacaagggacttcataatctagaaaccagataatcagctcccaagtcatgtagctaactatgcatttaaaataagtctgtctctttagttcttaagtcatatatttgtttgttaattacagtaaatgaactttaattggggtttttaaaagacagaattagcgaagtctaatttttataatgaaataagtttttgatattgctctacttggacgattttagtgaccaaaactatggataaaactgcctaagcataacattaatatatttagaatggcattcttcagtgctagtatttgaaattggaattagtacattgtgcattcttagtagtctttatccctagaatcaattctctcagcatcaccaaactgaattggtgaaatagtgctaagattctgggcaataggaagattagtgaatatgatacattgattccagggtgccagggattggctgacattaaggaccagctggctatggtcctcaggctacggtcctcagtattctagtatttgagtagtggaggtaaatccaaaggcgactggttatattttacttctaaatgtgtgctgaagtgtctcttgttcaaaaattcttgatatttagagcttcaagttaccacatttaaaagtaaagacttggcacggtggcacacacctataatcttagcactttgggaggccgaagtggatggatcatatgcagtcaggaatttgagaccagcctggccaacatggtgaaacctcatctttactaaaaatacaaaaattagccgggcgttgtgacgcacacccatagtcccagctaactccggaggctaagacaagagaatcacttgaacttgggagacagaggttgcagtaatctgagatcactccgctgcactccagcctgagtgagagt

SEQ ID NO: 32523 - DNA, 1550 bp, Homo sapiens
ctttaggagtctactttgactgctgtgtcagacaaattaaatttgtggacttctgtgggaagtatcgcctcccactgatgcactacttgtgttcaccagaatgttcttccccttgcagttctgcctctcacagctccacttcccagagtgaatctgactcagaagatgaagctagtgttgctgcacgcagaatgcagaaagttcttcttggttgaacaggagtgcacagtgttgtgaaatacttaaaaaactgagcaaaatggttagacaagaaaatagagcttgaagttcactagaaatcttatcttcatcttaagtgttcatcaaagagtctgggatgatataaaacattttgtgtttcatctacccattcagcaagaatgagtccagtcccatgtttagattattttaacataatttgtgaatgatagtttcacatttggctgatggtttgcagttttcactcaagttttgcatgaatcacaaagcagaatggtaccttttgaagagcagttctgcaataagtcatgagtagtataacttttggacattgagatggagaaagtgagaaattatcaaagctataattgccagagttgcccttgggtttaggtagaacactgtataccatatatactatataccatatatactatatataccatatatattatatgccataaacaggattaaccctcccttttctaattgcctgtatgtctagattacagaactattcaaagaagctcacagatggttacatgggacaaacctttctgacaaactaactggtaaagtaaggcatataacatttacatgagatattaaaactttttcattattatcctttgttctatatgattgctattaaccttatgtaatctagcaatgactgttatagtgccttaatccagcaaggatataaaaatgtattcaagaagtaatgccagagcaacctataacctgacataccatgcagaacattgtaaaatattctttaacagaactaggtaaataactgtgtatctaatatccgatctcatggccctcttaacatttttttgtttaaatgtgcactcatcccttataagcacattacttttacacttaatggtaggccacaatcttcatcaatctgttcatcataagacagagtaagaatttttaacagaaaattctaaaagagatagaagctaggaaagcttctttatatcttgcattaaatgggtagggaaaaaatatgactctcacccatgtcatgtactggaccatctttctctactttttaaagaaaaactaatacaactagaaaaacatcacaacaagccaaataaaaatggagaaaaggagtcattgtccttatacctaatggaacagtttccagaactactttaactatggaagcatttttgaaaataaagtattaataaaatagaaaaaaattattaaatatattgtatccttaatgtatagcaggaaaatagtttcacaaattaattgctattagaaattaccaaatttttattaagtactttaatatgcaatacaaa

SEQ ID NO: 32524 - DNA, 1071 bp, Homo sapiens
ctcagacttggatggagtttctgggagggtacacccaaatgatgcagatacttgtatactttgagccccttagcgacctaaccaaattttaaaaatactttttaccaaaggtgctatttctctgtaaaacacttttttttggcaagttgactttattcttcaattattatcattatattattgttttttaatattttattttcttgactaggtattaagcttttgtaattatttttcagtagtcccaccacttcataggtggaaggagtttggggttcttcctggtgcaggggctgaaataacccagatgcccccaccctgccacatactagatgcagcccatagttggcccccctagcttccagcagtccactatctgccagaggagcaagggtgccttagaccgaagccaggggaagaagcatcttcataaaaaactttcaagatccaaacattaatttgtttttatttattctgagaagttgaggcaaatcagtattcccaaggatggcgacaagggcagccaagcagggcttaggatatcccagcctaccaatatgctcattcgactaactaggagggtgagttggccctgtctcttcttttttctggacctcagtttcctcagtgagctggtaagaatgcactaaccttttgatttgataagttataaattctgtggttctgatcattggtccagaggggagataggttcctgtgatttttccttcttctctatagaataaatgaaatcttgttactagaacaagaaatgtcagatggccaaaaacaagatgaccagatttgatctcagcctgatgaccctacaggtcgtgctatgatatggagtcctcatgggtaaagcaggaagagagtgggaaagagaaccaccccactctgtcttcatatttgcatttcatgtttaacctccggctggaaatagaaagcattcccttagagatgaggataaaagaaagtttcagattcaacagggggaagaaaatggagatttaatcctaaaactgtgacttggggaggtcagtcatttacagttagtcctgtgtctttcga

SEQ ID NO: 32525 - DNA, 1030 bp, Homo sapiens
tctcctgtgttttgtttcaggggactctgtgttgatgctctcattgaactgtctgatgaaaatgctgattggaaactcagcttccaagagtttctcaagtgcctcaacccatctttcaaccctcctgagaagagtatgcctaacctaagaaatagagagctgtagtgaatggaggcattttgtaggagccaagatagagaggattggtggaactctccagagctagctgagaaaatccccttccatgattctaaactgggccccagcccattctccccatggtgaagttagggccccacattctttaggttgatggtagtgtttgctcagatatagtgcttctgagggacaggcaggtcttgtctgggaaaaaagggtaaggtgcacagactgtagcaaagatgccctgttccaccctcacagctaaactgttgccccgtatttctggcccaacagagtgtgccctggaggatgaaacgtatgcagatggagctgagaccgaggtggactgtaaccgctgtgtctgtgcctgtggaaattgggtctgtacagccatgacctgtgacggtgagctgtgcttcaagcagaaagaaaaaacagcaaggagagagcttcatgaaatcagcatgagagaagttggggtggggatgatggagaagagggcggtggctgggagcaaggaacccaggcagacccacacctgtaaggttggagccccaagtggggagctttgagggcagaacatttatcccataggcattcagtttgaaaatcactccagaggcttggaataagagaggaccaagaccctgggcaaaagtaaatgataatggaatagtaacattatggaaatagtaacagtgaaagtagtaataatggaataataattaaaaatagtaattatttaataattaaaacattaaaataaaaacaataattattatttaataataatcaaaaataataatggaatagtaacagtgaaagcaaatactcagcaaaaaccatgtgccaggctctcttctaagca

SEQ ID NO: 32526 - DNA, 1063 bp, Homo sapiens
atttctcacataagcagcaaaatctctctgtttcaatattctcaatctttacaaatattttagagatgggtgcttgaatcctgggctagactttttccagttgtgtaccctggatgtgctaatcctatctccctgtgttgctgggatgacatatgcagaaccatgggcacggatgctcccacacagtgggtgccagatatcactggggtcctcccctgactgctccagctgacatcctccactttcctgcagttgtttgctatcagtccaaccgtgatgagctccgacgtcgcatcatccagtggctggaagctgagatcattccagatggctggttctctaaaggcagcaactacagtgaaatcctagacaagtattttaaggtaatccagaggtaggaggaagactattcaggcccatagaaagggaagcttcctcctcccattgcccgatcacaccttcccagaccacaggaaatgtaaacctgcacagacaccctgagtttcctcatcatagatcattcatgaagctgtgaaagttgccttctgaccagcttgatcagtgggagtaagcagtggagtctttgggatctaacacacatgtgctgctgccttcaggcagtgaaagccacaaaggtcttggagaacctgtcagttagggccaagctctgtcccctactcgccatgacaccttatggatctggctgttaatacaaaattccctctgattgcacccagacctggaccactttggcctctttcctgcctagtttgacatttctctaagtcattaacttgactgccaatggcttggagagagtcttcatatgagaagaatcaatggactggcatttcatgggtccagagattgttcctgaacttagatattgctgttcccaatcataattagttgaagagacagagtgttccacttgggagcaggagagatgctattttcacaaagagaaatgaaggaagctataatatttagtgatggctcgggttatcatgccatgcagatctttcacagaacttgagagttagaagaagcaattaagggcatt

SEQ ID NO: 32527 - DNA, 1047 bp, Homo sapiens
aactgtggacaaaggaaatgactgaaagccattttcgtcctccgttgctcttctacctcattaacacacatatgcatgcacacacatgcacaaacacactcttcaatgtctttctgtgggcctaagacaatctctaattagtgaaattccaggctgaatatatatggcctggtggtggagggcagggtctttagggtatttcctcaaagaagaccagttctgggagggagcagccccaggaaaggagttggcacaggtgttgttcctctctgtccctatcccaagtccccagggcagtgtggttcaatccacctttttttgctttcaacaaaggttaatggagtggcacaaggtatactaggtcctacaaaaggatggacaaacagaatctttgtcctctaggagcttgtagttcagccagaaagacaaaatccacacagtcagttctgtttttaaaaaaataaatgatcaaaatgagttcatacaaagaggaatcaaagttcagagaaggaagggggaattcataccagtagaaagtaaaaggtcactgaggatggagtggtgtaacttgacccaagccttgaaggacagggagaatttgggcaagccagacaacaaatcagacttcccagatggtgacattatttttttaggtggtcttgtgggacattctctgcctatctgaaggttaaagaagcatctgacaattcctcatcatgctgacattttcaaaggctaatgagttctcatttcaaaacatagagccttgggagccctagaccctttttttaaattttagtccacttacagcttaaatctgctgtggctacctgctctgcttacagacacttcccaaagctttcagtatccagggtccctaagaagtggagggttgctcgaagtgaggagcccacagatctcgaggctacatgaacaatgaagtcacccaggagagaggaaaaacgccctgtgccatatgccaaagactttgttaacagtgcccaggtagaaggcagtaggtgacagtgtcgggcatccaactcagtg

SEQ ID NO: 32528 - DNA, 1024 bp, Homo sapiens
caactataatcccagcactttgggagaccgaggtggtggatcacttgaggtccggagttcaagaacagcctggccaacatggtgaaaccctgtctctactaaaaacacaaaaattgtccgggcatggtggcaggcacctataatcccaggtactcagcagattgaggaaggagaattgcttgaacccaggaggcggagtttgcagtgagctgagatcatgccactgcactccagcatgggcaatagattgagacttcgtctcaaaaaaaaatgtacctactagaaaattttaaattctgtatgagatgggtattctatttctgttggacagcactgctctagacagttgtcacttaaccatagccacacattgtcttgagttatctcttattagattgtgttgttctgttatttaaaattgcatatattcattcccctagcttctcacctaagctacaagctccttagagacacagagtgtgctttactcctccttgagcccctggcacttggcatgatgtttggtatgtttttgattgtcctgtatattacttatagatttcatctatttccatgttagatattgataaggaaatgcagattaatttgtgtttggattgttgcttttcttttcaaaggaactgattttatgtagttcttagtttgttccacaaagattaacattcctctaaactggactattaaaatccaggggacctgtagagggtgccagaacttcctgacacccatgcctagtagagaacaatggtgttaaaattgatgcttacaggttttaaggagcccctcctgaccaccccagaaatcttgagaagttccaaactcagctcagaaacttgtgctctacttttcaggacctgtctgagtaataggtgcaataaattaggcatgttggcccagggactcccagccttaaaccagggttgagaagagggtcaccaccagcctgagtcaatgagtaactgtcaggaactcctaccagatggctgtgattcccaaagtctct

SEQ ID NO: 32529 - DNA, 1026 bp, Homo sapiens
ggggttatatttgggagctcctctatgttctttagaattgttctgatggtagactcaagtaagccttgcatctaacccatatctctgactgcatcttcttggtgccacaacttgtattattaacaaagctaaaaagatctctaaaatgatctcttgcttgtttatcctttggcaaataagctacttgttgcagttctaaagaccattgctggaaattggggtgtaaaacatagcaggggctgtgcagactagccagaacagaagggcaagcacccagcataggaggccctggccatcgcaagtggctttagaaggtggacacgttacagttcccctagaagtctctggattgggtgacagaaaccaggactccatccccaggctcatagaagcaagttggagaggaaccatgaggtgaagatctggtcatgggctgaagtggatgtaatgatccgagaggaaatgccccaaagacgaaaagaaagtctttgaagtcagtggggcagagcaacacatgctgccacaagaataggaagtaaaggatgagctgtaaattaccagtgatcacatatgagaattgaaaatgtcatggattctttgtcttagtcctcttcaaataactggacatctggcagaatgtttctaacagacataaattttattagcttaatgataccagttaatagggaaaaaaagtacattagataggttcactttgtaagccagatgattaatgtcctcagagggcaaatgcatactttttgtttaggatgctctattctgactcctgcgattttggcaaggggtgctttctctgagagtatgccatgaatggcgtggccttcccttcactgtcctcatcgagcctatcccctgctgcagctgagcgcacctggtactcaggtcagagtcacagtgaagcacaaggcatggtctctgccctcacattatttacagtctagtggtgggtccaggtgctttaaatcgtggcagctacagtttatattattataactacatagtaac

SEQ ID NO: 32530 - DNA, 1026 bp, Homo sapiens
gcttgagcccaggaatttgagaccagcctgggcaacatcgtgagaccatatctctacaaaaaataagaaaattacctgggcatggtagcacacacgcctctggtcccagctactcaggaggctgaagcaggaaaatcacttgaacccaggaggttgaggctgcagtgagccgtgatggtgccactgcactccagcctgagcaacagagtgaaaccttgtatttaaaaaaatagaaacaaactcattaagcaaagtgtcatattgttttgaatgtgttccatggtgtcctacttccttggcacctcagggttgctttctgattgcttcttctctttcttacctgctcactctcttactactctgtctgcagcatataccttcagccagcctccctccagattctgccacatccacctgagcacacacacccatgcactctgtagtctgcttgaaagaaggtactgggtgtagcatatgtctctagatgtgtgtagattaacatgtgaatggactaggcagagagggcagcagcagagggagtgcctgcactaataattacacagatatcccttttctagattctctggggagaggactgtgtgagcctgctcatctactctttcccatccccctcccattgggaattactacagttcattgagaagtgttgatggtggatgcatagtatggagcctgggaaaatgttaagaacacaggcggtagtgtgtgtgcccttgaagctcagtcagtggatatctgtcactctaacatggcaggctggagagaaccctgtggcccaactgcctgctttaggaagacagccctggcaagtacccaagcatacccccactctcccttggtggatgtctctgctgtcactatgattcccagcattccaggtctagaaattcattatgataagtcacatgtacagttaactgatttgtagttcagaatcctcattccagtaagggatccatgcttgacccatgaactttgagtgtattacctaagagagaacaatag

SEQ ID NO: 32531 - DNA, 1057 bp, Homo sapiens
aactaggactgctttcctggctgaggatttcaatccagaagaaattaatttggtatgtattttcactaatgcatgcttgtattattatcgggtaaagacaaaactgaagacatattcaaataatatattctagtgaaagaagctttatacttgaaatcaggctatttggattctagtctaaacgtagtcaagattggaatcaacatatctagactgagagatgtgcacagtcacttcagccttttatgttggtctgttggaatgttccaactttattctatgaataatttaaatcataggcttctttttttgaaacagagtctcgctctgtcgcccagactggagtgcagtggcgcgttctcagctcactgcagcctctacctcctgggttcaagcgattctcatgcttaggccacctgagtagctgggattacaggcatgtaccaccatgtccagctaattttttaaatatttttagtagagatggggttttgccatgttgcccaggctagtcttgaactcttgactggatttgccctccttggcctcccaaagtgctgggattacaggcgcgagccactgcacctggcccatgggctttttcttgagaaaggtttttaaaatcacaccaaaattaaaataaattgattaaagtggcactataagcatattattcttgcttttaaaaagcctcttagcttcttaaactacaaattttaccttaaagggcaacgtaacaaatacatgaaaaaattgcaaaccttaaactaggagtgcttcataaggactaatttatgtacacttatgcatatatagaggattgagtcccttgatgagataactagctcaatgagaactgagcgcgtaaaaaagctaagaaatggttgtcatgtaagcctgttaggatcccagaaaaagatcctggccagcaatttcagtcatggtcatgttgttcacaaataggatttctgcaactgtgcactggcattccagaaatgcagtggtggtggtgtaatagtactagtgagcaacatttattgagcacttacgggttgaa

SEQ ID NO: 32532 - DNA, 1062 bp, Homo sapiens
ccaaaacagcatggtactggtaccaaaacagagatatagaccaatggaacagaacagagccctacacatctacacatctacaaccatctaatctttgacaaacctgagaaaaacaagcaatggggaaaggattccctatttaataagtggtgctgggaaaactggctagccatatgtagaaagctgaaactggatcccttccttacaccttatacaaaaattaattcaagatggattaaagacttaaacgttagacctaaaaccataaaaaccctagaagaaaacctaggcaataccattccggacataggcatgggcaaggacttcatgtctaaaacaccaaaagcaatggcaacaaaagccaaaattgacaaatgggatctaattaaactagcttctgcacagcaaaagaaactaccatcagagtgaacaggcaacctacagaatgggagaaaatgtttgcaatctactcatctgacaaagggctaatatccagaatctacaatgaactccaacaaatttacaagaaaaaaacaaccccatcaacacgtgggcgaaggacataaacagacacttctcaaaagaagacatttatgcagccaaaagacacatgaaaaaatgctcatcatcactggccatcagagaaatgcaaatcaaaaccacaatgaggtaccatttcactccagttagaatggcgatcattaaaaagtcatgaaaaaacaggtgctggagaggatgtggagaaataggaacgcttctacactgttggtggaactgtaaactagttcatccattgtggaagagagtggggcgatttctcaaggatctagagctagaaataccatttgacccggccatcccgttactgggtatatacccaaaggactataaatcatgctgctataaagacacatgcacacgtatgtttactgcagcactattcacaatagcaaagacttggaaccaacccaaatgtccatcaatgatagactggattaagaaaatgtgacacatatacaccatggaatactatgcagccataaaaaatgatgagttcatgtc

SEQ ID NO: 32533 - DNA, 1116 bp, Homo sapiens
aagattgctacacggaaaatttaaaaaacactagtgaaagaaattgagatgacacaaacaaatgaaaaaacatcccatactcatagattggaagaatcaatatcattaaaatgaccatactgcccaaaacaatctacagattcaacacaattcctatcaatttgccaacagcattcttcacagaagtagaaaaaataattctaaaattcatatggaaccaaaacagtctgaatagccaaagaaatcctaagcaaaaagaatgaagctgcaggtatcacattgcctgacttcaaattatactacaaggctataataaccaaaacagcagagtactcgtataaacatagatagataaatggaagagaatagaagacccagaaataaaactatatacctacaactaactgatctttgagaaagtcaacaaaagcatccactgagaaaagaacatcttacttaataaatggttctgcaaaaattgtataaccatatgcaggagaataaaactggacccatatctctcaacatatacaaaaagtaactcaaggtgaattacagatttaaatgtaagacctgaaactataaaaatgctagaaggaaacctagcaaaaactcttgtgtggacattggcttaggtgaagaattcgtgactaagacctcaaaagcaaatgcggcaaaactaaaaatagacaaataggacttaattaaactgaaaagcttatgcacagaaaaagaaataaacaacagagtgaataaacaacttgaggaatgggaaaaatatttgccaacaatgcatctgacaaagggctaatacccagaatctgcaaggaactcaagcaattcaaaaaggaaaacacaaataaccccattaaaaagtgagcaaaatacatgaacaggcacttttcaaaacaacacatacaaatggccaagaaacgaaaaaaaaaaatgttcaacatcattagtcatgagagaaatgaaaattaaaaccataataagataccatcttataccagtcagaatggctattaataaaaaataaaaaaatagactttggcaaagatgcagagaaaagggaacgcttatacagtattggtgggaattagtttagtacaactt

SEQ ID NO: 32534 - DNA, 1044 bp, Homo sapiens
catgctgcaacccctggcccaccttctgaccacaataaaaacccagtctcttccttgttctctcaagttgccttgctctctgcagaaagcctcactgagtaataaaccttttcgtatcagaaaaattccaattaaaacaataagatgccattttcatctttcacagtgtgaaaaaataaaaatatttgaaaataggtgaagatgagactaatttttatacactggtagaagaataatttagtcaacatctatttaaattgtttaaatgagcatgccctttaattcagcaattccacttgacattaacatcttccttagagaaaacacttgcatgtatgcaaaatacatgtgcagatgttcactgcagtcttgtttgtaatatcaagagattggaaaatatctaaatactagttaagagtggtagcaagttatggtttattgacaccatgggataatataagtgagttaaaaagaatgaattataggtactgacaaagaacgatctgagacatagtagagacatgaataagcacgttgcagcatagaaaaattttttagaaggaaacacagcaaactataactcgttagtttagatgagtaggaggtaaccaagggaaatactcacttgatcttgtctaaatttatcatatgactattacaatatgcatttatgtattatttgtgcagttaaaatacattttaaaaaatgtttaaataatggttggattcccaaatcagctcacgagactattgttgaagctgcaaagccgctgtccatttgctatgaaaggtagaagacaatgccattgaagtgcaagtaatacaacaagattggaaatattttatttttataactttattttggaataacttaaaacctaggtaaaagtttgaagaatactaccaagaatcccaatcaagtcggaaatcaccattcaagttttgttaatttctccagttatgtcatttatagcaaaagggtccaatccaagactaagagttgcacctagttgtcatgactgtctagtctccttaaatccagaa

SEQ ID NO: 32535 - DNA, 1546 bp, Homo sapiens
aggaagacaagacactgtattgtcaggccgacagctttgtttcctgtgcatgaggattttggaactctaccctagccctgggatggctgtataaatattgagtccttacaggtagaaaaggagctaagagtgttccgttttgtactagttcttaataagtgaagaattgccaatgcaagatgtttttgtcttggaggaattaaacaaaaatttggagtctttcccttagggtttctaagctccaagcattctagcaaaaactttcagaaattcctgctcatcagtgaagaagagtatgagatgtctttttatttattcatttatttattttattttttattttttctgatttagcattttaagcaccattgggtgaagagctccagtctggtttataactttctcaggggatggtttgggaaacattctttgactgggcagtttgttaactacattttttttttccttaggtagctcagattgtcaagaatgaaatggaaagtgctgtaaaactgtctgtgaaattgaaagtgaaagtgaaaataggcgccagctggggagagctaaaggactttgatgtgtaactgtgctgttgatgaagtcctcccagggaagcctgtgcagatgcagtcacctggaaagaacagagattaccctttcacctacctcagcaaaacaaactttcaagtcttgatagacttagcctagtaattttatagtgagagtttcaaactatatatcagtgtctatagcatcaaaaacttctgggggcgtgggggaagtagaataccaagtataatagttacattcactttcaaagagcatctatgaatttgccttttgtaacttactgtggctttaaacatattcagaacagatgcttgaaatatgcacttagcactttggttccacatctgtctgggtaaaccatgaagaaaatgaagctgctgcctcaatcgacccagacagcagccataggcagataaagatttggtttcaccctggtggtggtaggcatcgtgtgtgactttttttcctctaatatcaattttacagtacggaaatagtattttaaaatagtattggctaataaattatgaattctataaagtagtaagacttggtatggttggagtgtaggaatgaatattcatgaaatgtttcttattgcttttccttccctaattcatacaatgaatgtatttggaatacttacatattataaaataaactatacctcttcaagaggtatcctgttctgtaagatcagatgtttttattgcaggtcaatataatactgccagagacagaaaatacccccttatcagtcccttagtgcctctttctgtttgtggcatggtgagaaaacccatgctgaaaagattgtactttgtgatcccaatcagagggatggagctaatctttttgctgttgaaataaaatgaatttatgagaaactttatatcaacaattgttttgttaaaaattatagttggtctaagagtgtcccttatttagttactccatagcttgttcataggaaaca

SEQ ID NO: 32536 - DNA, 1028 bp, Homo sapiens
ttgtttctcctaagatccatttgattagcctttactcattaatatgaccgctaacatgttatagtgctgaaatctgatactcattttagcataagactagttcagtttatcaaattacttctcattgtgcgatggttttctgtgtaaaacatagtagtgtagccaattcatacattcatttatttgggatggtcttgtacttattttatcattgttagacacatgaacatgatgaaaaatatttaaatataaatgtatttcagttcagcattgatagtctgcatttttaagataatccagaaatgtgaatactgttaagacaaatactagattttttttcctgattttatgtctttattctgcttgattttaggacgaataacctttacagaaccaaatattcagaatgtgccaagagattttgaaatcaaaatgccaacactagtaggagaaagcccaccttctcaagctgtaggcaaaggcctacttcccatgggcaggtaggtgctgtttctctgtatctgtattaataaacttttgtaagtatgaatggctcaaaatagcttattagacaaataaatgaaattaatttaattttatgtttcagacatacccatttctgtcctagaccgttttgaatcctgagtcccatctataaagaagctaattcatgtttaattcaatgtttgctaaaaaaagttctagtatctttgttaagctttaaagtgagtctcagataaagatttggttttctttgtttgtttgtttttttgagacggagtcttgctctcttgcccaggctggagtgcagtggtgcgatctcagcttactgcaacctccacctcctgggctcgagcaatcctcccacctcagcctcctgagtagctgggaccacaggcgtgtgccaccatgcctagctagtttttgtagagacaagggtctcactttgttgccctaactagacccgaactcctgggctcaagcaatctactcgcctcggcttcccaaagtgctggtattacaggtgt

SEQ ID NO: 32537 - DNA, 1033 bp, Homo sapiens
ccatttgaatttacccagatataaattaacacattggtttgtggtttggtagcccacaaattctgtggagatattccagcatggaaaatccgaatcataagttagcagttgtgtccttccttcctatcattaaaatggtgtaaaggtttataaaggtgtaccaccatgcctggctaatttttgtatttttagtggagatggggtttcaccatgttggccaggctggtcttgaactcctgacctcaagggatcctcccgcctcagcctcccaacgtgctgggattacaggcatgagccactgcaccaggccctgatttaagaatttaatctgctaatttcaaagtacaattgttaatcataatccatggaaactgtacacattagtgggagggaagagagaaggggcttaattttacatttttacagatgtttcaggggaaaaatagggtagaaaatatagccacagagctgtccaagttgcccttgtgtagaattgtggtccttataccgttatctatgatttgtctgctcctaggaagtttccttagctccaggctatagcacaatttttaatttaatctcactggcccttttactcacaagtttctgttccttaatagttcactgaaagtctatagtatgaaaaattcaaagttttaaaaataaatgtctcctgattaccttgatatggaaaccgtataagtatccgggcaagcacaaaaacaactgggatacttccagtcatgtgaggagcgaaggaggaaaatgcataaagaaaacagatggtgtaaaataaacttttggtcgggtgtggggaggcagttactttgttaaactgacaattcatttatttttttgaaaaaggtagttttaaattgatactgctcagtattaccacatttccattttgtaaactgtagttatagttttatcaatacggtggtttaaaaaactccaagtaatagttttgagttgtcgatattactctcaaatttaattttgagactgtattatttacagaaaagagattcta

SEQ ID NO: 32538 - DNA, 1027 bp, Homo sapiens
caatgactataaacttttccagtttgaatagaaaaaatacagagttaaatgaagaacaagaagttatttcaaacttggagacaaaacaagtgcagggaatttcattttcttctaataatgaagtaaaaagcaagattgagatgctagaaaacaatgccaatcatgatgaaacctcatccctcttacctcgtaaagaaagtaatatagttgatgataatggtctcattcctcctacacccattccaacatctgcttctaagctgacatttccagggattcttgaaacacctgtaaacccttggaaaactaataatgttttacaacctggtgaaagttatttatttggctcaccttcagatattaaaaaccacgatttaagtccagggagtagaaatgggttcaaagacaacagccctattagtgacacaagcttttcacttcagttatcacaggatggattacagttaactccagcctcaagcagttcagaaagtttgtccataattgatgtagcaagtgaccaaaatcttttccaaacattcattaaggagtggcggtgcaaaaagcgattttccatctcactggcttgtgaaaagattagaagtttgacatcttctaaaactgctactattggcagtaggtttaagcaaggtaagaatttttttaattttattttttcatatttataaactacttagtagactgagataagagttagatttctcaatgttagatattaaatataatctattcaagttgtagtatgtatctcctctgtggatttatgtgtagaacagccttatttattcagcatacctaaattaattaatgatagttgccctccagtataagaggtgcatgtaatatatattagaataaaagtttataaaaataaagataatacatattttgaatatgaacgtgacatttcttttatggtatattaatgttgtaacataatggtttttattaatcaccagtgctcatgaattcttttcttttttctttttctcctttcttttctttt

SEQ ID NO: 32539 - DNA, 1031 bp, Homo sapiens
ttagtagagacagtgtttcaccatgttggccaggctggtctcgaactcgttgcctcaagtgattcgccttccttggtctcccaaagtgctgggtttacaagtgtgagctaccgcgcccggccggatgtttttcaatgaaagttttatggctttcacttttttaaaggcttctacttaaagaatctgtcttagtgaagccttcctttattatgccatttaaaaactacagaaccacccaccacccctttctggtgccttatttttgtatacaactcttatcaccaggtaatatagaatgcattttaaactttttgtttattttctgaattccccagctagaatgtgccatgagagcagatacatttctctctcttcttcattgttattttttcagttcctggtaacagctcagattgcatgtttaataaatacttgccttacgaatgaatgaattcatttctgtcttttcccatctccttgtgtagtgcccggaaggcagtggatgaggaagaggaagcagttgaagaacgtcgcaatatgcgaactatctgggtgactggcagaaaaggtttaactgaaagggaagcagcagcccttatagtggaagaagccagaatgattctgcagcaggacttagttgaaatgggagtgcaatggaatccatgtgccctgttacattctagtacatgctcattgactcatagtgagtccgaagtaaaggaacacacatttatatcccaaactaagagttcttataaaaaattaacatcaaagaacaaaagtaacacaatatttagtgattcttatattaagcattcaccaaatatagtgcaagacttaaataaaagtagagagcatacaagttcctttaattgtaatttccagaatgggaatcaagaacatcagacatgttccattttcagagcaagaaaacgggcctctttagatataaataaagagaagccaggagcctctcagaatgaggggaaaacaagtgataagaaagttgttcagactttttcacagaaaac

SEQ ID NO: 32540 - DNA, 1050 bp, Homo sapiens
aaatggagataataatacccacctcagggctgatagtctttgatgaatgtttggtatctgaataaatgtttaataacatctattatttctagtaaattctcccataaacattatgtaagtcatttgccaaattacctaactactcctactcctgttccctctctaaaacgtgaagactgttggcagtgttagtatgctgaatgcttgtggttagtggtcttgtatacttctctcaccattcgagttgtatgcccttcaagagttagttgtgttcccaaacttgttcatgtcagtttgcttctgagaaaattaggctgaggcagaaggatcacctgagtccaggaatttgagaccagcatgggaaacagagcaagaatctgtcgctaccaaacaaaaaaaaaaaaaaaaaaattgtgtatggtggtgcatgccggtaatcccagctacttggaaggctgagacagaagaatcacttgagcccaggagttctaggttatagtgagctatgatcgtgccaccatgctccagccttggtgacagcaagagacctcgtgtcttaaaaacaagcaaaaaaatataagtgagataactgaaagctctgagaaaaagttataggaatttagacagggaggaaactaaaaggacactgctcaaagtttattttgcagttatctttaatttttatttatttatttattttttgagtagagtctcactctgttgcccaggctggagtgcagtggcacagtcttggctcattgcaacctctgcctcccaggttcaagcgattcttctgccttagcctcctgagtagctgggactacaggtgcatgccaccacacctggctaatttttgtatttttagtagagacagagttttaccatgttggccaggctggtcttgaagtcctgacctcaagtgatccaccctcctcggcctcccaaagtgctgggattacaggtgtgagccattgcacccagccaatgattatctttaatatctaacttcacattacaaaacagaaactggatttcttagacaatatattg

SEQ ID NO: 32541 - DNA, 1031 bp, Homo sapiens
ttattttgaatgtttgttcctctgtttcctcaccctaaccctaaaccaggaaaggtgtatcatccaacacatcttggttcggccactctttcttcttcactttctccagctgatactttagatatttttgctgacctgcaaagagcaatgaagggctttgttttagagaatgatcttcatattctctatctggtaagttctgttttaacaattatgtttgtgaaaatagggagaaaaaaatagatatataatcctgaacatcaaagataccctaacagaacatctcgtctgttttccatgcctaggttagtactggtgggaatagagaagaggtaagaagataattgttttaaagtaataatctaaatgttctagttacctttaaatttattttctccaacctcctttcaaaaaagatttgagttgttttataaaaaatatatatttttacaacgtataaaagaacagcaaagaaaaatgggatatcagaaaattaaagatcggatcatgatgtaaaactcaagcaaaggtcagtacacaaacatgcgtgccattaagtcatgtccaatgctgttgtcaactttgattctgggttttctagcaactaaaagaaagaggaaagcttgattagtgttaatattcataagataaaaaacaaaacaagtttaggaaaaacattgcatttccctgcctaagagaaatttagtcctaaaaggatactttggaacttaacattgtttgataaaaatctctataataaatgcaataaggaattttaagtttgtttatattagacaatgctctgtgaatattattttgtataacaaagatattaataagaattggatagtgtttaaggtcatgttctctggcaagaacctgatcagaaataattaattttgtcagttaagagcagatgcatgcattttgataagcaagtgataaggggaggtgagtaaaattgaaattctcattagaatgaagggggcttatcaggaaatgtgtttcaataaaaatcgctatgtagtgag

SEQ ID NO: 32542 - DNA, 1023 bp, Homo sapiens
tgagggaagagagtgagattcttccttcccattcctatttgcctacctctgtccatccccaattttcagtggactcacacctctggggaatggagtataagtccattttacatagataattgtctctcgggacagagggtcttttagttaatgtagaagataaggagaaataagacaagaaataagctgagatcttatttgccttgttatgttcttagcttatatttattatgggaaagaacaattggaaggttagtgccctgggctaattatcaagccttaaatcagacaactctcaaacagaactaaaatatactgtaataagttcatttctgaggtcttaaagacttccaagcttttgatcttgcatatcattgtatttcaggatgtcatatgacttgctcataacttcaagctaatgaagaatgtaggaatatagtggtttatattcactatggagacttaaatacttggtcatgctttttgtatcgtgtagcatcattggaaattctgtgcattttatattcctggacagcacatggtgttttatttagatgacacttcagtctttccatagactacttagaagcttctagtataggatgatggtgcttggtgccaaaatagcgatttgtaagttcagcagtcagtaataaattatttgattctaaataatttcaacttccctcttgtgatgtggatgagtcctccctagacaggtggttgcaggaacctgtacatatatactgatgttcatttggacattttataaaccttgcccattcaggaaaagggcagttcattttgttgaagaatcaaagccccgaaagacctttaaacagcccaaagtggcttgtttatcttgctgctaatgctagttgattcattttctaggtaatttatatgtgtgtgttttctttcttaagctgggctgttttgtagccattgcaagagtcaggtgttatattcatgtgatttttaaaaattggatattgacaaattataattgtatatatttttgag

SEQ ID NO: 32543 - DNA, 1028 bp, Homo sapiens
tcgtattgtatacaataaaatgatttagtattatgtaaatcaagatgacttcttattacttagctggaagatgatttttaatttctaggtgtagtctactctttagcactaattaattttcacagatgttaattcaacttaggtgactggtctcagaaatcagacaaggatgctgggatgcaccctcacactttgggaataggaacttgacatcccatcttttttctcgaaattggtgctggctctgaaaaaacaccttttcatttttttttaccttgtatcagcaagttatgattgtttttaccagcaatccaaacaaaagttttgtcttaagcagtaaggaagaggtttgtttgaattaaatgtcaaaacggcagcaaattttatttctaacgtgctgtatcattatatgtaactaaatcattatcagccatctaacattgaagaaccttgggaggaacattccctgccactttctactctaggacataattgtcatctttctactgtaggacataattgactccagtattttattagatatgtcaaaaaaaaacaaaacaggcaaacagttctgtggctactgaagagaaattaggaaatccaggagaataaggaaagtggatgggaaatggatattctgggcagaggaagctgggtagtacactgaggaagtaacttttagaataaactgacttgtcacatgaagtccccaaatatgtcagttctcattattcatggattccatatttgaattttccaccttaacagaatttattcagaatcccgaaataatacctctggggcttttgtggacatatgcagatctgcgaaaaatttgaatctttccaagcacactttccctgctgtggttgaacaagccaaagctctgcgttcttgtttcagctcttatactgtgaacaagcttctttttaatgggctagttagtgccatatttttcacatttttgtgcttttagttggtgattttgctgtttaacatgacccccaagcaaagtactgaaatgc

SEQ ID NO: 32544 - DNA, 1072 bp, Homo sapiens
atttcagaggcacagtagccaacaaagctggtcatacatggtaacatcactcaacttagacccaaagtaacgaaatgatgaaaggatcctttttattgaaaggtatgttagttaaaagttaaactaaaaaaaaaaaaattattattaaagtcccactgaatttgacttttaaaaacttttcttccaattacattaaaaaattggtcattagtaggataatgagactattttcctcatgaagtataaatttgtttctttaagtgttatagctagtttcttgctatttattagattaaaaatgttagtgcttaaggtagtttttctccaattttaattcctctaaatagctcttagaagtttttagattattatgctgtcattaaaatggcataattttatttgactcttaacagttttgtcagttctaaactttatatttttagtatatgatctaaaaagaaccagtgtgtcctggccagaaacaactgatgacagtaatctggtagatgtctttagatacttatgtctatgttctgggatagaaccagtttataactcttgaatttcaagttttttcacctgtattgttcctttttactcaattcagagtctgtttcaggaagtaggaataaaagtagacggttatatgggcagcacctctccatcaaggcatttctcttcattggatattgcagtctgcacaattgagagagccaatggtctgatcaatcgcctcatagaggaaaataagatggatctgttaggtaagaaagttagaaaataagtaaatactttctattgctatttttgatggaatgaagtggagctgttgtgatttctctaggtcccatttgttttcctattgtctattatctacttctggaggcaaggattggcatctgtaatgttaggaacgctgtgtttataagttttgtgtcctgctgctgttattgactccgttacgttgcatttttgtactttacaaaacgtagattatatccttgagccctcaataatttctccttgcttctttcctatctaaactctaccaggaatagaaggaggcctgctg

SEQ ID NO: 32545 - DNA, 1047 bp, Homo sapiens
tccctgccctgccctgccctgccctgccctgccctcccgtcccctcccctcccctgccctcccctcccctcccctcccctcccctccccttcccttgccttccctctctttttttagataaagtcttattatgttgcccaggctggcctcaaactcctgggctgaagtgatccttctgccttggcctcccaaagtgctgggattacaggcatgagccaccacatcagatattttcatttctggagtttcttttggttctattgcatatctgctgattcattttccataagacattatggtttcattatggttccctgtgccacttctttaagctgtttaattattttaaacatgtactttgcagtttctttcatattttatattatttgcagttcttggctgtgccatttcttctgactaatctgcgttcctcatggttatttatttccttgatggtttgtaatcttgtttataaacttattttagtgaaggagagggatatttgttttatgagaatttcatgtgccctgggtttagtaagtacctcatccagggaaatattgcctctacttctggctcaactctagaggtcttaatagtaacggacattttttttcctttattattattttttcccatggagttcaagtctttctggtttttaagttggttatggtatgttgtgcttttcaaggaatttgttcattttgtctgtgttgtcaggtttattggcataaattcatttataatattctcttctttttaacttctgtaagatttctagtgatatgaaatgcctattttcatttctgatcttacttacttgtgttttttctctttttaattattcttactagaagtttatcaattttattactctttccaaagaacaagcttttggctttgctaattttctctattatttacttgttttaaaaaatgtattggtttctgctcttatctttattatgtttttcttctacttagtattaatttagtttgttcttttcctagcctcttaaagtagaaacttagataattgatttt

SEQ ID NO: 32546 - DNA, 1024 bp, Homo sapiens
tagagcctgatacatagtgagtaggcagtcaattcctgatagttattgtcacattttgctgctgctgaaggaaacgtatctgctggtaccccccttgcatgggtttgggtttatgggagcagcttttgctgcaagtctcctcctgtgctgcattgtgtggcaggatgactgggaagactgggcctgatcagcctctcatgctatgaaccaatgctatgcctcttttttttctcaactcaggttagagcacagtgaatgggactcttcccggactcctatcattggctcctgtggcactcaggagcaggcactgttaatagatcttacaagcaacagttgtcgaagggtaagaggaagaaggataaagagagggtgttttattatctgacagggctggctatactgggggcaaggagctgaggagaaggaatgtggaagtccagccactgagcagcgaatgagtctaaggctggaagggcgtggaagattagaacctggtggaatttgccaagttgttgactctgaggcaactttcctctcagaatacccctttctacagtggttgggtcagctttgcttaagtgcaagactagtaggagggaaagcaacatagccctatagggtgaaaactctctgactttcacatttttctttcagacccggagtggcgttggatggaagcgagtcctgcgttcactctgtcattcacggacccgagtgccacttctagcagccatctactttctaatgattcatgtcctgctcattctgtgttttacgggccatctatagacttagttgttactctttggaccactcccctcaaaacttggaattctctcacctctaacatcagaacatcaattccagtggaacagtcttcccatttacaggtcttctctccaactcttcacggaaagtgcctgcaaaaacagaggtggatacgaggacaggttggagctgcagggactggcgagtctgctttcttctactgccctgagcctgaacgcttctgcttaatctg

SEQ ID NO: 32547 - DNA, 1027 bp, Homo sapiens
gttttctgcatctgatgatgctttttgttttcctctcatcctaaagcttttctgaagctcagcagcagctatgcaacaccagacaggaagtgaatgaattaaggaagctgctggaagaagaacgagaccaaagagtggctgctgagaatgctctctctgtggccgaggagcagatcagacggtaaaggctgaaggagatagcctctgttcccttccgatcctttctgatcaaactcatgtacatttcctgccagacttaggatttcttaagatctttttctcatcttgaggtagttgctgcaatgagtttaccaacattgtggtcacccaagagaacactgtacttttggagtataagagagtcagtgttttctaaaacagttgttcttagagaataataatgatatctaccattactgaaagatattttatttcaccctaaccataactatatgaggtaggtgttgggttctctagaggaccaaataagtgacaacctcattttctacctgagatctgaatccatggaaatcttttttaaaagattaaaagattgagagattaaaagactgctttataaatgatgttaaaagaatgtagctttttatttgttggcaaatgcacttcctaaccctgaacttcccctcccagtcacagacaatgttgggccaaggtagacctccttcacagaaaatcctgctcttgccaaacaagagtattggaataacagagtgaactgtgcttcctatgagcagtttgctccaagtgtaatttggaagggcagagctacacatccctagttccttattctcatcaaaagaatcactatgcatgagaggatagagagttgctacaagtattttgctgctggaagtccctttccacggaaaatatcgttaaaagcaggcacttttattatattttgggagaaagccacctatgtatatgatcactttcctcagagaatgacatttctgatattaatgctttcttgtaaagtttatgtggcagaggtgacagccccatt

SEQ ID NO: 32548 - DNA, 1033 bp, Homo sapiens
taactgtagagtgagtttttcctttttattgtaggtaattgtattcattcctatctcacttaatatcccatatttatagacagtctttccccttttgtaatccgaacaaagcctctctgttcagttatggtttttacttccaacatacacatacttgtttatattttttaaataatttgagtttagctgactttgccctgggagcttggccttttgtctgtcttttcagaccgtaaatgcaaaaggttctattcatcaggatggtatgtgcctcaaagctgtaatttatgatatgctggtattgattatcttctaagtcaaaatcttttttcatggagctgttaggatagattctgaattagctaactatgtttaattcagtgaattgctttattattcttatctgttataaacactaggcactaaactttgcacatttttgtctgctggatagttacagccaagccaacttttttattttcgtgtttctgtaattcagagtcatattattctgttcccaaatgctcataactgtgattttattttaaccatcaagatgtatcactcctttattcacagtgtgcctcaagtatttttattttccatcttcaacatcctaagataagctctaacactttacccttaaactgttctaataatgttgcttccaggttatcatctcaccagtattttcagaccatcaccatataagtctttctgaaactctactgtattactgcactactcaaaaatatttaaaagttgtactatctctagaatagacttagtattcaaaccccctttagtctggcatttaagaccctgtttttttgtttgtttgttttttgagatggagtcttgctctctcacccaggctggagtgcagtggtgcaatcttggctcactgcaacctccgcctcccaggttcaagcaattctcctgcctcagcctcccaagtagctgggactacaccatgcctagctaatttttgtatttttagtagagatggggtttcaccatattggccaggctg

SEQ ID NO: 32549 - DNA, 1741 bp, Homo sapiens
aagctaacctagaggccaccgagaaacatgataaccaaacgaatgtcactgaagagggaacacagtctataccaggtgagactgaagagcaagactctctgagtatgagcacaagacctacatgttcagaatcggttccatcagcgaagagtgccaaccctgctgtaagtaaggatttcagctcacatgatgaaattaataactacctacagcagattgatcagctcaaagaaagaattgctggattagaggaggagaagcagaaaaacaaggaatttagccagactttagaaaatgagaaaaataccttactgagtcagatatcaacaaaggatggtgaactaaaaatgcttcaggaggaagtaaccaaaatgaacctgttaaatcagcaaatccaagaagaactctccagagttaccaaactaaaggagacagcagaagaagagaaagatgatttggaagagaggcttatgaatcaattagcagaacttaatggaagcattgggaattactgtcaggatgttacagatgcccaaataaaaaatgagctattggaatctgaaatgaagaaccttaaaaagtgtgtgagtgaattggaagaagaaaagcagcagttagtcaaggaaaaaactaaggtggaatcagaaatacgaaaggaatatttggagaaaatacaaggtgctcagaaagaacccggaaataaaagccatgcaaaggaacttcaggaactgttaaaagaaaaacaacaagaagtaaagcagctacagaaggactgcatcaggtatcaagagaaaattagtgctctggagagaactgttaaagctctagaatttgttcaaactgaatctcaaaaagatttggaaataaccaaagaaaatctggctcaagcagttgaacaccgcaaaaaggcacaagcagaattagctagcttcaaagtcctgctagatgacactcaaagtgaagcagcaagggtcctagcagacaatctcaagttgaaaaaggaacttcagtcaaataaagaatcagttaaaagccagatgaaacaaaaggatgaagatcttgagcgaagactggaacaggcagaagagaagcacctgaaagagaagaagaatatgcaagagaaactggatgctttgcgcagagaaaaagtccacttggaagagacaattggagagattcaggttactttgaacaagaaagacaaggaagttcagcaacttcaggaaaacttggacagtactgtgacccagcttgcagcctttactaagagcatgtcttccctccaggatgatcgtgacagggtgatagatgaagctaagaaatgggagaggaagtttagtgatgcgattcaaagcaaagaagaagaaattagactcaaagaagataattgcagtgttctaaaggatcaacttagacagatgtccatccatatggaagaattaaagattaacatttccaggtaaatgagtagtgaatttttcctcctccagaggtaacttcaagcaaagaaagtctctaaactatttctgtttccttttagacaatgggactaattttggcataaatgtccatggaagatatattctctctcacttctgacttttttttggcaaacaacaatcctgctacaactgcatgaacatgaaaagttcgcatcttctcttcccatctttctattgagagatttctgtacttctgttttgttttgtttaagatggagtcttgctcttgtcacccaggc

SEQ ID NO: 32550 - DNA, 1027 bp, Homo sapiens
gctgagaaagtagagttagaattgaaagttagttctacaacaagtgagcttactaaaaaatcagaagaggtatttcagttacaagagcagataaataaacagggtttagaaatcgagagtctaaagacagtatcccatgaagctgaagtccatgccgaaagcctgcagcagaaattggaaagcagccaactacaaattgctggcctagaacatctaagagaattgcaacctaaactggatgaactgcaaaaactcataagcaaaaaggaagaagacgttagctacctttctggacaacttagtgagaaagaagcagctctcactaaaatacagacagagataatagaacaagaagatttaattaaggctctgcatacacagctagaaatgcaagccaaagagcatgatgagaggataaagcagctacaggtggaactttgtgaaatgaagcaaaaaccagaagagattggagaagaaagtagagcaaagcaacaaatacaaaggaaactgcaagctgcccttatttcccgaaaagaagcactaaaagaaaacaaaagtctccaagaggaattgtctttggccagaggtaccattgaacgtctcaccaagtctctggcagatgtggaaagccaagtttctgctcaaaataaagaaaaagatacggtcttaggaaggttagctcttcttcaagaagaaagagacaaactcattacagaaatggacaggtctttattggaaaatcagagtctcagcagctcctgtgaaagtctaaaactagctctagagggtcttactgaagacaaggaaaagttagtgaaggaaattgaatctttgaaatcttctaagattgcagaaagtactgagtggcaagagaaacacaaggagctacaaaaagagtatgaaattcttctgcagtcctatgagaatgttagtaatgaagcagaaaggattcagcatgtggtggaagctgtgaggcaagagaaacaagaactgtatggcaagttaagaagcacagaggcaaacaaga

SEQ ID NO: 32551 - DNA, 1082 bp, Homo sapiens
tattgttggaaatgaaagaagctcaagaggaaattgcatttcttaaattacagctccagggaaaaagggctgaggaagcagatcatgaggtccttgaccagaaagaaatgaaacagatggagggtgagggaatagctccaattaaaatgaaagtatttcttgaagatacagggcaagattttcccttaatgccaaatgaagagagcagtcttccagcagttgaaaaagaacaggcgagcactgaacatcaaagtagaacatctgaggaaatatctttaaatgatgctggagtagaattgaaatcaacaaagcaggatggtgataaatccctttctgctgtaccagatattggtcagtgtcatcaggatgagttggaaaggttaaaaagtcaaattttggagctcgagctaaactttcataaagcacaagaaatctatgagaaaaatttagatgagaaagctaaggaaattagcaacctaaaccagttgattgaggagtttaagaaaaatgctgacaacaacagcagtgcattcactgctttgtctgaagaaagagaccagcttctctctcaggtgaaggaacttagcatggtaacagaattgagggctcaggtaaagcaactggaaatgaaccttgcagaagcagaaaggcaaagaagacttgattatgaaagccaaactgcccatgacaacctgctcactgaacagatccatagtctcagcatagaagccaaatctaaagatgtgaaaattgaagttttacagaatgaactggatgatgtgcagcttcagttttctgagcagagtaccctgataagaagcctgcaaagccagctgcaaaataaggaaagtgaagtgcttgagggggcagaacgtgtaaggcatatctcaagtaaagtggaagaactgtcccaggctctttcacagaaggaacttgaaataacaaaaatggatcagctcttactagagaaaaagagagatgtggaaaccctccaacaaaccatcgaggagaaggatcaacaagtgacagaaatcagctttagtatgactgagaaaatggttcagcttaatgaagagaagttt

SEQ ID NO: 32552 - DNA, 1056 bp, Homo sapiens
aaaacaattttataaatcttcttcctttcttaagaggtacatattcctttgcctctattcctctttgtggaacctctcttcatgttcattctccttcaggagagagaccatgttacttggtgacattaatctaatcttgtaatactatttgtttgtgaacctgaaaatgttctttcttatgctatagacttgggatttctatctttgtaatccaggcttcaatcttaaatttaaaagccaatgaacttgatatttgtgtgaaatattttatttctttttctaaatctttagataaaacacttttcttcaaagattacctaggcagataagtagatgttatttttaaagtattttcatggctggagaacttctagaagacaaaaatgctggaggctatctgggcgttagtgtgagaattttctgctggagaatcattaatttgttgtctttctacaatttaggcagtcactgaggagaatattgcttctttgcagaagagagtggtagaactagagaatgaaaagggagccttgctccttagttctatagagctggaggagctgaaagctgagaatggtatgtataaaagaaaaccataattctctgtcttcttatcccacaagtgcctctacttttatcactaattatgtataacatgtagaattctctgattccgtgataataaagatttagataatagagctggtaactatcaaagataatacacattaaacaattagagcatagtatcagtgtttacataagtataacattttgcaatatggactatacatgctgcaggatttctttataactcataatcattttggaatggtcatcgtatcctataggaagtatggcttgaacaggaccttaataagatgatttttaaaataggtaaaatgaagaaagaaaggacattctggtaataaatttgtgggatgaggtaacagagatcagtataaaggtttaaaggtagaaactatgttgtgagtgagtggtttatgctcgtgctgtaccctgcttagaatcctgctcctttcctttagtctggat

SEQ ID NO: 32553 - DNA, 1035 bp, Homo sapiens
tcaggtttagtgaacacgagtcagtctaatcaaacttaaaagtctactatggaaatcatattgttcccattaattaattaacagtaaaaaagtatataatggccaagtagcttcttattggccagtatattctttctttcatctacaaaaatctctgtagagagctagattgtaatcatcgaaggctgattcaggctgattgagcctgaatatcagaatgaaggcagttagtttgatgttcttaattgactaatgtcaagttgagataactagattcagtcatctccattgtaagattatacccttccaaactcacaaacatattggtcagcagagtcctgtcattcctgggctatgctgtccactgataaaaatttttgcctcttggtttctagcatctaggctttccagtctcttctgttctcccattctcgactttttcctccaatgttttgttaagacgttttccaaccattcgaataagttgcaagagttttgtagcgaacatctgtatacccaccatctgaattctatcattaacattttagcacgtttgctttatcaaatgtctatctatttattcatccctctgcccatccatcagttcatcttaaatttataatacatttcactgtaagttgtggacatcagtacatttctctctaaatttgtcagcattcatatcattgactatattttaatatttatttataattgttctttttcttttgaggtaagatttacaaacctttaaatgcacagatctgaagtataccattccttgagttttgtcaaatgcatacacctgtgttacccaaactcctattcaagatatatcacattaccatcacctcacaaagtatccctatacccctttacagtcatcctcacccttcccctccaaagacaactactgatttttcaccatagattaattttgcctgtttcacagcatcatatacatttaaccatacaataggtcctcttatgtgtaaagcttttactcagcatatttggagattcatccatattgtg

SEQ ID NO: 32554 - DNA, 1365 bp, Homo sapiens
cacatgaggttctttggtagaagcaattctttgaaaataagactagaaagatagattggtatttccagttgtagagaatcttgaataaatgatatgttagtttgaattttcatttatagggcatgagaattttactgaaagcttttcagccatgagcaagaagtgtccagggtttaatagaaatctaacttaacttcaccttatgtgtttaatatcttaatctttttagaactttaaaaaatacacttcttgtatatttaaaacatttctagtaaccatgaacatataatttttgatcaaaatttatgtttaggctaacttctgaatttgaaaataggctttctctcgcatttcatagttactgtccagcctatctctcttccaacatcctcatccttgacaatcaaaatttcactttaaaaagctactatcaagtctcagtgtctgtcttggaaagtagtctgtgagttttatttgtgcaatattcggggagtgtaacttgcatagtttctctggtatgtgtcttcagttgagttccatgcagcaggtggtccgagagaaagatgcccgctttgaaacacaagttcgtcttcatgaagatgagcttcttcagttagtaacccaggcagatgtggaaacagagatgcaacaggtgtgttgctaaaactcggtagaatgactgtcattttggttaatatttaatccatcacagccaatttcctacccttacccactgctcttcacttggtgttagtgttttccttattggcctcttttgtgtccttgtcttctgttgcataaaaattatttattttttcttatccttttcttgccttttacccctctaatcaggttgttggtgctcaaaagctgagtttagttggtgaatttatgtggtagtcaaaaattggtttctcttcagttttctgattatagctacctttgtgcattacacacctaacccaaagcttcaaatcaatgaagtcagttttaaatatttaaaaaattagagaagacaaagaatgattttgaagacatgaagtcttttattagatcagtaattcttttttaaaaaaatttgagtagattttgaaaattggcttcattgtatttgagttcaccatctactaactcaaagtattttatttcacttagtgtgtagtgcattgtggtactgaaaggcacttcagtgatactttatgtttgatctgtttaattagattgaaaattaattagaattaattagaacggaaacttttaagttctaagcaatctttcagaatgcaccactaaataaagttttagaatacaacatattattaagtagaatactaattgtatatgtgtatcattgctttatttatt

SEQ ID NO: 32555 - DNA, 1054 bp, Homo sapiens
tttttcctctgtcagttctcttcccctcactgtggtagcaccaacctctctcctcatattgctttgttccctccagcttctcctcagctatgatgtcagatttttaaattatccattttatactctgctttttaatttcatttttagctctgagaccttaaagcagtaatgtcttagagttcattttctttctctgttaaagaaatgatttctaagtttcagcaatcagtcatagcaaccctttaactattatatactcaatacagagctaggtattctgtggaaagtatagttgaagaaatgacaacagtcctcaggtgcttgactgacttatgtgaaagtataaaagtattctttgtaattccagtaagcagaaatagctttgtttagggggttgggagggactaaatttacaaagaggcagaatctcagtctaagggagagcttttggaaaaaaaaatagattattgaaaaaattggatttcccctcactggctcttttctgatgtgttgcttctcacttagcaacagctatagtttcctgagctctctccttgattcttcaaggcaacaagacttcgggttttctattaaggtttagtcctgcatggcactgactggttttgccctcagaataaaagctgtcaaaatgggaaactcggtaccatttcttccaattatcacatcccctccagtatcttcctgcttttggttgctctccagtattttcagatagctgttttctatattgtccacagttttgggttcacatgcttggtgtgagggaaaaaaaaaaaaaaaaaaaaaaaaaaaatatatatatatatatatatatatatatgtgtgtgtgtgtatgtatttcacagtttatagctattatgtgagggagggtaggtctaacaggaactgcttggccatacaaaaactggacaaccctaagatttcttatttgttagatcagctggtttttcttgctcccatcagtttaataaaattataactaaatggttgtaaatgaaaaattagaagaaaatatcaaatatatattaattgt

SEQ ID NO: 32556 - DNA, 1079 bp, Homo sapiens
gtatacatgtgccatgttggtgtgtaaaaaaatttttaaatgttacgtaaagacaaagattacattgctcagtaggaacagtgcaagcaagaagatacctttttttttttttttttgagacagagtttcgctgttgtcacccaggctggagtgcagtggcgcaatctctgcaactgccgcctcccgggttcaagtgattctcctgcctcagcctcccaggtagctaggattacaggcgcctgccatcatgctcagctaatttttgtacttttggtagagatggggtttcaccatgtttaccaggctggtctcgaactcctgaccccaggtgatccacccatctcagcctcccaaagtgctgggattataggcatgagccaccacccccggcgaaagatatcttgctttaaagtactgaaaggaaaaaaagttgtcaacctagaattctgtacctggcaaaaaaatattgttaaaaaaaaaaagactttttcagacatacaaaagctgaaagacttgatcaccagtacacttgcactaccaaaaatgttaaatccttaaagttgtaaaggatttaacattgcagaaatgttaaattctttttatttgtgtagattgagggagtaaaaatgcacatttacatgcctatattgcaagctcctgcccagcaaaataaacagtcaacagtaaacagcctatagaatgggaaaaaatagttgcaagctatacatctaacaaagggctaatatctagaatctacaaggaactcaactcaagaagaaaaagacaaccccattaaaaagtgggcaaagccagatgctgtggctcatgcctgtaatcttagcactttggaatgccaaggccaggaggattgcttgagcccaggaattcgagaccagcttaggcaacatggtgagacctggtctctacaaaaaatttaaaaattagccaggcatgttgatgcctgtctgtggtcccagctacttgggagactgaggtggggcgatcacttgagctcaggaggttgaggctgcagtgaggcatgttcatgctactgcactccagcctgtgtggccgagtga

SEQ ID NO: 32557 - DNA, 1079 bp, Homo sapiens
taaagatgtgataagattgggatagggatatctgtagaaggctttctgagatgagcatattttttaatctgagttttgaatagtgtgatgacattgactgatgggacagggtgagcatcctaggcatagggaatagcatgtaagagacacagtggcacagaagtagatgtcacaaagattctcacatattttgattggataactttataaagtctttcaactcagagatttttacatttaaggtatgttgctgatctcttttctcttaacaaaattattttagtaactactaaagtacaattttcaaaaagctcaaacatgagtcttatacaaatataaaatttgactgctcaaaattttatgcaactcattaatgagggaacaaataagatatttatacagggtcaaaggagaatttgaggaaaatagatttatggagttggtttgtcgaagaaatgtagaagtaaatttgctgatagatttttaaaatttgctaataggaaaatatgacttataaagcaatgtagcttctagaattaccttttctactggacagaaatcatttgtattgctttgaataagagtctgtttacattgctcttagataagaatctttagcattgttttctaccagccaacctctatttttacagaattgtaaagtattttaatagtgagtagaaaattaaacagaggtacatacgcctagaaaatcacataactccttaagggggtaaataaaaggatactcactaaccctttccttttgactatttctaagttttagataatttttcacaacatcagtaatacaagatgggttgttagtataatgaaggaaataccaaggaaagattttaagtttctcctatattaagcacatgatagaattcctatggcatttttgtctttgtacatcatttaaaaattaactgtgtacctgtcttgatttcacttttatcattgccttgaagcttttaaattatttattgtttagtattttgcacatttatatttcatccttgatttgattgcaggcttctctaaggagaaggcctttggctactttgtattctcta

SEQ ID NO: 32558 - DNA, 1046 bp, Homo sapiens
aaaaaagaagaacaaaggagaaacaaaaccaagtggtagatttaaacctatctatcttagatgtaaatgtggaaaaactaaagttaaaagacagattgacagattggatttaaaaagtacaagcctactatatgctgtctaccagaaatgcaccttagatataaagacacaagtaggttaaaagtaatggggtggaacaagatataccgtgcttataccacagaaagttgaagtacctgtattagtatcagataaagtaagttacagaacaaagaatatttctagtgctaaagaaggttatttcataatcataaaaaaagtcagttcatcaaaaggatgtgtttattgacctaatagagttttaaaatacacaagcaaaaattgacaagaactacaaggagaaatcctcaattaaagcaaaagatgttaatatacctcttttgatatttaatagaataagtagacaaaaaaattagtatgaccacagatttgaacaataatatcaaccaatctgacctgattgacattttacaaatattctaccaaacagtagcagaatacatgttcttttcaaatgcagatggaacatttacaaagaagggtgcatattccgagccataaataaagtctcaagaaacacaaaaggggccgggcacggtggctcacacctgtaatctcagcactttgctgaggtgagcagatcacttaagtccaggagatccagaccagcctgggcagcatggcaaaaccccatctctacaaaaagtacaaaaaattagctgggcatggtggcaggtgcctctagtcccagctacttgggatgctgaggtgggagaatctcttgagcccaggaagcagaggttacggtgagttgagatcacatcactacactccagcctaggcaacagagcaagaccctgtctcaaaaaaaagaaaaaagcaacgtaaaaggatttcagttatacaaagtatgttctctggcctcgatggaattaagttggaaattgatgccaagaagatctctgaaaagtccccaaatatgtggg

SEQ ID NO: 32559 - DNA, 1028 bp, Homo sapiens
gagaccactgctttaagtaattttaaacacagttctctaactttaagttgattttccttattgaaaggcgcttttaaaagttgctgtttgcttccaccctcacaacatatttccagtttatttacttagcttcagatttaggtcctcttaagctttgtctgaatgcctagcttctgactgccttctaaatttaactttttcttcatttacacactgattctaggtgcctttctggttcttattcgtggtcatcttctgacctttattgcctgcacctgcatgcatttgacatatagatattataatctctcttttaaaatctgttcaggtttttttggtaatacttatcaattatcaatcagtctcttgcttgttttcttgtttgtttttcctaaaagtgtttactctctcctttgggctctatcttcaagttgtctaataactacaagctcacatgtctttagtactaccttgacttctagctgctgggccctgccctaagtccggtttacttacatgcttctctcttcttttggcatccctgtttgaagacagtttcttagctccatatggggaatgtagcaggattattttgctccaagctgtcatttgattttttaaaaaatgatatttcctcactaggtacccgcaagtgggaatccaaaaataagtaatgagaagagtggaactgggcattaatgaatacattatattaatatgcaaactatttttaccttttgacagcagaggttcatcttagaatttataagaagtgataagtctacaaggctgaaactcctttaccttagaagagttcttggctatatgtacatttgggcctactactatatcagagcttgagcagattcacaactgttgtcaattatggacagatattaataactcagtcacttgacttactctgttcaggctgctgtaacaaaataccatagacttggtgacttaaagacatttatttcttatagttctggagactaagaagtccaagatcaagaagccaacagatc

SEQ ID NO: 32560 - DNA, 1050 bp, Homo sapiens
gagtccaggagttcaagaccagcctgggccatgtggtgaaaccctctctctacaaaaatatacaaaaaaattagcaaggtgtattgcacatgcctgtggttgcagctatttgaggggctgaggtgggaggatcacctgagcccaggaggcagaggttacagtgagccaagatcgcgccactgcactccagcctgagcaacagagtgagaccctgtctcaaaaaaaaaaaaactttcaagacatttctagcaacattatattatgctcataatataatgtcttgaagccagattttaaaatgttacatagtacctcagttgtataaaaacattaataggtatgtgtagaaaaaagaccaaagggacatattaaaatgttgataatggttaactatggatgatttttatttaaagtttttttctaacttttctaaaatgaaagtaataataataataatttttattttaacaaatggacgaggaaagaaaggagttggtttcagtcatggatttaagtttggcaaaggtaagaagtagcatagtatattgagggaaaaagaatcaaacgttgcttttaatacatattaatattgaatattaacttggatgttttcaataataagtatattcctagtattatataattctgttttattttcattcgttctttctttttttaagagacagggtcttactattgcccaggcaggagtacagtggtgtgatcatagctcactgcagccttgtactcctgggttcagtgatcttcctgccccagcctcccaggtagctaggattgtaggcatgagtcaccatgtccggctaattaaaaaaaattttttttttgtagagacagggtctcactatgtctgtcattaaggctggtctcaaatttctgggttcaagtgatactcctgcctcagcctcctaaagtgttgggattacaggtgtgagccaccgtgcccagccattttcttgatgctttttaagtggctgtgttttgttgttgttgttgttgttcttgttcttgtttgaatattttgtaaatttg

SEQ ID NO: 32561 - DNA, 2183 bp, Homo sapiens
cgtccttcacaggtataataagagtttttgaccaggaaagcattttgtccccaaaatgctgaattaggaactgagattaatagctataacaatctatagcattcatatgaggtgatttcatctgtatttgattgcctgtcaccaccaggcttttttatgcagaacttctcagtttcttaatgtaggaaatgatataaacccatgttaggtacttgagccaggaagaaacagggagaaagtaattttgggaaggctactttagtgttagtacatgaaggggattgagtaaaagtactccatccaactataagtcttattttggtaatctgggaggtggtggcttggagaatagcatggcaatgccaaaggaaaggaaaaagatggactcaggattttaaaaattgagaatgtaaattaatagcctttgtgaactagaggggtttaaaaggaaacttgatatagcgggcagatgatgtgtttgagatgactagcagacctaacgtaaactgctggctaccctgggctgatgctccagtgagaagtgaggactagagagttttcgcacatggaagttcacatgctatgagagaatggaatagcagaggagcagaaaattgagctcttaacaatttgttactgtgggcagaacaaaagaggaaagtgaaagagaaaagaactcagagaaaataggagattataagatcataaactccagggaagatgttttcagtgataccaagacagaataaggattagggataggctgggtgcggtggctcccacctgtaatccctgcactttgggaggccgaggtgggtggatcacctgaggtcaggagttcaaggccagcctggccaacatggtgaagccctgtctctactaaaagtacaaaaattagccgggtttggtggtgtgcacctgtagtcccagctacccgggaggctgaggcaggagaatcacttgaacccaggaggtggaagctgcagtgagctgagattgcaccactgcactccagcctgggcaacagagtgagactccatctcaaaaaagaaaaaaaaaggttagagataatgacataactcttttcaatttatttctgacaggagaaggggtgttaatagtcaaactagcttagaaattataattagtatcatgaatatttttataaatctcacagttttttccatttaagtttttctttaattttagactgtgatagatgccaacattttcccagccctcattagtattttacaaactgctgaatttcggacaagaaaagaagcagcttgggccatcacaaatgcaacttctggaggatcagctgaacagatcaagtaagtaccaatcaggcagcatattgtaagttaaagaaaaattattattgtgtctatcactttataacctcccacatattacctagagtaaaagattagctgcctttgaggggaaaagtaagtgagagacgatcttaccaaataagaatgtttagttccagtccttaggaaattgtccttggtgtcataattagatgtgtatttaattctttataactctcccatttctttttgctgaaaaacaatcctgggatataagaagtaggcatagtcgaggcttgaggcaatagaaatccttgcttcaacctactctggagctacttgtcagaaatatcttgggtaatataggttacttgtagaacttgagcccaagtttaataactcactcttgccctttttagtttagatgtcttaatagtagaattggatcagaattgaaagagtggtatgtctgagaatgaagtgccaaatttagtagaggcaggtatcttctaaagtactatggtattcttgttaaagggaggagctgtagcagctcaagacttaaatggctcccttggtagcagcttagtgattgactgattgagatggagtctctctgttgcccaggctggagtgcagtggcactgtcggctcactgcaacctccgcctcctgggttcaagcgattctcctgcctcagccttcctagtagctaggattacaggtgagtgccaccacacccagctaatttttgtatttttagtagaaacggagttttcccctgttggccaggctgatcttgaattccggagctccggcgatccacctgccttggcctcccagagtgctggaattacaggtgtga

SEQ ID NO: 32562 - DNA, 1050 bp, Homo sapiens
taattcttattaacagtgaatacttttttttacctgtataaagttacttatttataaaatttcaaggggagatgttatgtctttcataaaatgtgttccttaagttaaacattgatatttagaacaatacaataagtaaaattttcaaactttttcttttaggtaattctgaattgctcagctctgcagagtttattgcatttgctgagtagcccaaaggaatctatcaaaaaggaagcatgttggacgatatctaatattacagctggaaatagggcacagatccaggtaacctcataggacctaacttctctttcagtatttttattgaaaagtaaggtttttttctcagtcaccctttaaaacacatttgtttttggctgggtgcggtggctcctgcctgtaatcccagcactctgggaggctgaggcccgtggatcacttgcggtcaggagttcaagactatcctggtcaacatgctgaaaccttgtctctactaaaaatacaaaaaaattagccagtcgcagtggcaggtgcctgtagtcccagctacgcgggaggctgagggaggagaattacttgaaccgtggaggtagaggttgtagtgagccgagattgtgccactgtactccatcctgggtgacagagcaagactccatctcaaaacaaaataaaacgtatatcgttttcattattgctttgaagaccactttcaatgttgttgtcttatttcatagtcagctttttactttatcctagcttatagatgttaagtcttttgaaatttacacttaagccttcattttttctgttgccgttaatatttgatgtttcaccaagacccaagaaatagttatcaggggaaccacctccagtgtttcatgtaggttcttttctgttttccctaagtgtcggccggtctgagaaataaagggaaagagtacaagagaaattttaaagctggctgtctgggggagacatcacatatcggcacgttccgtgatgccccccaagctgcaaaaccagcaggtttttattagtgattttcaa

SEQ ID NO: 32563 - DNA, 1028 bp, Homo sapiens
taaaatttctctggaaggatatacagggaactgaaaatgttggttgtctttgaggggaactggttggctgggatacaagaaggggaaagaggcttttaacaactatggagtcttttataccctctgaatttttgaaccctatcagtatctttctgtccctcacccacctccatatgctgtatgcttttgccatatttgttccttgaattggctgtggccactctcagctcagagttttaacgcatgctttattccctctgcctggaacatgtgtctccactgctaccccttgctctgactgccacctcacacatatccacattctctgctcctaatgttttcttgttcttcaagtcttggtattaacattattttctctgagaagccctgtttgaccctaaactcttaagttaggtacttatttttttttctttatccatcagaatattaatcacattgtattgtaactaattactagattttaagattctagaggtggattatgtcagtgtttatttctgtgcctctgtaaatctaataatttctggcacaatatatagggacttaaagaatatttattgaatgcaatgaagttctgaatctctacatctacttctgacctatctcaagtttcagtcctatatctgcagtagtttcttacatatttctgcttgcatatctcacgtttgtctcacagtatatcttctttcccccacaaggcaagttccaagtttttatttttcctatttcaggtaatgatataactattctctttacctacacatgaaactttgcagttacatgtggtgtctccctcccttatagtttgtatagcaagttgctgggtcttcttgattgttattgttactagatccccatcaaattacgtacttttggtccttgtcacacacacaggttgttgctgtacccatccatcctccgactgtcctaagcagttactcttctcaatttattccccctaataacagctgaatctttcctaaagtaatgttatttgcattatcttc

SEQ ID NO: 32564 - DNA, 1050 bp, Homo sapiens
taaactatgtaacctttattaatgaatgattctttcacaggcagtctgggctcttggcaacattgctggagatagtaccatgtgcagggactatgtcttagactgcaatatccttccccctcttttgcagtaagtttcttcttccttcttcctttttttttctttttgagaataaaaatgtaagagattcctcagaaagcattacatgtttggaaatcattttggattttctagtgttatttttaattccagatattttcttgtttagatcatttcctcaagcaccctatctttttccatgccaaaattctgaattctgaattacttgcatcagaattaatgaagttttaatgttctggagaaaagctatctgaagacatctctttatcaaaagtattattatttagtatttatgtcatcagataatcactgtctgttacatagtttaccattgtaccatcgtgcttttaggttattttcaaagcaaaaccgcctgaccatgacccggaatgcagtatgggctttgtctaatctctgtagagggaaaagtccacctccagaatttgcaaaggtaaggactatgcttttgggacattggcagaaaaaatacaattaaaagagtattgcaaccaatggtaaggtgaacaggaagataatttttgttaaaatttaaaatgttagaattttatctgtttttggagaaacagggttgttgttgtttttgttggttctctttattatttaaaaagcaaatttagagcatagcttgaaggtgcacatttacgatgggactgcaaataaagcatagcatgaaggaagaatttgtaaagcttattgaaattaggcttcatacaattagtatactgtttaggagactatcctttcagttctcttaaaacagtggttctcaaagtgtggtctgtgagttctctgggagtccatgagattctttttttttttccaataggtttttggggaacaggtggtgtttaggtacatgagttacttgtttagtggtgatttctgagattttggtgcacccaacaccca

SEQ ID NO: 32565 - DNA, 1072 bp, Homo sapiens
gttgaaagtaggccaggtgctgtggttcctgcctgtaattccagcacttgggaggctgaagtgggcagcttgcttgagcccaggagctcgagaccagccagggcaacatggcgaaacccagtctctacagaaaataaagtaggtgggcatggtggcacacgcctgttgtcccagctgcttgagaggctgaggtgggagggttcacttgagctccaggaggctgaggctgcagtgagccgatatcacaccaccgcactccagcctcggtaacagagtgagacctatctcaaaaaaaaagaaagtggctagtctttgccacttttgtgcagaaaagtacagaaagcaagtttctttttgttcactgttttcttatgtaagcaagaaaatactctctttctgtctctttttttctttctgtctttctctctttctgtctctccatctttccgtctttctttctctccgtctctccatctctccttctctccgtctctccttccctctgtctctccttccctccgtctctccttccctccttccctccgtctctccgtctctccctccctccctccttccctccttctcttgcttcctccctccctccctccctccctctctcctccctccctcctttccctccctcccttccttccttccttccttccttccttccttccttccctccttccctccctccctccctccctccttccctccttccctccttccctccttccctccttccctccttccgtctgtccctgtcacccaggctggagtgcattggctcaatctcggctcactgcaaccttggcctgtcaggttcaagcagttctcatgcctcagcctctcaagcagctgggattacaggcgcctgccaccacacccggctaattttgtatttttagtagagatggagtttcactgtgttgcactccatactgggtgacagagcgagattctgtatcaaaaaacaaaaacaaacaaaaatgaattagttctttcctttaataaaccgaataccttctgtttgttgtacactttaggatattatttatcttcctcccccaat

SEQ ID NO: 32566 - DNA, 1070 bp, Homo sapiens
taataaaactgttaaagtaacctggccaggtgaagtggctcacgcctgaaatcccagccctttgggaggccaaggttgggggatcacttgaagctaggagttcaagaccagcctgggcaacatgatcagaccctgtctctacaaaaaataaaaaaattctctgggcatggtggcatgcacctgtggtcccagctactcaggaaactgaagtgggaggattgcttgaacccaggaatttgaggctacagtgagctatgattgcaccactgtactccagtccgggtggacagagcaagaccttgtctcaaaaaagacaggagtgggggaggggaagtagccatttctgatgtccctttgggatatgtctgggcatgtatatgtttaaaagactgagctcttagaataacagagctcttcacagtaaactcatttgttctctccccacttgtattgtagaaatcatgaccaccccaggaaaagagaactttcgcctgaaaagttacaagaacaaatctctgaatcccgatgagatgcgcaggaggagggaggaagaaggactgcagttacgaaagcagaaaagagaagagcaggtaaatcctttacctttattcatttcttttaaagaatttaatgttccattttaagcctgaaactatcttcattttagcaaagttggggtgtgtgtgtgtgtgtgtgtgtgtgtgtgttttccccttctcccctgtaaaatcaacacttttttggagtggggatgaggaggtactgaaaagtggtatacaagaatggggaaatctctcaggttctcattttctcagcataactacactattcaatattttcacctatttgtgtttagtgtattttagttttctaagggtgcaactttcttctttaagatttttttgatgtatgtttgttaattaattcacaagtgaccactaaagtgttgctgttcattgtaaacttaaaattggaaatgtaaaaatatacacaaaaagaaagaataaacctcatacataaaccagtcctttggattcagtaattgtcaacagtttgctacacttgcttcg

SEQ ID NO: 32567 - DNA, 1045 bp, Homo sapiens
gaaaaaaaaaattagaaatgaaagaggagacattactagtgaccttgtaaaaattagtaaggttataaagaaatactgttaacagttgtggctgggtatggtagctcatgcctataatcccagcactttgggaggcagaggcgggtggatcttctgaggtcaggagtttgagtccagcctggccaacatggtgaaacgctgtctctactaaaaatacaaaaagtagccaggcgtggtggtgcatgcctataatcccagctactcaggaggctgaggcaggagaatggcttgaacctgagagacagaagttgcagtgagccgagattacgccactgcactccagcctgggcaacagagtgagactccatctcaaaacaacaacaacaacaacaacaaaaaaacagttgtatcccagtaaataaaatggtttagatgaagtgcacaaatttttggaaagacaaaaactaccaaaactgactcaataagaggaacagacaatctgaatagacctgtaacacgtgaagacactgaaatagtagtcacagaactgcccgcaaagaaacagcctaggcccatatggctttactgctgaattttaccaaacatttaaagaaataatataattcttgacaaaatcttcctggggaatactttccaactcattttatgaagctggtatcactctgataccaaagccagacaaagacatcacaagaaaatataaacccgtctctttttttttttttttcttgaagagacagggtttcactgtcacccaggctggagtacagtggtgtgatcatggctcactgcagcctgcaactgctggactcaagccatcctgctgcttcagcctcctgagtacctggaactacaggtgcacaccaccagcctgtctgatttttattttttaaattttttgtagagatggagtctcaccatgttgcccagtctgatcttgaactcctggcttcaagtgatactcccgccttaacctcccaaaatgctagaattacagacatgagccactctacccgtcccttgt

SEQ ID NO: 32568 - DNA, 1041 bp, Homo sapiens
cacctccttattcgagtattgaaatgtatttatcagtattttttctaaacatttttagaaaatattttgttaattttaaagctttttctcattctcagcatttttcctttgttatatcttttgttatatttatacatataaaagaatatgtaacataatatataatacaacgagcaccagtaaactcattacctaacccgaaaactagaattttttatttttttattttttagagatggaatctcattctgttgcccaggctggagtgcagtggtgcagtcatagctcactgcagcgtcaaactcttggcctcaagcagtacttccactttggcctccaaaagtgctgggattacaggcatgagccaccatgcccagcctagaattttatcagtaacttgcatttgtgctgtgttcttcccaatccctttcctgtctgttccgttcactctcctcattctcttgtttaaacaaaaaagttttgtcacattatctgtccatctatccatctgtcttatctctgtacacatatgcacacatatatatttttttctattggttctctttctttggagaaccttgactgatataccatatgacccagcaattccattcctaggtgtatacccaagaaaaatgaaaatatatgtccacacaaaaacttttttttttgttgtttgagacaaagtttcgctcttgttgcccaggctggagtgcaatggctcgatctcggcccaccgcaacctccgcctcccaggttcaggcaattctcctgcttcagcctcctgagtagctgggattaaaggcatgcaccaccaggcccagctaattttgtatttttagtagagacggggtttctccaagttgaagctggtctcgaactcctgacctcaggtgatccacccgccttggcctcccaaaatgccaggattacaggtgtgagccaccgtgcctggcccacacaaaaacttctacacgaatgtttacagtagtagtattcataatagcccaaagtgacacaactcaaatatcaatcatctga

SEQ ID NO: 32569 - DNA, 1029 bp, Homo sapiens
ttagttgctacacaaccttccacccggtatctgcagagggattctagcgctgagtcagagatggacaggtgaccactgatggtgcctatattcccttagggattgaatttaaacaagtaaaaatgaacacttagcttttgtcttcttccatgttttgtcttaaggtcagagtactaacttgtatcttttttttttttttttaattaggaaacgatggcatctctttcctcctgaagatactcctttcctttatccaactagaatcccttatgaagaatctagtgtgttcagtaaaatcaatgttgtcaatcctgatttaaagcgttttcctcagttccggaaagctcaaagacatgcggttacactgagcccaggacaggtaatagggctttaaaacattaatgacctgccaggggacaccacagctgtaactctctcaagtccttatgctgtgtgcttcccctccctgcgcagtgcaaatgagaatggcttccttccctctgctctgctgttggaaggtagcttccccagttgtaggcttcagacacatacacctctgcttcacaggtcctggaaaggaaatggcaagagggaacacagctcctcctattggtaaagaggagaatggactttggaggaagacagtctacaagagtcattttcatttaggtcaggagaaaatgttcaaggcatgggtactcgagcatctctggaacatttaatcacagttagtatctgttcaattatgatagcactgaacccagacacataaacacaggtcggaatgcctccaggtgtgggccaacgggcagaaggaaccgagaatgtttgcttttaagcaaaaatggatgttgttttcataaattactaactctgaaacatttccaaaggtactgtacatagtgctgcttcccagtgaggaaaatttccttttcaacattggcacttgctgtctgatatttcattaataatttgaaaggttttcttagtcacttaagaagattttattctctcgattatccctctccc

SEQ ID NO: 32570 - DNA, 1036 bp, Homo sapiens
gtctcagagatatttgaaataatgccatttccgctgcattcactgttctaactgcccaaaacacgctttccctaaatatcagcataatcctgtctgtttattgtctgtttccaactctgaaatgtaagcttcatccgagtaggcattttgtctcttttgttcattgattcattacaagcttccagaacagtgcctggcatgttgtaagtagtcagtaaatatttgttgaatgattactattagtgtggttattcaaatatgttattggctaaaaagatttcttgaactgccctggaaacctaacctcttccatctgtagcattttccataatagaatattccaactgctaaataacagatgtgcaagtgaaaatgggcagcattaccatacagagaagttggttagttcttgatggattgcaactttatttcaaaacaggatgtgaaatggtctgacttcgggtttcctggaagaaatggacaggaaagtacattgtggattggctccttgggagcccacacaccctgtcatctggactcctatggttgtaacttggtattccaggtacaaggaaggtaatgtgtgtgtgtgtgtgtgtgtgtgtgtgtgtgtggaacgcacatgtgcatgcatgcaataggggtggcagagagaatagggcaataccccaaggtgtagtcccagccccatcctgtcagcctgcctcatgattagggcagacctcttaacctctggttttggtttctcctctgtgaaatgaggacagttaaaatggtggtttacaggtgcgtgccttgtcatgatcaggattgtcttcagagagtttattctagaactctgagattccactcccaggtcagctagacagctctctgcttggtcttttttttttttttttttttggtaaattagagacatttgagacagtcttgctctgttgcccaggctggagtgcaatggcatgatcatagctcctggacctcaagccatcctcctgccgcagcctctcaagtatctaggactacaggtgtgtgc

SEQ ID NO: 32571 - DNA, 1031 bp, Homo sapiens
caggttctgtgtagactgtatctggggttcagtttgggagccaggctttagggctgttgacaaagtaaaggaaattgagagaagagcaattggaaggaaaagttaatgctgctgtgtctaggttaaaaaaaaaaaaagataaaggagaagttggacagttttctgataaaaatagcaatttttggcaggaaataaacttgttctctttagttatagaaagcagatctaggaccctcctctgtaagctaccaggaagtagatactgattttgtagtaagtggtcaactagctagctacttgtcgctcttttcagggatggtgtagaatagaacttgctgagaatagatgatttttaaagatttttccaactcttgaggtatgtatgagtagactccagaacagatcaccccactgatcaccctttttggttttacagatgcagcactcaaacagggcctcctgtttctagcaagactcaagacagattcctgggcccacattgacttcagacatttgactacccataagtggctgaacttaattgggaagagaatcccaactctcaatgctgtctatttttacactgacaattttgcttttttttttttttttttgagacaaggtcttgctctgtcactcaggcactcaggctggagtgctgtggtgcaaacatagctccctgaagccttgacctcccaagctcaagtgatcctcccttctcagcctcccaagtagctgggaccacaggtgcatgccaccacgcccagccaatttgttaaaaaaaaaaaaaaaacctttttgtagagacagagcctcaccaaacattgcccacgctggtcttgaactcctggacccaggcagtcctcccacctcagcctcccagagtgctgggattacaggcatgagccactgcacctggctgacagttttgctttttaagtcattattactgttagacaggaggccagggaagtctctcctcagtttctcatacagtaacctcaccctgtagaaaaaccttcagtgattct

SEQ ID NO: 32572 - DNA, 1033 bp, Homo sapiens
tatctccaactgcctcttttcactcaggagaatctcagccccacggggcacctccaagacctggcctggccagagagagatcagtgctcccacgaggaggagctggggaataaactgctgactggctctgcaaagcgggtgttttatgcatgaaccacccctttcctccttccagcatgcctttcaccctgcctttgagaggggtaacctacccccaactcattcacagatctcccctggctgccccatgagcacagggaaggcccactctcagccatttttttgctcacaagcttcagagataccttttccaccctggacagctcccactgtgagactactacaccacagtgctggaatcagcctgcctgcaacttccaccatccatctctgtcacacctccgagcccatggaatgaacctgttcctttttgtaatggctgcttgagacattgcagtaaaaaaaaaaaaaaaaaaaaaaaaagacatggtgatatattattggtctgatggctcctttatgaaaaggactctaaactgccacccatttccacagtcagagacacactttaagtctcttatccttggagctttcatttttcttaagagtgttccctgctctgtaagctttgaagtggcctttggccaaaagcagcaaacgtggttccacttgagccaaggaggcagttatcccttttattcacaagaagagagctcgggcactggcctcaagaagcctcaggggtcccctcaggctgccagggaaggggcagggcaggcgtgtccatgaagaatctggtatcctctttcttctctgggacttaattgagggcaggggaagctgaaggggtgagagggcttggagaaaggagactggagccagcatctactccacgtttttcttctttgctattctgccatggtttggaaagacaagacacttcatcccttggcttgggaatcttgacaaaagtggcccctggcacagcagttctcaaccatgggtacacagcagagttacctggggggtattt

SEQ ID NO: 32573 - DNA, 1065 bp, Homo sapiens
caggaacgcttcctggaggaggaggatccttggtttcatttctaaggtaatgtaatatttatccaggatttctgagaggtcagctaaaaacctaacccaccagactccagatccacttcttatcctatattgcccaaaagccatcgtgactacatgacaattcttgccaacctatagtcaccaacctataatcacctgctgggggcaaaggcaggcccaaggggtttgcttcattttgctgcagaatttctttcttcttctttttttaatcatgcctatcacagttttctgaaaaacatccaactcacaaaacctccagttctccagggagcgattaaatgtttgcctgtcgtgcagaaatgaagggctgcttttactctgtagtggagggataatgagcaatgatttatttcctttggattacacacacacagactctctctctctctctgcctctctctctatctctctctctctcctggcccttctgtgagtcagttgctaaggcactgtggggagaaagcacagtgcctcccattaccctgaatctttaccaacagcggcatgaaagttcctctgctccatggctctctccttactgctgccaattcccacccatccatgggtcatgcataggctgagggagagctatcaggaggctgtgaatcaagaagggagaagtgtgtctccagcaggagggaaaccgggcgagtcagctggcactttctaagcaggccctcccagaccactccccatccgcccagaggccgtgaggtctcctctctgcccacccagtccctttgaaaggccttgattgggaacaaccttccttggaggcagggtggacactgaccgcccaatctctgcacctcccacctctgcagaatcttgtctgaaaatccaattcccctcatacaagaaggaattgaggattattcatatattcgttcaaacactgctaggtgctggactgagcctggagatctaggaagcaaagtctttcttggcccccagggcaaactaccaggctagacacacagtgtggcagtaaagtagaagactatg

SEQ ID NO: 32574 - DNA, 1050 bp, Homo sapiens
ttcttggcagttggtctgctgattctcctccactctctgacttgaaatagaaggacaaggattccatcgggctttccctgagtacatgaaagctttaaaggcaatgctgtatgtgctgaatcccgccatgacactgtcctcattgttctgcgtttaataaggatgacttaatcagacttgcgcatggaacttgtttgaatttgaagccttgtcgatattatcagagtatctttcatttgaaccagaaatgtcctggccagcatcttctgtgatgggaaaggttggtacttgaaggatgtttagtgaccatctgtcctgccagtcccctgaggatcaaattacaggtttcagttacagagtggggaggctgggttagaaatgagggaggcttttctgcttgagcacctctgccaaaccactgggttcttcatctgtgaaagggaggtgttcagaagaatcttaaagccctttctggccctcaagtcagtggttttgaatggatattgcagtcgcttcttgattttccaggagtggctcgttgacttttctgtggattctttgtggggaatgtgagtctcaggatagtttccagttaccatccaacccccctgttgttaacccatctgaccgactgccagtcactgcatcttcagagaatgcattttcctttttgcctcagcctgagccaaatatcatctggaaggtaactctgctgtatattgaggcatacatgtgcatataaacatacatacatatatgcacatataaatgtagatgaaaggtattccaaatctgtgtgttaccggctgaccattggattaaccgcagttctgtccgcagtttcgttccctgccagagctgatgtaagcccgccctgggaggcaactttagggaaatggcttgcagggtaacaatttagatccatccctatttgccagtcccactggtctacctgagccatagctccctccctactgccctagccattgtccggaaggcctcccaagagcccccctgttaggaatacaaaagagctgcagttggctctta

SEQ ID NO: 32575 - DNA, 1018 bp, Homo sapiens
atgagaaattagtcagagggtcagagaggacctcaacttcatatgctttaaatagagcatatgcaattttaaaccatcctcttaaccaatttttcttttcttttcagtttttccccagttatacttccacatgatacaccagagaagaaagatcctttctcatactgaagaacacaagaaatttgaatagttcctgctttctgcacctcccaccaaaacaaacttttcaatgatcaaaaaatgctgcagattttttgagttcccaatacgtttcatagaaaataagtaagaactatttttaaaatattcaaacaaaactaaaacaaaaatccagtgtcacatgggcctgagattttattttagaaaaaggttgttacataaaacaccctggccagttcatttcagcatgctctttcaaccagaagttcttaatatttatgatggcactagaaagggatttggcattttatgtccttctgtgtccttcatgtatctgatcaatgaagacctgtaacactaagtacttgagagttacagtctgaataatgaagtcgtaccagctgaatagcccagcttgcagtatagttatgtttcagtctgcagtgtgtttagcattcccttgtcaaagtgcttgactgcatgctggaaactttgtatttttgaagcggcaaactctgttctctggaatgctctgaagttatggctgggacctatcccctcacatctaatgaatgaattataaaatgtatatgtctatgaagcttcggggtagtgcctgtaatcagaaaacaacttagaacccttttgtttgtttccaattgagtcattactgcctgccactaagaaacgtgcttgaatctaataagtatgtgtgtaccgtaaagaatatatcttatctggagctcagcctcaatcatgtcttaacaaaatgacaggtctcagaaagggggagctcaatagctcaaaagtgacaagtccttttcacagcaccattctcagaacacctctgagtaacgtg

SEQ ID NO: 32576 - DNA, 1074 bp, Homo sapiens
aaggtgataaaaaaaaaaaaaggttttaaagatagtcttttatgttgttatgcttgttggcaaaatattcaagtagataataaaagatacctaacttaaccattagatagtgtatcaagtctgatgtccatgagcttccagcactcattagacacaaataggattgatttctcatcctttgtttcctatttgttttgaaacccgtattgtaaaatgagtcttattttaaagattaggtagtggttttgctttctccatctatacagtaagtgtaaaaaatactgtacttggtcagtggttttgagaggtttaagaaaggtacctggatcccatggttttataataccattaaaaatattattgtttttagggagaaaactttgttttaatgtggactacattgaaaacttagtctgtgtaacaatatagacacctttcagttgctcaagaccgttttgactctaaacatttaagttggaatgttttagaaaatatattatatatcgaaacttagtacagtacatttatttatccatcccaaaatttctttcaggaattgttccatcttctgttgtcctgacttctttccaggtgatgtcaagagtttttctaatatgggcagtaacacatagcgtcaaagaggtaagtgtttatatagaccaaaataatgtcaacactaacaaacactagtcaacttttctgattcacatgtttgttatggctaaagagttccaggtcagagttccaggtcatgtcaatatagctgagataaagctcacattcactgtaggaactgggttaatagtgggaaacatatcccagatatgcagtgttgttaaaaagaagactgattaaatggtaaagtcctgtaatctgagttctcatggaggttcagatggtgtggatgtggtctgcaactcagttatatttttctgatatcttgttcgtatcatgttgcccaggccgctctcgaactcctgagctcaagcaatctgcctgcctcactctccccaaattctaggatttcaggcatgagccaccacacctgacccaagtcatcattttaaacctata

SEQ ID NO: 32577 - DNA, 1058 bp, Homo sapiens
ataaggggagggggtggttttgggatgaaattgtttcacttcagatcatcaggcattagattctcataaggagcactcaacctaggtcccttgaatgcacagttgacactagggttcatgctcctatgagaatctaacactgctgctgatctgacaggaggtggagctcaggcagtgatactcactcacctgctgctctcctgctgcgcagcccagggactggggacccctgttttagggtctttttaagtttaggataacagtcctttgtcaaatattatcttttgcaaatattttctcctggtctgaggcttgtctttttattccctttacagtatcttttgcggagcagaaatttttaattttagtcaagtccagtttgccagtttgttggacttcagacattctaataggcgtgtagtggtagttgttgttttaatttttatttctctaatgacaaatgctatggcacatcttttcatatgctcatttgtcatcttttggggcaaggtgtctattcaggtctttgctcatttttcagttggattgtttttttgttgagatttaagaattctttctatattttggatacaaattctttatcagacaggtgttcagcaaatattttctcttgctctggggcttgtcttttgattcttttaatagtgtctttgaggaagcacagatttttaaatttaataatgtacaacttaaccagttttccctttcatggattgtgctttggtattgtgtctgaaaacttgttactatagatatctcgattaccctgatttgatctttacatattacatgaatatgtcaaaatatcacatgtaccctgaaaatatgcacatctattgtatatcattttttttttttttttgagacggagtcttgctctgtcacccaggctggagtgcagtgtcatggtcatggctcgctgcagccttgatctgcagggctcaggtgatcctcccacctcagcttcccaagcagctgggactacaggcgtgcaccaccacacttggctagtttttgtgctttttgtagagatggga

SEQ ID NO: 32578 - DNA, 1050 bp, Homo sapiens
agtaaacttccctaccacccacagctagagtagagactcttcctcactcttctataataccttgcacctaactcggtattataccttcacaatgtattatgtgtgtggtctgacaccgcacccatgtccccaccagtaccactgaatatttttagagcaagagctatttcttattgatctctgtatcctggtaagtacagtaagtacatagtacctagcaggagtttggtgaatatttgatcatcatcttaccaaattctggtgggaatttccaaaacttatttcaaagttatttcagttccttaaaggaattagagataacaataaggagtaagctgtttctagcattaacctaaaggcaatgcttcatttttacttagatcacttaagtttatttgtggaatgatggtttatttttcggtagcattctgaaagttttcattacaacaacttagtcttcagaaacttattttaaagccttgagatacctttagtttacatattgttgatgaaaagtatagacctgagtcagactagggttactcactagctgtgtgattccaggaagtaactcaatttttgtgctcatttaattcttcatcagtaaaagggggataagaatacctacctcacagattgctgtgaaaattaaatggaaaaatgcatgaagaacactcagcacaatatctgaaacatggctgtattgaaaattgcccaataaaatggtagctcttattattacttaagcaacataatctcatagaataatattaaaagattattgttcctctaatgttcaatatttagatatatataaatgtaactctttcatattcttaattttcttaaattataatttctttgcaagtgagcacttcagggcccttcattcttagtatgagttggggttgcgtcttgctcacggttgtgacaatgcaacttggcaaatacggcctccagaaacaatcaactaaaatccatggaggggctcatttctgtgtagctgtaaatgagttcccacacctcaactttttcaaagtaggtggtttg

SEQ ID NO: 32579 - DNA, 1050 bp, Homo sapiens
aaatagtgaagttggtgggtgtaggatattggaagtgatagatagaagacataatagagagcctgtctagaggcgtccaaattttaaaaatttaacaaaaatgtattgatttccctgcattaagggcaatgtatatccagccctctctcttggggtaagtatagattaggattttggaattgcaagggacaaaaacccaattcaaactattttaagcaaaaaaggaattttctggcctctgtagttgatacagatacaggattaatttacaaagaaactagctcaggaatgagaaccaaggagctgacactgccagattctcttgctttctctcatttctgcttgtctgtttctctttgaatgttggtcttgggctctccacatggtgggaaacagggagggtgtttatttttcgcagcatctgtgtcacacagttcccagagaggattctggttggccctacttagactatgccagtgatgtgaggtgcttgattagccaatcttaggacacatgcccattcttctgtccaagggactatagactttgcttatggaaaagagggatggggatagctttgggcacacaaaatcaatagccgccatagttcgtatatttcattatggtgaaaaaccttcagattgcagggaagatctggttcattttgcttagcctccaggcaagaccatcataacatttatactttactggcaacttttaaaacctgaactatggaatgatacttaagaaaaaatcatttatctcgctgggcacggtggctcacgcctgtaatcccagcactctgggaggccgaggcgggtggatcacgaggtcaggagattgagaccgtcctggctaacacagtgaaaccccgtctctactaaaaatacaaaaattagccgggtgtggtggcacgggcgtgtggtcccagctactgggaggcaaggttgcagtgagctgagatcacgccactgtactccagcctgggcaacagaacgagactctgtctcaaaaaaaaaaaaaaaaaaaattctttatctcatgaaatga

SEQ ID NO: 32580 - DNA, 1027 bp, Homo sapiens
gggcatggaggaagcatctgcacctggaattatttctgccctttcaaaacaggattctgatgaagggagtgaaactatggctttaatagaagatgagcataatttggataatacaatttacattccttttgctagaagcactcctgaaaagaaatcaccactttctaagagactatcccctcagccacaaataagagcagctacaacacagctagtcagcaacagcggacttgctgtctctggaaaagaaaataaactgtgtacacctgtaatctgttcctcttcaacaaaggaagcagaagatgcacctgaaaaactttccagagcatctgatatgaaggacacacagctcctcaagaaaataaaggaagcaattggtaagatccctgctgccaccaaggagccagaggaacaaactgcatgtcatggcccatcaggttgtcttagcaacagccttcaagtgaaaggcaatactgtctgtgatggtagtgttttcacttctgacttgatgtctgactggagcatctcttcgttttcaacgttcacttctcgtgatgaacaagacttcagaaatggccttgcggcattagatgccaacatagctagactccagaagtctttaaggactggtcttctggagaaatgaattcagaagaaaactcatcaggtgcttctttttaaaactagaacttggctatattgaatgtgtatttttctttagtgaaatgatgttttatgttattatgtgtgaagtaatatattgtacaagtaataaatgtattgttgagatatattgacactgaggagcttataaaaacaagtcatcttaagttcacaattgctacaagaagaaagttgtggataactaggaaattattgtaagtaatgttttatttcagtacttagcaattagagttcttttattaagatgtatctgctggattaagggtacaggttgaaatagttctgtggctgtcctaagaaataatgggaaaagaatctctggatgtaagtttttctgttgaaa

SEQ ID NO: 32581 - DNA, 1038 bp, Homo sapiens
atttgtttctatttctttgtcaaacttattgttttgtttgttaattattttccaaatttcatttaattttttatctatattttcttgtagttccctgaacattttaaagagaagattattctcaattctttgtctctcatttctttagagtccattattggtgctttatttcttttagtggtgtcatttttctgattcttcataatccttgtatccttgcattggtgtctatgcacttgaagaagtggccacctcttccagttttgcaagtgttatgccctaccccacctctcacttgaggtgaaggggatagaccttcactatttagtctagcctgggattctggattggccatctggtagtgactataggcaggcagaccttgctgttgggttctctaactgggctgctacctgtgctttgaggtcagtggagctattgactgtactccatgatcttgtgaaaccaatggctgtgctccgtcaaccagtgaggccactgactgggttccaaggtcaggtggagctgccagctgggctctgcaatcacctttgattgggcagggttgcaggctgtattccctggctgagtgctactgctgtttagaatctaattgggcagggttgcgggctgggcttcagtgtttctgggtttgctgcccagccactcgtgacaggcagggctggagattcctccacagtatgcagtcacaggtttgcctccctgcctgggcctgggcaaaacctcaggctggacttcaaagctgaatggagtcactgcttaactgctaaggttgagcagggccagttaactgtgttctgcagatatgtaaggatgcagttttgcctcctggcctcaggaaactatatgtacagctgtgaagttaggtagggacactaaagtctggcagggccagatgccgacctccacagatttatgctaatgtgcacttgcctctgggtctggggaagccataagcagagtactgaggctgcatggggttaccgctcgccctctcagttcttatgggaccagatg

SEQ ID NO: 32582 - DNA, 1731 bp, Homo sapiens
catcttcatcaacacttgttagctttcatcttttttgtaatagccattctgacaggtgtgagatgatatctcattgtggttttaatttgcatttccctaatgttgagcattttttcttagacatattggccatttaaatggagaaatgtcctttgcccattttttaattatttgtttttttgctgttgagttgcatgagtcccttacatattttgaatattaaccccttatcacgtacggtttgcatatatttctcccacaccatggcttgtctcttcactctgttagattgttccccttgctgtgcaaaagccttttagtttgatacgatttcatttgtctatttttgtttgtgatatctgtgctttcaaggtcatatctaaaaaattattgcctggaccagtgtcatggagcttttccctcatgtttttttctggtagttttacagtttcaggtcttgtatttaaatctttaatccatttttagtatatttttgtatgcattgtgaaataagaatccaattccattcttctgtacgtggatctccagttttcccatcaccatttgttgaagagacttttccccattttgttttcttgtcacctttgtgaaaaatcaattggccataaatacatggatttatttatgtcctgttccattgatcagcatgtctgtttttatgccagttcatgccgttttgatttcaattcctttaatatattttgaaatcagggaatgtggtgcccccagctttgttctttttacttaagatatttttggcttttcaagggtttttttttttttaatgattctgtatgaattttaggatagtttattctatttctgtgaaaaatgacactggaattttgataggaattctgttgaatttgtaggtcattttgggtagcatgaatattccaacaatattatttcttccaatcatgagcacagggtagccttccatttatttgtgttttcttcagtttattttatcagtgtttcatagtttttagtatatactaataatatatgtatatatttagtaaatactaataatatatgtgtattgttcacctccttggttaaattttcactgaagtattttactttgttttttgttgcttgtttttcttaatttcttttgggtagtttgttgtgagtgtatagaaatgttactgattttttatgttgattttgtatcctgcaactttactgagtttataagcaaaacagttttttggtgtttaggattttctgtgtataaaatcgtgtcagcaaacagacaatttcatttcttcctttcttattatcttctattttttttctcttgcataattactctgggtaagagttccagtaatatgttgaaaagaagtggtgagagtgggccttcttaccttactcttgatcttagaggaaaaactttcaacttttcatcactgagtatgatgttaactatgggtttgtcatatatatggcctttgttgtgttaaggtacattccttctatacggaatcttttgagagttttttcatgaaagagtgttgaaatgtatcaagtgcattttctgcatcttttgcgatgatcatatagttttaaattcttcattctgttaatgtggtatatcacattcatcggttttatacgttgaaccatccttgcatctcaaatgtaaatcccctttaattgtgttgaataattcttttaatttattgttgaatttggtttgct

SEQ ID NO: 32583 - DNA, 1053 bp, Homo sapiens
agcataattcttccagatgggagctactagaggaagaatagatttgttttatttcatactgttaatgttttttgagttaggcaaggtaataggagagcctgtgagttaagatttagacctgctgagttagactgtctggagtacaggaacaagatgaaagatggaaatgtagactcgggaattattctctgaacatgtttttattgagctttttgtatagatctggcactgttgtagacactggagacaatctgattgaaagtaagtgatctgttaccagcatataagtaagtggtatattcaccaagaaggtagagtgtgtgaatgcagtgaaaggtgaattgctggggagtaacaactttttaaggaaagaacagaagattaaaattaggagagtgacatcacaaaagtcacaggaagaaaacaatttataggagagattttgcatagcattaaaataaacagacaacaagaacaaaggtaggtccagaataaatatcacaagacaaattactcaaagaacttcagaaaaacttaaaacagtattccatagtctcaaggaaattaaagatagtaggatctcttacagggagaaagactgagattgagacaaagtgctcaaagaagaaaaagaaaaagagaagaaaagtgagttaagtgaactcagaaaaataaagcaaaaaaattacaaaaatgaaagaaacaaatgtaaaatcattaataaacagacaaactcagggatattgtagtccactagaacttaagtattgtgaagcctgaagttttttgttttgttgttttttgggcttttaggtttttttccctaagtctttctgttttaattgctactaaattcatagttcagtgtctcctactacccttagcttcttcctcttcctaaaccctttaaaaaatttttatttttattatggtaaaatatatataatatttacctttttatttttaaccatttgtaagtgtacatttcagtggcaataaataaattcacaatgttctgtagccattaccactatctgtgccaaaactttttca

SEQ ID NO: 32584 - DNA, 1026 bp, Homo sapiens
acaatgaagtacagccctgcttagagaaacttgtggtttagtcagaaaggcaggaggatgaaagataagcaatataaggcagtgtgtcagtggcatatgatttctatagacaatatgtgctctagggtggtgaagagtagtcactagactggaatgattggattggaaaaggcttcatggaagaagaaaactcagatgagccttggtgagtgggtagaattggattggtaggaatggttcatgaacaatgttattggaaggtgagaaaagcttgttgggtaactaaattggcctgcctgaaatgaaaaattggagttgggagtgatggggcgatagttggaaaagtagcttgtggtcaagctttggaaactttaaatgccaggccaagattttgtttgtttggttggttttgttttgttttgtttttgaggacccaaagcatcagaattgtacaaactattctctttcctattgcattttcccttgagaacatgaactgacaaggaacaaggtgaaggagtttgactggactttagggataatataactcccttaaaagaagtgttaaaatgaaggagagattttacaaatggcaagtagcataaaaaatgggaattgtaaagaattagtatagatgatttttgactggggaaacttaaacactaattactttcagaaagaatttgagatgattttctttagtaggggtgatagtggtaaagcccttctatgaagtatgtgatggattggactacttctgagagccctttcttctcttaaaatcttacggtaaaagtttttgaagaatcatatttcaagaacttttttcttcttccacattagcatcttcagataataagaaacagatacctaatgaagcttctgctagaagtgaaagagacacatcagacctagagcaaaactggtcattgcaagatcattatagaatgtattcacccataatataccaagccctctgtgagcacgtgcagactcagatgtcactgatgaatgacttgacttcaa

SEQ ID NO: 32585 - DNA, 1068 bp, Homo sapiens
acctgcactggatgtttgttctatattcgagtggcaggaataacttcctgtcagacagtgcttgcacagcagctagacttcagggactgaaaaagttttgtggactgagtaaatgaatactttcctttcatgaattctagttatcacctgacatcacttaaacattgccagaccaatagctaaaattttcatgtagagtgcgttggtgtaattaacaagagcaagaaaatatacttcatttgtatttgtgtagtaacaggctcatttgatcattggtttgttttattttaaaactgtgtagtagtcatataactgcagtccttcccttatggtttctaacttgtcttggattgtttgctttaagacttcatatcgttaagtaaagttactcaacattatccgtagagatttgtgtggactgagtttataaaggagcagaatatgtcattttagttctaaggctttgattttgaagaaataggtttggaatttattaatttatgttagttgatgacatctgctggctgaggcataatgtagctcagctttattagaaactgtgaaaaccacgccttgaaaagaaagtaaatgagagcctgatgctgtgacctgtgtgtgaaatctgagaattcttcaaactagccaattcttaaggaccagaggaaatccaagagcagaaggaaagacccaggaatcaagaggaaaggacttgtggtatgctagatggccatgggctatgatctcaccctctatcattttagatttcaaagttaaaatattttagagggcacttttccatttgatttattataaaattgtatttctggtaagaaatagtatttgctttacaaaagtttattaaccagttttgtttgagctgatcagatagtgaaggtaactcttattacttttgattttaatcatctcagaggggacatgttcagaggtttattactgacatcagatagtatgatttatgaatatgatatatttacttgtctattgtaagagtgcagctatttggtgatatttaacattgagtttttactgtgtggtagacattgcttt

SEQ ID NO: 32586 - DNA, 1022 bp, Homo sapiens
cagatggttatgtgctcatgtgtaaaggtgagcaggtgctgatgtgccacatgtatccttttaggccatggcgagtgtcactgcggggaatgcaagtgccatgcaggttacatcggggacaactgtaactgctcgacagacatcagcacatgccggggcagagatggccagatctgcagcgagcgtgggcactgtctctgtgggcagtgccaatgcacggagccgggggcctttggggagatgtgtgagaagtgccccacctgcccggatgcatgcagcaccaagaggtactggttccactgacagccccaccttacttctcacccaggccaggcctgtggtccagccaggcagccctcagggccggctagcctccactcctcacctcctgcatctcccacccagcaagcctcgctggggagccgcattcttaccaaccgtaactgaaactgtggctttcaaatgctggttccataagggttttgtaagaaaacaaaaacagaacaagaaatacaaaactgctactctgttcctaaacacgtttagaaatcacgaaatcacagagttaaatgaaattaaattggtgttggtaccaaaaatagcaccttctcagagccttgagtgtactattgtgtgctttcacaggagaatacagtgtgcatcttttttcaaatgaattaaatcccccacactgatatctcccaaacagtgtttcacagaacccttatgggaaatgctgacaaacatcatcagaaggtaaattggaaagaggccgggcatggtggctcacacctgtaatcccagctctttgggaggccaagacgggtggatcacttgaggtcaggagtttgagaccagcctggccaacatggtgaaacacccgtctctactaaaaatacaaaaattagcggggtgtggtggcacgtgcctgtaatctcagctgctccggaggctgaggcaggagaatggcttgaacctgggaggcggagattgcaagatcgcaccactgcaccccagcctgg

SEQ ID NO: 32587 - DNA, 2148 bp, Homo sapiens
aggcattatcctcatcaacacaggaggaaacggatcatcagagaagtttagggacctgcccaaggtgacccagggatctgaactgagctccagcccacaccctcagcttgtcacacagctggtcaccctgtttccctgaactcctctgctgttggaacttaaggcttcagcatctccccatggccacaccctcgccctcagcccagcctctccttcctcccactccatctctactgtgatctcttcagagtttgccattcccttgattccttcatttccccatcctgcacgactttcttctgaatggttctctttaatctgaagaatgctcaaatgtatcccatctgcaaaatcccccatcctccttgtcccccatctccgcctgtccccacacaactaggttacctgtgggagtcccctacgctcactgtcaccacctccttacaccctgcaggctggattctgtcctcactgctttgtggtgcagcctggtagctgctttaggatttgcctgccttgacctccacagagcgtcgatgctggggcttcctctcacgtcttcctgggctgacagggccactggctccccttctgcctcccagcctgccccttcctctgaatagccaggattcaattttataagaggaggcaagaggctgtgtcttggcccatagcccacacaagcacttttgctgatggaaagctgttgaattctatacagctgaaaatctgtataaatagacacatttacaacttcctgtccatttggctatcaatcattgtaacaaaggtactaataataacaacttgcatgtgtagcagttcacagcttgcacagggatttcacatgtccttcagtatccctatctatgtgtaatgaaaatattttttccgcaggcactattaaattcaactcactttgccaaggtagcattagatgttagctttgttttgatgaagagtcctgacttaggtcctctgagcactgtccgccaggatgttgttcccaatccccatgatggtgattgataggttattgatccttgggacagggccaaatgacgctggtccttttgatgacatgtgttcctcctagggcagtaggagggtctggggctgaccagaagatgcaggcaatctctgagcacgcaggctgagggaaaggcaggttgaggctcaactgcaggagctgagacatttggattgggataaaatgtgaccaggcctatgtagcttttgactgtctgtgtgggtcacgctttctgaaggagtcttggaagtcttggtttcaaccaaggtggcccagtagttgtgacttgtgtgccagctcccaccacttggtagaacctacttggaggactgcattgaggattctgagggcaagcccaggccccttggagaagactcctatgaggagacagcgatgcctgccacaagtgtggagaaggagatgtgcagcgtctgctgtcactgctttaggctgtctctgaaaggcagggaactacccaaggtaaactcaactgggactattatcagagtcacaaaggacaagcattctggtggcttcagtgatttcatcaagtgtgaagcctggggcttattttctggtttggctggctagggctttgctttgaagtcatcaaatattggaggccaaaaagccatgcagatgaaggttttctgatgtcccacagcccctccgtggctcccactggctcacccccagaaacgggctgggctccacacaccactgctttcctggcagcttctggctgggctcaagggtggtaggaagcttttaggaatggccagcagctctggccttgggtcttgtccctctccaaggaacggtggtgacctctggtgagccaccagctctcaccctctcctacccttgactcctgactcctcttcttataccctaggtcaggggcacactcaaccgccctgaccttgggctaggctgtggaactctcgggcctgcaaggtatcagacatacttaaagcagctaggcttccctgccccccagccatcccaggggaaatgaagagcagcaggcaccttgcctggctcccctctgcagcgaacaggccttttcacaaggaaggcccgttcccttaacacacatgcctcaccccaagcccagg

SEQ ID NO: 32588 - DNA, 1152 bp, Homo sapiens
actgcaacctcctccacctcctgggttcaagcaatttttctgcctcagccttctgagtagctgggattacaagcgtgtgccaccacacccagctaatttttgtatttttagtggagacagggtttcaccatgttggtcaggctggtctcaaattcctgacctcaggtgattctcccgcctcggcctcccaaagtgctgggattacagccgtgagccaccgtgcccagcccacaaccacatccttaaaacagttgtctacacttgctgccttccttcactgactccctctcagtccttaactcagtctaatttggattcagtcctgtgactccactaaaatagtcttcccatgtccccagtgaccttgtcttgataaatctatgggctctcagccctcatcgtacttgacttctcggctgtagtggactccgttggccatgccctccttgaaatgctctcttcccatagtggtaaggagtatgggcttctggtcaaacagatatgggtgaaattccagccctgccacctacctgctgtgtggttttggatcagttacttggcttctctgtgcctcatttctatatctgtaaaaattagagtaataattgtaccacaacatagggttattattgggaggactaatgaatgagataatccatgtaaaatgcttagaaccatgcctcgcctattgtaagaattccataaagttttactattattaagagattttaatggcttgttatctcagtggaattacaacttcccagaaggcagtaaacattgaagtacaacatacatttctctattgcacattgactaagaatatcccatgtcctataagatagacaaggcactattcctctcctactggtgaggaacctggaccgctgcccacagccagcaggtaggtgggtgaggttgcacggcagcactgctcagagaggacttccccagcaagtctgaggagttgcacagtggagggacagggataggacctaggagagcaggggagacgttccaccaaagctgagttctaggggtggttttaagcaagggagagctgtgctttctttgtgaaagaaacagcccttagttggcaagttctccaatgcataactcccccaggcatggtaatgctgtttacaagcgcag

SEQ ID NO: 32589 - DNA, 1029 bp, Homo sapiens
aaacagagaggcacactctactagagaaggaaaatataaaatgaaatgaagatacacacaaagaaaagtaaggcatctcatcaggctacgtcactaatctctgtattccagagctttatgcctgagcctgcagactataggagaccagtgggctagtctggcgcagaaattcccaaagaaaccaataaatgtcctgagtgaatacagcagtctgcatatggatctgttccatttaaagaaactgttcctgggtcaccctggactgccgcatttagtctggggcaggaattcccaaagaaaccaataagtgtcctgagtgaatagagcagtctgggtatggatctgttccgtctaaagaaactgttcctgggtcaccctggaccatcttcaaaaactccccacatgaacgtgctccttctcacaatcacagatgagccaagtttgaattacagatctcctcggtgtgctcatgtaagctaaatgtaaactcgtctctgagattcttttacgtgatgaagcaatgagaacttaatctggaatccctctccaccctccacccccagaacagctggccatagttccctctccttcttgctcttgaatgtccacaaaagaacctttgtctgattgtgtttttctattgctcctgcctgagattatcactgataaaatgccacttatattttcttgagttctttatcctcctttagttcaaatcaatgttagaagatgaaacaagggaaaaggattgtttttctttttttgtttagtggaagatagcaggataaagcctattcagggcgtggtggtgtgtgcctacaatcccagctaccggggaggctgaggcaggagaatctcttgaacccagggggcagaggttgccgtgaaccaagattgcacaattgcactccagcctgggggacagagtgagattctgtcgcaaaaaaaaaaaaaaaaaaaaaaaaaaaaagcctatgcacttacaaataacgttttatgtttttagagggctcaattgcacagactgta

SEQ ID NO: 32590 - DNA, 1053 bp, Homo sapiens
ttctccaaaaggctaatccctttgttcactgtaggtctcctggctgtcagtcctcactggcttcttttcaaacttcttttcctcctcatgttggcgggctcttttgtgatttatttattttttatttccatgccgcctctggagcaagtgagaaaatatcatagctcttttggctgttttatccaccattatgatgataagtaagagaggatgataccctctactcttcatctgtcgtaagagagcaatagcttttaacctgtaaggtctgtgaatccagtctcctatttcagtagcaagtgtgcaggtatagaagactctcagcagtgtttaaatccttcatttattcatgctgctaccgacgcatttggggatgcccgttcaccattactatgaaggcgaccatatcccagtgtttcttgctctgtatcaaggtctagctgctcctaaaaatgatgactgggagtgtttttgtgtagagttggcaccacagtggcagagtatgaaaaatgtagagtccttcctttccaatacagactgtattcagctgtgcctccatctgaattctggataaatttcagatagtggagcagaaagggagaaaagggatctgattgactttaactaccaatgtggctcaaataacaattggaatggtttatatctaccagaatagacggcaggttttacaaaccctcaaaagacagacccatctattggtcatttgagtgctctgttctgattgactcaggtctaatggggggacttaacaatcttaaccatcatcttagactagctagcccagccaaccaggggatgttgttgggggaaaggttaaaagttgttctggggaaggaagaatagctgaggccaaaaggggaagcatccaggaggagcagctctcaggggtcatcagtgaaaggagcagagaagagtatgatgagctggagggagggggtttcaggtgcattggccaaagtgggcaaagacttggacatttgtctgtgtgcatctgggcttccccagtccaggctgcgtctcttcggagcctct

SEQ ID NO: 32591 - DNA, 1028 bp, Homo sapiens
atatctggtgtaaactgctcacagaaaaccctatgaaaccaaagggggaccattcaggtctaaaaagcgacaggtccgagactgggtctgtcacctgggcattttcaaagaggacattttgaagaatttgcatattcagatttttaaaatgcacttaacatacttcattacagatttcttgggtagggaggatgggataggccagggatgggatggagtcagttctgcctgggaaactaatccgaatcatttacctttctgtattaaccttggcctgtcctaaaaagagaacgactgtttcatcatgagttgctctgagttttgttaatgtttgtgttggtggattgacggttaaatgaagcatttagctggaatatgaactttgggagttttcatgttgtcctggatttctctttgtaaacctttaaaccttagcccctggttgattgtgttaaacccattatgagaatgttatttaaagttgtattataattgcaacctccactaattattcagtactgtagcagcaaagtattatttgtaagaatttggttatttttatacttatatccactctaagtctggcgttctagtcagtaaaatgatgcaataaaattaatatcattttcattgtgtgttttcctcttaataacaagaaaaccagaccagaatgcaacaagttaccagttgtacagtgagcttccacatggcaaatgtggaagctgagtcatttctgtattctcagtgcccagcactggggaggtacacttttgatgatggatggatggacaaacagacctaaatggcaggaagccaaacttagatacagcacctgcttttgtttatgtgaattggagaccataagtgaccaattcagatacttacaattccctcctcaatgtctcccactatcccttccatgccaactcttcatgtgttggaggagaggggaaagtaagcctatgtgtgctctggtggggagaatctgcagaactttaagatggtgggccatggatcttacactcatg

SEQ ID NO: 32592 - DNA, 1044 bp, Homo sapiens
cttgagtattttggagatttggcttatgtaaaacagtctggatggcagtacatgtcctttctaaagatcagtatttaggcaagccagtttctcagctgggctcagggtctttatgcttttgtgtttaggaggatatctatgccttaaaggggctgcctggtctacagagtggtgtgtgttcactttttcgtgtgaatctcatttctcacttgaaaccagaacagagtcacagagagctcgtaaactgatcagagaatggagtagcctgtgcacaaaaatagataagaaaatctataacgtttcaatgtggaaaaaggaggctgaataatcagacagaaatttaagatatttgagtcttgtttcccaaatgctggaatactagaactacatggtatatatatatatatatatatatgtgtgtgtgtgtgtgtgtgtgtgtgtgtacacatatatagtctttcagaagagatgcttcaaggctaagagtagaggttacatcacaagcctgcggacctgatcctaagatattgttagaaacagagaggcttggccgggcgctgtggctcacgcctgtaatctcagcactttgggaggccgaggcgggcggatcacgaggtcaggagattgagaccgtcctggctaacacggtgaaaccctgtctctactaaaaatacaaaaaattagctgggcatggtggcgagcgcctgtagttccagctactcaggaggctgaggcagaatggcgtgaacctgggggggcggagcttgcagtgagccgggatagcgccattgcactctggcccgggcgacacagcgagactccgtctcaaaaaaaaaaaaaaaaagaaaaaaagaaacagagaggcttagcagcaggaggctcaaagtgcagcagacctgtatcacgtgtgcaagaaactcatctgaatgcaatcccacctgatggcagagaaagagagagccagtgagacaggtgagaggtgtggaggtgtggccaccctgttcacgtgtgcccctcgggtgagccagggagcaggaggtaaga

SEQ ID NO: 32593 - DNA, 2097 bp, Homo sapiens
ccattggattgccttatttcacttaatcacctccaataaaatactttttatagctgggagattgagagccacaaagaggttaagaaaagttttttgataaggttaagatttgaggctaggcatggcgaatcatgcctgtaatcccagcactttgggaggcagaggcgggcagatcactttgaactcaggagttcgagacaagcctgagcaacagggtgaaaccccatctctactaaaaatataaaaatttgctgggcatggtggcacatgcctgtaatcccagctacttgggaggctgaggctggagaatcacttgaacccaggaggtggaggttgcagtgagccaagatggcaccactgcactccagcctgggtgacagagcgagactctatctcagaaaaaaaaaaaaaaagagttgtgccggcaacagtatttaagtgaggatcattccaaagcagtttgcagccttctggtactagaataatcttgtggactttagggtggctggcgtttaattaactgggagtttgggagaggtaaatagacacactcatgcattttccttttgtctttcagcatgtgaagatggatataggcttgaaaatgaaacctgcatgaggtaggctccatgttgatttagtctaattttgttacaaatcttatttagataaattgcctcacttatttcttttgagattggaaactaattcttgcccttttttctttcttggcttgcagttgcccatttggccttggtggtctcaactgtggaaaccgtaagtgtacaaaagtggaccattatgcgtgggcaggggcctggccctgttgttagtgcacaggtgtcagtctcctcccacttccctcagttcacacctgctgtcttcttaggttctatgccaatggcatgggggaaacaaagagaaaggccagacgtggtggctcacgcctgtaatcccagcactttggaagatggaggcaggaggatcacttgaggccaggagttagagaccattctggccaacatggtgaaagcccgtctctagtaaaaatacaaaaattagctgggtgtgatggcacatgcctgtaatcctagctacttgggaagctgaggtgagagaatcgcttgaacctgggaggcggaggttgcagtgagccaagatcacgccactgcacttcagcctgggttacagagcgacacttcgttttaaaaaaaaaaaaaaacccaaaaaacaacaacaaaaaaaacaaagagaaagacttgactggtactgttcaggggctcaaggtctgggctgggcagggagagaaacactcactcctaaatacccctgctgtgtgctgagtgttactgtgataaccagacatggggtgtgggacggggaggcagggactgtgcccacagaagaatgagaggacactcgacagtacttcttggagggagtggaattagaggaacagtaggaaagatttagactggcgggtatggggggaggacatcccaggcagagggagcaacttagacaaaggtcttcaggcagccatgggcccttggtgttctggggacagtgtgtaagtggatgtggctggaagataggaagatcggaaggcagaaagtagaggatttggattggcaaagtatatgaggtctgaactgttggggttgggatcaccaggctgaggagtgtagactctaatcaataactgtcaggcagctggcaaaagtcttagagcaggaaagcagtttgatcaaggaaagcaatttgggctgcattgagaacagactggacagaggagaatgtgggtgcagcttagatatttccagcatagtcccaccaggcatgctagagacacacttaggagtcctctctgctccaggtggaagtagagggtggaacgccaagcagccaagagtgttggtggggactgtgagcggggcgtgttttgcacctaatccagttcttggagaaaaccagttgtgattcatttaagattgcttgcactgacattttcttatattcatacattagaaattgaaattatctgcaaaattaaatttggggatatagcatatcataggatgtaatagaaatactaac

SEQ ID NO: 32594 - DNA, 1050 bp, Homo sapiens
aaaggatgagaggggcaaagaaaatggaggcagcaaggaaggtgcccctagaaacaaggtagaccccctttcctccctgcagaaagcctttttgttcacttatttaaccaactgggaatcttctgacctttgaccctaggacttttcctcaaggccttggaaaaaaaaaaacctatagaattccttttaaagcaaagagcttgaggtcactccaaggtccttcatctttcactcctgctgggataggctgtatccctccttcatgcccgaggccacctcagagccagttctatttctggaaggctgaccctgacttgggagctccaggccaggcctcccctgggtctgggttcagtccagcagacgtctgtcacccggagagaatgctcagctgaacaagagccgacccctcacagggaggggaggtagattttactttcttcatcgctagagcgcttgcaggggaagcgttttaaaaatctgatcgtcaaatctcatgtctagcactttccaacatgcttgatttttcttagggctgcttctttcagagcaagaacaaggaaggaaacgaaactccctgagagccctggacagtccagatcgagggctgagtcttttgttcacacaaactcatttggcttctaaacgtcctccacccaaaatcattacatccgcagcagcatttcaaaacacagcccagagtggcctcgctgagtgggcggctgcttttctggggaggctgcagccaccttcccacaggcccccaaggttcttgcatgtcccagaatatcccgctgctggccaccggcctgaaatccccctcatccggaggacccttggtggaaggtatgaggcaaagagggcctgcaggggaagggcccctgctgtctgaaggggactgggactggcagccgtggaagggaggatgagtttctaatcctaaccttgccccttccaaactcccaggcacagtctcagtgtctacccctggggggcccgttctcacaccccagaagcatcatagggacttattaacatggtccagctctc

SEQ ID NO: 32595 - DNA, 1052 bp, Homo sapiens
gaaacaacacataagaaaaccagtgttcagtgatttcagtgagtctgagttttctgataaccaggattgggagccttttggatgggtcctcctgtatcactagatgctatcactcatttcacaaggcagcaaggtctcaatgctgagagggcctccacaggtcctccagtctgcaatgtgtcccatgcaaatgtctgcccctccagcacccctgacagatggtcatcccggctctccctcagcatttttgtgtttggggaggcaccatgctactgtcactaacaagccctgagtcttacaagtaacgtgctccatttggttgttggagaagcttcctgcaggcctttcgtgccatggggatgctggtagtcagggcctggcccctgggacttccaaatacactgatgtcagcagcaagggccacagatgtccttttcttccctgtgggccatttccagctcttctcttcctggcagagttcaacttctcactgctgagtaaccgcgtttgcattccattatgtggattgtttgcctgtattagactgtaagtccctggagagcagctccctgtttatatagccattgttaagcttttgcacccacccgtcaccctgctggctgttcagctgatgtttattgctggtgtttcagccagtggtgacaagatgctgagacctagaggttttctttttctgcgtgtgtttttctaccactcaggacttccgagccacagttctaagctgaatgcaaagtttatatgccttaattttgtgatccatatgctatgctttaattgtgagatctgcagatgagagggagagaaggcttaaatcataatgaaaatcaatgcagaaggaaagaactttcccacccaaaggggaaatgacgctgagtagctgagcagccagcccgagaaacaataatcttagaaaaatgcagctccctggaggaaaggaagcgctttgagctgagccccgtctgagctgttaaatagctgtcgcctgaattgctctaactttgtgggccaacttcgtcatttagcttggctgc

SEQ ID NO: 32596 - DNA, 1025 bp, Homo sapiens
ctctgtgctcaaattagagcacctaaaccatgtttctgaaatacagtgtatatgaaattaaagtgtaagttgcagctagtataaaaaaagcaaatcattttattgtggcagaataatagtgacatcgtatgggtgggcaaaaagccacaggaccctgattaggaaaatgattttagtcatgaaaaaagtatgctttctgagagaatggtccttcatcttttataccctagttaatttttttaaagggaagaaagccgatgtgcatttttacagttctatatgaagagtaagctgatgatgggtttcttttaaggggactcaacatagagttatcagatttggtaagtccattatgggcttaatgtagccttcactgctgagctcttattatagggcacttgttttcaggaggtagctggaaattggggggcttatatcaagttcagaaatagacatgactaatttaaaatgttagaagtcaggatactttttagtaaacattgtttttaaaaatctgttgtacgttttgggattctaactcatttgtgtttggtaagaattcactggtgcctacatatccagccattttactaattttacatacgtcatatttagatggtgtttacagtaactgctgttgctttaatttaggtcttgtactgcataggtgccatcattggaacatcaattatttagtgttaatatgcttagatgctagtaccagttgtgtaccgagtgtataactggctgatagaaaagtgagatgtggaagtgtcataaatatatggtgttcagcttattttggaattaggacaatggtttttttgttttgttttgtatttttcatgtatacttcctagatcaactctcagatctttaatttgtgcatagggcttcctgaggatgttgctcttactagaggtaattgatcagttttcattgatggctccctcataaagtggaagtttaaaacctaatctgtggaagccacgaaacagtttccctcagccagtcatggtggctca

SEQ ID NO: 32597 - DNA, 1029 bp, Homo sapiens
tacaacatgatatatgtatacattgtgaagtgattgccacagtcaaactaatgaacataaccatcacttcacataactatcttttgtgtgtgtggtgagaacgcttaagatttactctcaacaattccatgtttacaaattattaactataggtcccatgctatatatctccagaactaactcatcttacaactgaaagtttgtaacctttgaccaaaatcctcccattcccccttaccatagctcctggtgactattattctactctgtttttttaattctgcctctttagattccacctataaatgagatcatgcatgtttgtctctctgtgtctggcttatttcaactaatataatgtcctccagattcatccacattgtcacaaatgacaggctttccttttttaagctgaataatatttcattatgtacacacacaccccccacattttctttatccattcatccattgacagacgcttgggttgtttctatatcttggctattgtgaataatgctacagtgaatgttcagatatctctttaagataatgatttcagttcctttggatatatagccagaaatgaaattactggatcatatggtagttctatttttagtttttttttgtttttttaggaacctccatactgttttccataatggctctgtcagtttacaatctcggcagcagtgtgcagtggtttcttttcttcacagcttcaccaacacttgttatcatttgactttttgataatagccatcctaacaggtttgagatgacatctcatgcttttgacttgcatttccctgatgatttgtgatgttgagtacatttttatatgcctgttggaaaaatgtgtggtcttctttggaaaaatgtatattcaggtcctttgcccattttaaaagtaggctatttgtaggtttttgctattgagttgtatgagttccttttgcattttggatattagcttttcttgatgaatatatggcttgcaaatgttttttcccattccataggtta

SEQ ID NO: 32598 - DNA, 1837 bp, Homo sapiens
catgctgttttggttactgtagcctgtagtatagtttgaagtcctggttttgttcttttttggctaggattgctttggcttttggggctgttttttttttttttggttctatataaattttagaatagttttttctatgtctgtgaaaaatgatattagtagttcgataggaatggtggtgaatctgtagattgctttgggaagtatggacaattttaatgttattgattcttctagttcattaacatggaactttttttcgtttgtttatgtcatctgtgatttccttcagcagtgttttttagttcttcttatagagatctttcaccttcttggttagatgtattcctagggtatgggtatgtgtgtgtgcatctagtgtaaatgggattatgttcttgatttgcctctcagttgaatgttattggtgtatagaaatgctgttgattttgtatcctgaaactttactgaaattgtttatcatgtctaggagccttttggcagagtctttagggctttctagatactgaatcatatggtcagcaaagagagataatttgagtgtctcttttcctatttggatgtcttttatttctttcccttgcctgattactctggctaggacttccagtactatgttgaagaggagtgatgagaataggcgtccttgtcttgttccagttcttagggggaatgtgtccagcttttgcctgttcagcatagtgttgattgtggtttgtcatagatggctcttattattgtgaggtatgttcctttgatgcctagttttttgagggtttttataatgaagggatgctggattttatcaaaagctgtttctgtgtctattgagatgatcatatgattatgtgatttttgtttttaattctgtttatttggtgaatcacattcattgatttgcatatggggaaccagcattgcatcccgggaataaagcatacttgatcaaactgaattaactttttggtgtgctcctagattcagtttgctagtattttgttcaggatttttgcatctatttccatcagggatgttggcctttagttttgtttttttttttccccgttgtgtctttgccagattttggtatcaggatgatactggtttcgtagaatgagttagggaggaatcccttctccttgattttttggaatggtttcagtaggattggtaccagctgtcttttgtacatttggtagaattcagctgtgaatccatctggtccagggctttttttttttttttctttcctggttggtgtgttttttattagtgatttaattttggaactcgttattgatctgttcaaggtttgaattttttcctgattcaatcttgggaggtgtgtgtttataagaatttaactatattctctagattttctagtttgtgtgtataggggtgttcataataatctcattggagcttttgtatttctgtgggattagttataatgtcacttttgttgtttctgattgtgcttatttgaatctttttctttgttaatctagctagtggtctgtcaatcttgtttatcctttcaaagaaccaactttttgttttgattctttgtatggtttttgggtctcagtttcatttctactctgttttcttttattccgttagccttgggattagtttgttcttgtttttctagttcctttaggtgtgatgttacatgattaatttgaaatctttctgtcctcttgatgtgggagtttagtgctataaactttcctcttaacactgcttttgctgcattctatagattttggtaggttgtgtctctgttttcgtttgtttcaaagaatatttt

SEQ ID NO: 32599 - DNA, 1069 bp, Homo sapiens
actgccatgttaaaaaaatactgttttgtgaggaaagttggaaatttggaaaataagttactgttaattataactaatatgaagaaaattgtataatatttaatatttttatgctaaaatatttactcataattacaaatgtattaatcaaatttaggtatttaaatttttttaaaacaaatggaacaacatagttaagctttaaggaatgtaatattactttagctttggtcagtttgagaagtaggcaaaacttaaatactttttttgttttcagagatgaagtctccctctgttgcctaggctggagtgcagtggcatgatcatagctcactgcagcctccacctcctgggctcaagcaatcctcctgccttagcttccttgagtttctgggactacaggtgtgcaccagcatgcctggctaaagttatttttcacagtagtttcttatttttcttatttgtccatagtatggtttggtttgcctttttaaaatattttcaaaaactgtagaaaatgtactctgaaacaagataagtttctctactctttgacttgttaacctgccttcctttaatgtagggccccctgaaaaattattttacattctacagaagatgaaacattcattcagttgggtctagatataatgctttgttttacaaattatttcacaccatattcttttggaaaaatactcaattacttctttaaactcaaactcctgaagacctcaggatttttgaatattggaagcacaccaccatgcctgggtaatcttttttaattttttgtatttttttttttttagagatggagtctccctatgtatcccaggctggtctggaactcctgggctcaagtgatcctccgattttggcctcccagagtgctgggattataggcctgagccactgtgcctagcttcagtgtgcatttttaattattccagaaaatatactcagtttactcttaattacctaggagtgaattgacgaggtcataggttaattattaaactttttttaattaaaatttttactttagattcagggggtacatatgcaa

SEQ ID NO: 32600 - DNA, 1063 bp, Homo sapiens
tggtccctgaaattctggtttaagctttattcctttagactatggcactgaaaactgccacattgtaaatatcctcaggactgctatttttggcagttatgggagatttaccttttttgtgaatattatattttttgtgaatattacagatcctttatttaggtgatgttttggatgtgagagagaagatgaggatttgaggctaaggtcgaagataattataattgatcattttgtttagggccaggattactgatcaagcgcatatcaaggttaaacatttatcatcattggcagatttccttgtggatcaagtacttttgtctgacgtgccctttccttgtctaaggtgcctattttaaaaatgcatatatagaataaatgttagaatggcatatatccatagttgtgttattttcttctcaccccgtgagcattttactctaagaaactgccagtcttatcaccaagagggattgaggagtaaaaaacttaagtacaatttttaattttatttttgtaaattcctctaaatagtaagccacagaatacctatcctgatgttctgttatacaaattatggtagctttttagttatgccagttttcataatttattttttatttcaattagtaaaaatgttacgaagctatttctatagggaagtttttataaatgattctcctcccggccgggtgcggtggctcacgctgtaatcccagcactttgggaggccacggcaggcggatcacgaggtcaggagtttgagaacatagtgaaacccaatctctactaaaaatacaaaaattagccaggcgtggtggcacatgcctttagtcctagctactcgggaggctgaggcaggagaatcgcctgaacctgggaggcggaggttgtggtgagcagagcatgccattgcactccagcctgggcagcagagcaagactccgtctcaaaaaaaaaaaaaagattctcttcccaaaaaaaagagatttttgaaaaaactaaatcactcagaattatatatgttcactaggtttctttttccataaggttctttttt

SEQ ID NO: 32601 - DNA, 1036 bp, Homo sapiens
aatttgaatttctttagtttctggtcacactaaacttctaaaatttttgttggcattttatatttcatgttttgtgaaattctcccttcttcttttcttccctctccctccacttctttttttggggctttaatgtttttctcagtaatttatatcatttttgggggttctttacattaatgaacaaatcaagttcttcagatatagaataatactaggttttatgtaaaaaattatttctaaaatcatttgtgatagtgattggttgttacttcggattcattgctgatctatggggtatctatttcaagtgtactctcttcttgaaattctgactaaaacccagattatcttcttattgggtgttggactctgtatttggtgatatgttctaggtatttgtaaatatagattaggtatttacaggctttaagctattttgcttgtctaatttgcgataaactcatttataatgtatcattttagaatatttctaaaggtattatttaagtatttatatacctctgtagttgccagatgacggagttgtcctattctaagtatagtgcgtataagagaatgttttagggtagccctttagagaattcttaggaagatgaagtgactagaaacaatatacagcagacagaggtgtaagaataacaaacaggccaggtacagtggctcacacttgtaatcctagcactttgggaggctgagacggaagaattgcttgaccccaggagttcaagaccatcctgggcaacattgtggaaccctgtctctggttttgtttttttttttttttaaataaagaacaaacaattatttttcaattgtcctggcatgttacatgtaatgggacagggaatggttttggactgttttttaaccactggtctgccatctccaggtgaatgggttttttgtgtctggagtcttagaactttaagatataaccagtgagtaattttacattttctcaggagtgtatataaaaatttatgcttcagaacttctgttaaaataattcatt

SEQ ID NO: 32602 - DNA, 1035 bp, Homo sapiens
gagcccaggaaagtactggctgagatcttgagtcatatgacaaaactgttgagcatgaagataattagattttcattgttaatttgtctttcttttgacaaattatcttttagaatttgtgtggtttacttgatattttataaatacagagcccatctagaagtctaaatacctcttttattccctagtattgtgttgaattttggaccttaaccttttttgtgcgcttttaacttcagtatcagtttccttaaatgtgggaatgaaattgatgttacgatttcctgacttctgcttggtcttatgatcatcttttcccaggacgtctttgatcttttttctcaggtagattaaaaaaaaaatctgtttatccctcaatttatgtactctcaattcttattacccactgcctattaatgaattctatagcactgtatatagttaggacacacacacatagatcatcattctggaagcacctgtatgtgggtttagcaaaggattaaacataaaatggccttttgtcacaatgaactttttatttatgtctaaaattggcttttctttttttaaacagataagcgtaaagcaggaaattacttttactgatgtatctgagcaactgatgagagacaaaaaacaaatcagagagccagtagacttacagaaaaagaagaagcggaaacaacgttctcccgcaaaagtaagacaatgtattaaggtggtaatcacaacctcttaattccaactgttggttaattctataggcaagaacctggctggaccctaaggcagatgtagaagtcttgtgtggtttagtaggagggggtgcgtgcctgcatggaggtggtgggccttgctttcaatttttctgcttctctttcaccatgttcctgacttgtctaaaagtgaacttttctttttccatatctctatcggatggcatgcattgccctttcttctcatttgtattagttttccttatctttatattaaggtttcaggaaaatgtaataccagttattcatcaggaaa

SEQ ID NO: 32603 - DNA, 1029 bp, Homo sapiens
tggtcagttgtgttgtagactgtttcttaatttgagcttctctggtgttttctcatggttagattgatgctctacatttttgactacccacagaagtgatgttgtgtccccctcagtgcatcatatcgggggcacataatgtggataggtcttaaaactggtgatagtaaccttgatccttctttactgtgattatctgccaggtttccccactgtagagttactgtttttttctttataattgacagataatcttggaggagatactttgagaccgtttaaatatcctctctctcaaaattttgcccactaacttcagcatctattggtgggccttgcctgtaatggttattaccatgatgtttacctaattgtgatttttgtcttttccgcattccttctatattgatgttccttgtagctgtcccatttcctccatttatttgttgtttttactgtttcattttgtatctgtggatatgcattttattctgtgggttataatccagtactgttgttgcttacgttcttgctcagattccatctttggtcattaggagctctttcagtctgggtcttatgtccttttgacatcctctgatccttttttgaacactttagcttctgacattatgattttctagagtcatcttatatttttccccgacccagctctgggctcaaccacttctcagagaactctggttcttttttgtttggataatggcatttagaaactaagttctggatgctaggtgtgttgggtgtcgttgcttttcagtgacctcagcaaacaagctaggaaaatacatgtatgtctactaacccacacatgcacacaacatctatagtaatttctttatattggtagggcccgggcatctgtattaaaagagattgagtgaaagagagaaagggattgtatagttaagatgtatctagattagcagctctcaaatgttctggccgtggggtccctttatactcttaaaaaatactgaggactcctcagagcttttgcttatgttg

SEQ ID NO: 32604 - DNA, 1038 bp, Homo sapiens
aactatatttttaaagatattttctttgtggttgctgtcaggattatgcattttaacaggctgcttattatcagtaagataaactttcttccaatgtaggtccattttctcttctttattgtactgctattgtaatatacatctgtatatattataaacccagtagtacagtgtcgtgatcattgctttatacattcttaggtcttttaaagggaggaagaaatgagaaaaatatgtttatggagtgttttttgaattaatccacatatttgccatttctgatgctcttcaattctttctgtggatttaagtctgatgtgttttcctttcagcttaatgggcttcctttagtgtttgtttaaggcaggtctactagcaaaaaaaattttctcaatatttggttatctgggaatattttttcatttttgaaggatagttttgctgtcttcttggttgacagctgtatctttcagctttttgaatatgtgatttccctgtctttcttgcctctattgtttctaactggaagttagccactaatctctgcatatgctgaatcattattctcttcctgctttcaagatttttctccttgggtttgctttcaacaagtttgactatgttgtgtccaggtgtaggttgctttatattttcctacttgaaattcattgtgcttcttagatctgtagatttattttccttagaaaaattaaatttggggccaggtgtggtggctcatacctataatcccagcacaggtggggatttgggaggccaagatggtcagatcacctgaggtcaggagttcgagaccagcttggctaacatggtgaaaccctgtctctacaaaaatacaaaaattagccaggcatgatggagggttcctgtaatcccagctactcgggaggctgaggcaggagaatcgcttgaaccggggaggcagaggttgcactgagccaagattgtactatcgcactccagcctgggcaactgagtgagactctgtctcaaaaaaaaagtaaaagtaagtttggcaag

SEQ ID NO: 32605 - DNA, 1029 bp, Homo sapiens
tttaggagtgggctgtggttctagtggcagtttaatttttagagactttgcagtctacttggtttgtttgatcctactggagctcccactggaaggggtttccccatgctgggtttctgattgtctacagatgggagaggattatggtgggacccacctactggtctcttcttttctcgcctgtcctggtaactttgggcaagtgaagaggttcttggcccaacctgagccacttgctatggctgggtccctgaattttgcctacttgcctctctgtctctaggtggaaaacagcctcaggccaaatagggaagaagagtgcttcctgtggtctttattgtcatttgggcttcaagttgatctccttctcctgatgttttcaggacaacatcagagagttgttgccatttgttttggcggaggaatgtgactatctgagctgctttctgttgctagattggtggttgggaaatgccaggtctggattgtcttcttctgttgggtgtgaggacatgaaacactctgctgctcttttgtttctccattccttgggtcccaaattggtttactgcctttttaccacctttggattttcctttgcttattatttcagtggtttacagttgtgcttcgtgagtaggggcagtaggagaacagatctaggccattttatctgaactggaagttgaagtccctgcatcatctcaatccaggcagttatttcagcattgaaaataatggtatatattgtctacggccataccaccctgaacgcacccgatctcgtctgaaaataatggtatataattatgtgctttgtgaacttaaaatttatttttaatttttaatttttgtaggtacatagtaggtgtatatgtttatggggtacatgagatattttgatacaggcataatatgattatggggcatccatctcctcgagtatttatcctttgtattaccaacaatccaattatattattttagttatttaaaaatgtacagccttgtttacttctaagcattata

SEQ ID NO: 32606 - DNA, 1053 bp, Homo sapiens
tatgggtttaccacttttttttgtattcattcatcagttgttgggttgtttccactttgtttttttttttttggccattgtgaataatgctgctgtgaacgtccatgtgcaagtttttatgtgaacatttgttttcatttcttttgtgtatatgtgtatgtaagagtgaaaaattgctgagtcatgtggtacctctgtttaaccatttgagtaacttccagactatgtttcaaagcagctttaccattttacatttctatcagcagtatatgagggttccagtttctccatatccttgataacacttcatactgtctttttgattatagctatgctggtgggtgtgaagcagtatttcatggtttgattagcatgtctctgttggctaatgctgtggagcatcatttcatctgcttattggccatttgtatgtattttttggagaaatgtcttctgatcttttgcctgttttttagttgggttgtctttttattgttgggttttaagagttctttatatgttctggatgttagacttatcaggtaaatgatttgcatatatcttctccaattctgtgggttgttttcactttcttgatagtgtcttttgaagcataacagttaaaattttcttattgtaataaaaaatacataatatgagacctatccttttaacaaatttctaagtgtgcaatacagtattgttaattataagcacaatgttgtacagcagatctctagaacgttttcattttggatagcttaaacaatacccattgaatagcaactgcgctttttttttttttttttttttttttgagaaacaaggtctcactctgtggcccaggccggagtgcggtggcacggtaacagattgcagtctcaaccttctgggcttaaacaagcttctcgcctcagccttctgagtagctaggactacaggcacctgccaccacgcctggctaattttaaatttttaaattatttttgtagagactgggtctcattctgttgcccaggctggagtgcagtggtgcaatcacagctcactgta

SEQ ID NO: 32607 - DNA, 1030 bp, Homo sapiens
atatcattttcactgctttttaaacctgcacttatttttgtgtgttcacagttctagcaattttatgccatatataaattcatgtaactaccaccaagaccaagatccagaactattgcctcatcacaaaggaaactcctcttgctatccctttatgttcccaccccattccaacactcctccttgtaccctggcaaactgtttactatctatagttttgttctttccagaatgacatagtttgtttatgtatgtatactttgtatacatacatactttgtttagccattcacttgttaaagaacttttagtatgttgcagtattttgttattatgaataaagaggttatggacatttgtgtacagcgttttttgtaaacaaaagttttcctttctttgagataaaagcccaagagtgggattgctgggttgtatggcaagtacatgtttagttatttaaaaaacttccaaactgctcaaaaatcagttgaacatatttgtattggtctgttttggggttctgtattctcttccattgataagtgtgtctgccttccctccagtaccacgctgtcttgattattatagctttatagtgagtcttatcgagtagagtgcctcctctcacttcattcttctctgtcaagattgttttagctcttctggttttgttgcctttccatataaattttagaataatcacatctgtatctacaaaaaaaatcttgctgggagtttgataggaattgaataaacctatagttgaatttgagaagatcttttttttttttttttttaagatagaggtccttcagtccgtgaccacaggatatttctccgtttacttagatcttccatgttattttgaagcaaattccagccatcatatagttttccttaaacggtgttattgaggtataacttatataccatacaattcacccacttaagctatacagttcagttgttttcagtgtacagaggcatacagccatcagcataatcaattttagaacagtttcatcaccct

SEQ ID NO: 32608 - DNA, 1043 bp, Homo sapiens
gagttaaatgaattgttacagaatatttggaaaggtcattttcaaggttttggggacgagcctaggaaacagatttttctgtagccataggggcttctggaatagatgcacaaactttgatggcagtttggggcaaatttgtgtaagttggagagtgttagctttgaggaaatgagaacagacaagaaaaacgcagtgtttgagaaagttatttatgtattgatttggtaggagctgataaaaaattataaaagttgtggagagattttgaatagctaaagtgggagatatcatggaagtgatttatgaagcttttttttttctttttcttttttgagatggcatcttgctctgttgcccagagtggagtgcagtggcgttatcacgcctcactgcaacctctgccttttgggttcaagcgattctcctgtctcagcctcctgaataactgggattacaggtgcccgccaccacacccggctaattttttgtatttttagtagagatgaggtttcaccattttggataggctggtcttgaactcctgacttcacgtgatccgctcgcctcagcctcccaaagtgctgggattacaggcctgagtccccgcgccggtccgatttatgaagcttgttacttcaagtattagaaaagtaaaatggaaagatggtttagagaagatttcttttgggaacaatataaaacaagcaaggcaagaaaaaactaaaatgagtaaattagggtgtggaaaagttagagtaagaggaaggattaaggcggaggctactgaaagagatttcttactgtcaggctgtgtgataatacaaagctgtgttctgcagcgttttgttggatactattgataactggttctttaaggaaaggggcttaaacaggccttggtttgtagaggtgaggatattgacaagcatcattaaatgtaatatttttattaaagaaacttggaagtagggagccctcatattccctgggcttttgcagcccaggcccgattgggccagctgcgcgggcgggactgtgcc

SEQ ID NO: 32609 - DNA, 1045 bp, Homo sapiens
aagttcaggacatgtttaggggttggtggtctagattagctataatttagggttcatgttgaggaatggagggaaataaagctgggaagtaggcagactatctcaaaaattcaggctaacttggattttgaaaatgtatttattgagataaatacagtaaagtgctccaatcttaagggcacttaggtataaatttatgtagccaccacccagttcaatatacaggacatttccgacttccagaaggatgcctcatgtgccatttccaagctgatatctcatccaaccaaaaataactattattctgacttttgtcataacagagtagtgttgtgtgtttttgaattttgtataagtggaacccaatttctgtgtctagttcctttttctcaaggagcatgtctgtgagttttatccatgttatgtttggctgtttattcttttttcattgctgtgtggtattctatcatatgaatataccacagtgtatttatctattccatgattattggatggtttcaagttttttgaagtctgaggtgttctgtttgtttttttcaggcagagtctcactcacccaggctggagtggtgcgatgtctgctcactgcaacctccgccttctgggttcaagctattctcctaccttagccgccctagtagccaggattacaggcatgtgacaccacgcccagctaatttttgcatttttagtagagacagggttttgccatattggccaggcttttctcaaactcctcacctcaagtgatctgcccacctcggtctcccagagtgctgggattacaggcatgagccaccatacctggctgaagtctgaggagttttaacttaagtcagtatgcagtggagaaccagtgttgatttttgaacgggtaaataagagactatttaagaatactaatctggtgacctttctctttttgtaatgaagagaacctggtgactgggagacaaagttaggaaaaagtgtgaagtaggctggacacagtggcttatgcctgtaatctcagcattttgggagg

SEQ ID NO: 32610 - DNA, 1031 bp, Homo sapiens
ggcccaatctcctctgttaggttagagtcataaaatattaatgtttttgaaatttgtgtatgaggtgcaaatcactatggtggatgttgggagattagaaagataattactccacttctttttgggagtctaagtaatggcaactcttgagagtcttccttactttcagtagtaacagtattcacatgtagtttatgtattgctaaattttgtatttgtgacaattattctctttgttttgcaaatggtacattgtaacctgttctagagcagagacttcctgtagtctctagggaaactaacagcaggttgattcttaagtgcttaataaatacctgttgaatgactgatagaaagtagtgttcactgttagtgataatagtgggattgtatgaaattgctgagtactttgggggtattgtaggcaaaactgtgtgtgtgtgtgtttgacagcgtgaaggacaaaagggatatctggagaggacctttagatttaagggaagaagacagactggattagaatggaattgcagtggttctgtaacaacttggaagaggtgggaccaaggggtctcttctaaatttgaagctagtttaatctggagtaaaatctggtctgtagcagggtgctggtttaatttagattttttttttttacctcaggcataaatgactgttttaggactgtctgatttaattcttttttaggatagtaaaaataacagataagcttcttctctcaaggaatttgtagtatttacaatttttttttttttgagacggggtcttgctctgttgcccaggctggggagcagtggtgcgatctcagctcactgctgggttcaaactccgcctcctgggttcaaacaattctcctgcctcagcctcccaagtagctgggattacaggagcgtgccaccatgctcagctaatttttgtatttttagtagaggtggggtttcaccattctggccaggctggtcttgaactcctgacctcaggtgatcctcccaccttggcatcccaaagta

SEQ ID NO: 32611 - DNA, 1040 bp, Homo sapiens
tcaaagttttatcctacaaatgcaagtgtacattttccaccttccatcttggatataaagggagatttgtactctacttaattgggagccaatcttgccaactcttttatccctaaattattttccttgctgaaaaacactgccctgggggagtaagagtggttaagtattttatctagtgatttgatgtcctcaacttcaccactgcctctttatttcaatgaaccacagtaactgaatacttggggactgtgaaaagttttttaagccacattacagagtttgaactttgtctcaggatcagcggataacctttgcagtagaaagctgcttaaaagcaagggggtggtatagatttggactttggaagatcatccaagcagagtggacagtagattagaggagtgtgggagtgggctaggaggccagtcaggaggactggtgagagatgatgatgctaatctgaatttagggcattggcagagagaccagagaaaagtgagtggattggggcaatgtttaggaggtagaatcaacagactgggcaattagtggaatgtatgaggtgaaggagaggagaaggaaatacagatgcactcaggttttcattctttagagtgcaagggagcacaagggaaagatttgaggagtagtggaagataggttgagctttggctatggaagcaagtacaaatgtctactaaatcagttggttttatagatctggagttaagagagatttgggctgatggtagaaatttggaatttagcaatatgtagatcataatcgtgaagctttgtgaatgacaagtcacataggaatgtatagattgaaagactgattggaagatagctgaggacccaggactgaaccttgaagaaagccagcactttaaggatgttttcaaagtataactacctgaggtcagctgggcatggtgatgcccatatgtagtctcagctgtttgggaggctgaggcaggtggatcaagggctgcagtgagctaggatcaagccactgcattccaacctgggtgaca

SEQ ID NO: 32612 - DNA, 1029 bp, Homo sapiens
gggatagtattagttataactaatgtctaggtatactctttaaaatgaattatgatttaataattctatttttttgccatgggagccatttgtgaattttgcatttcatattttggttcatttttattaatatgcaatgaataaatttagtagcaaacttaaaaaatgataaaaatgagcatctattgtgctgagcatggcatgatgtaaatactttctctagactatttggagactgatttaagttctgtgactttttgtcctaatgtacaaatacaccttgtgcatttcatggagggcaaacaggttattgtcaagcaaattagaaaatagcaaggtcctgataatgtttagaagactggtgcttcctaataggtcttacttatgctggcaagaaatcctaagtagtcaaaatatttaaaatatcctttatatgattttaccttaactttctgccaaaagtaaattgaacttttgtatgtatgagacatggcattgcctaccagccctttataattaaaagtaagactggagatgaatttttatgacccctcttcgccactctttcagagctaactaatattttgttcttttggatatttcttggtacttggattaatctgatttattaataacctaaattgaagtttttgtggtgtcttggtctttgttgtgaatgttattctctcattttggcagaagtgaagttaaaaatgctttttatttaatgaaacactagctaaactagattttatcatattataaaatcaattatttatgcattaaggcttttagagtgttcctaataaaactgtttctcttatgtttaaacaggctttctgtaacagaaagaaagtggttaggagtaagggctttgaaatcagatggatctgagtgctttatccacagacctttgtgatcataggcagagcatatactgtgcagctgtgtcctcatctgtaaaatgaggataataaatctctgcctcacagggttgtcataaggattaaatatgaaaatacatgaggc

SEQ ID NO: 32613 - DNA, 1034 bp, Homo sapiens
gcctaaaataaaagtttaaatcttggtgaagattgtctacagacaattctgaaaatttagttttccttctaccagaaagaaagaaaaagagagaaaagaatcttctaaaaaaaaaaaagaaagaaaatttttatacagtaagaagtttaggaaatgagagaggtaatgtggttcttttcaaacttaggtcatttcatgacatatgtatgtttatgtatcccagagatttgtaaggttattttttaaagatcatggccctgtgagaggatttttgtttctgtttttttgttttttaagttaaattagccactttaaaaataatactttagaaaacagtgttagctgtagccttctaagtaaattttaagtttacaatgaaaaaggatatatttagtatatgcctgttttttcacccacataggtattgattacttttactgctaggagagaaccttgatttggataatctggaataacttaataatgtttgtacttgactttgaaataaataaaggatcattgttttcttctgtagcccagttctaatttgaacctgggagttagaagtgaccatacatcagtaatagctagactgtgaatacatatttaagtagatcatcaataaatgtgtggcacacaaaaggattattgagtcaactttcacaactatatttcaatataaatttattttaaaacatggattttatacttaaaaacatgttggaattacttgaaaaattggttaaacaactgcaggatttggggtagggcccaggattttacattttttatttaaaggtccagctgctttcagtacagatgggcgatggacctttttttttttttttaaggtggagtctcgctctgtcacccaggctggaatgccgtgacatgatcttgactcactgcaacctcctcttcccaggttcaagtgattctcccacctcagcttcccaagtagctgggattacagacttgcaccaccacacccagctgatttttgtatttttagtagagatggggttttgccatgt

SEQ ID NO: 32614 - DNA, 1079 bp, Homo sapiens
ctgcctggccatcatggcgaaaccccatctctactgttaataaaaatacaaaaattagttgaatgtggtggtacacacctgtaatcccagctacttgggtggctgaaacatgagaatcacttgaacccaggaggcagagtttgcagtgagccaggattgagtcactacactccagcctgggtgacactctgtctcaaaaaaaaaaaaaaaagttgttgtatctgttgaccctgcactgaggtgagaggattgcttgagcccgggagtttgagaccagcctaggcaacatagcgatacctcttctctacgcataatatttaaaaataaaataaaaattaggtgtctctttaaaaggtccctggtctcatctgccattcaacaagccagtccatctttaaatctgttgaatgtgtccttttaacaattatggtgttcagttgtgttattcttggcactgttctgtactttactactgacagtttcagtaattttatatcatctaccaaccctactggtattattgttgtgtgcctgtttgtattctttagcttttatgatagctgattttatgcttttatcttttttccttctttgtaactggatggtatgacagggtcaatttatgattcatatgtcttatctttttgactggggagatattaataacttgctttatcagaatgtgctttcagaattcagcgaatttgtcactggagcagatggtaaatcaaactgcttggctgtgggccagaatgtattattaatacatgtatatatgtatgtgtcaaccaatgagggcttcataaccaaccctgatgttgggtggcttgtgcttaggtgatttcttgagctttcttttggttgatgatttcctgctgtctctcttattttcttagtacataaatatataaaaacttatattttataaaaatgccttgaggactgagatttttgtttttgttggctgatttcaacccactgggttggctctttttctttatcttcttttagcatttttaccttcttcctcatttttcctgtacgttttgggagagctgtgtagtgtatcatctgttttc

SEQ ID NO: 32615 - DNA, 1067 bp, Homo sapiens
gcctcccaggctcaagcgattctcatgcctcagcctcctgagtagctgggattacaggtgtgtgccaccatgcccagctaatttttgtgtttttagtagagttggggtttcatcatgttcgccaggctggtctcgaactcctgacctcaggcgatccgcctgcctcagcctcctaaagtgctgggattacagacatgagccactgccctcggcctatgtggtttcttaaaacaactccctaatttagtaattcataaagaggcacaagccatttgggcaaatatttcagaattactaggtgtttaaacaaacatacattcagtgcattccttccccttcccctcctctcccctcaaagagaaaatcaaactaaaaacccgtcctttgaaggtcttcacatcccttcacttctctccatactctctctcactcagtctgtcttcagttgaaaattactgtaatgtttttatggcctcattgtagctgttactgataggaatttggtctcaccagaaaagtaagttagttttgcgtgtgctgtgcacagtggggctctacttttcatttaattcccaaaattacttccaatagatgggtaaatggaaccagccagaggctcatagagaagtaatttgaccatggtcacaagctagtcagtagcatggctgggatttgaatctaggttcacctggcattgaaatcagtgcttcttccattaagccattttgcttcattaaaaaaaaagtttaaaatagtcttgtacattgtttcaatactgaattttaaagtttttagtgtagttaacactaagttgtaatttttttagactagtcaagtgcagtagtgagaaggggggaaacagtagaacaaagagtttgatctgtaactgatttgtgaaattgagataacttactatcttcagaccagcctaagttgtaattttggaaaggaaaaaaaggtttgaaagatgtgttgatttatccatttttttactacaaagatgtctaggcaaatagtgttcagagatgaaaaaacagcttgcttaaccaccattttttttctttttt

SEQ ID NO: 32616 - DNA, 1093 bp, Homo sapiens
gggaggtcatcgtgacaaagggtggcatgaggtacctggccttgacgccctccccggctagacggtccagattgggggtgtccacatcctgatcctagtcccagcggaagccctggaaggagatcagcagcagctgtgagtgctcttcctccctgggacggggtggctactcagtaggacaggcggcagcagctggagggccccgaaccctgtcatcccatgagcacctgtcatgcactcctcacagagatcgtgggcttctccctctttaatccgttgttgaacaacgtccacattaataattcagcccagctctgttgtgggacaaacaacccggagtgtagcaaggtgccgcatatttgcaggacaggatgaaagcgttctggagatggatgggggacatggctgtacaatgtggtggatgcacttaacaccactgaatttttcctttgaaaatggctaaaataatagattttgtatgtattttaccacaataaaaaaattaaactggcctggcgtggtggcttacacctgtaatcccagcactttgggaggccgaggcgggtagatcatttgaggtcaggagttcgagcccagcctggccaacatggagaaaccccatttctactaaaaatgcaaatattagcagggcgtggcggtacatgtctgtaattccagctacttgggaggctgaggcaggagaatggcttgaacccgggaggtagaggttgcagtgagccgggattgtgccactgcactccaacctggacgatggaatgagactccgtctccaaaaacaaaaaaaatcaaaccatgtgaaatattttgggcccttatactaattccaacattttgaagatctggggagaacaaactagattggtgctttccttggcttagtatgtcctgtttttatagggagagcaaattactgttcaccagcactattaaaatagctacaacaggatgggcatggtggctcacacctgtaatcccagcactttgggaagctgaggtgggaggatcgcttgagcccaggagttcaagatgtcagcctgggcaacatggcgagaccctgtcactaccaaaaata

SEQ ID NO: 32617 - DNA, 1058 bp, Homo sapiens
gtggtgatatcacctttatcattttttattgtgtctatttgattcttctctcttttcttctttattagtcttgctagcggtctatcaattttgttgatcttttcaaaaaaccagctcctggattcatggattttttgaagggttttttgtgtctctatttccttcagttctgctctgatcttaattgtttcttgccttctgctagcttttgaatgtgtttgctcttgcttctctagttcttttaattgtgatgttagggtgtcaactttagatctctcctgtttctcttgtggtcatttagtgctataaatttccctctacacactgctttgaatgtgtcccagagattctggtatgttgtgtctttgttctcattggtttcaaagaacatctttatttctgccttcatttcgttatttacccagtagtcattcaggagcagtttgttcagtttccatgtagttgagtggttttgagtgaatttcttaatcctgagttctagtttgattgcactgtggtctgagagtttgttataatttctgttgttttacatttgctgaggagtgcttcacttccaaatatgtggtcaattttggaataagtgtggtgtggtgctgagaagaatatatattctgttggtttggggtggagagttctgtagatgtctattaggtcctcttggtgaagagctgagttcaatccctggatatccttgttaactttctgtctcgttaatctgtctaatgttgacagtggggtgttaaaatctcccattattatcatgtgggagtctaagtctctttgtaggtctctaaggacttgctttatgaatctgggtgctcctgtattgggtgcagatatatttaggatagttagcacttcttgttgaattgatccctttaccattatgtaatggccttctttgtctcttttgatctttgctggtttaaagtctgttttatcagagactaggattgcaacccctgcctttttttgttttccatttgcttggtagatcttcctccatccctttattttgagcctatgtgtgtctctgc

SEQ ID NO: 32618 - DNA, 1015 bp, Homo sapiens
ttcctcttgacgtgcagcacccatgtgttcctccactgatgtgctcctctcgaagtccagccgcctgtgtgtctgcctgctagggtctcagggtttttataggcacagaatgggggtgtggcagccagggtggtcttgggaaatgcaacatttgggcaggaaaacaaaaatccccatcctcacctaggtccgtgggcacaggccctgggtggagcactagccagcgacaacaccctcctctacccagtacttcccttcttcacttccatatcatttaaagggaccacattcttcccttccgatcacttcccttctgtatcacaaagtgctgggattataggcatgagccactggtcccagccaattccgttcttttaatgcaaactagaaaataggtgttcagaaaggcctgccctatccacctcagggagttgctatgaagatcaaattagatcatgtgcaacagaagtttagaaaagattccaaaagcactgcacaatgggaatgtatttttaaactccactgagtggacttaaaactatgttttttactttcttttttttttgtttgagacagagtttcactcttgttgtctaggctggagtgcaatgaagccatcttggctcactgcaacctccgcctcccaggttcaagtgattctctgcctcagcctcccaagtagctgggattacaggcacccacaaccatgcctggctaattgctttctttctttctttctttctttttttttttttttttggctttttagtagagatggggtttcacagtgttggccaggctggtctcgaactcctgaccttaggtgatccacccaccttggcctcccagagtgctgggattaaggcttgagccaccgcacccaacctgtgtttcttttttaagcaagaaaacaaatgcctctccccagcactcactaaaccaatccctctttttttttttttccataggattcttatccttcttgccccagtgcaaacaatctattttcttttgg

SEQ ID NO: 32619 - DNA, 1044 bp, Homo sapiens
gtgcacaccaccacgcccggctaattttttgtatttttaatagagacagggttttgccatgttggccaggctggtctcaaacccctgaccctgtgatctgcccgatttggcctcccaaagtcctgggattacaaacatgagccaccgtacccagccactcttgattaacttaatggaaatatttagagattctttcttttctgggttctagagtcttctctgtaacctctgcaggtaatacattttccttcctgataaagcatttctatggttgctttcacttgcaaatcctctaatacttatttattccatttctgattggcattagacataattctcaatttttagtgacagcacttttgttaacttacatataaatcgactttgccttgaaatgtgacattgactagaaggacgacacttctaacatgttgtagaacatagtttgactggctaatttattatttagaagaagctaatattgccattatgagggacttaggtggctctgaagaacaagttgtatttctgatgtttgcaatgttaaatcacagatattgccaatgtgaaatagtttccgtatgctgtgttctcaatacacaccttttccaaggatatcccaagctgtagtcttaggaaactgtgatttttcttatttggtctcataggaatttggggagctatgcgggatctccataaaatgagctccagaaagacacatgtgtgcgcgcacacacacacacacacacacacacactcacacatgtaccgcaccacaattgaatctgtttatttgggacccatgattattttcaacaaacacttctgagaaataatctgaacacttaattggatgcaaaagagtgagtatttactattctaccctttaattagcataatcaatgtttccagcagcaaaagcaattggaaaatcgctagttttattaggttcattattctcccttagcgtagtgtggcatcagcatggctattattcttaaattgcctccttaaaacaagggctggtgcttcttacaggccatt

SEQ ID NO: 32620 - DNA, 1035 bp, Homo sapiens
atctggagaaactccagaatggcaactttgtggcaatttcagttctttgtcttctggaaggaaagatttcaaatgagagacacaggcaaggtttaaagcaggagggagaatttattttaagcaaagcgagaatttattagagagtacacttgaaggagagccatgtgggtgacttgaaaaatcaagtgtgttgtttgcttcagtcacgccccccacatccatgcctgggcagttgtttaaaggtattttgttcctaactgcctcccccattatcttcatgtacctggaatttgtgatacaatgaacaataatatagccaatccatagcttatgttattttaatgtaaattctttgtaaacaacttaggaacagcctcttcctttatctttaaaatcccacttgtaactgctactaattgaagtgtatattcagggcacttgaatctatgctcccactgagctgttcttaagttttgggctcaggtgaactctaaacttagtcatagaatagggtgttagacatgagcagggcaggagagagggcccccaagaatgttgggcagttgtcaagccatggtcaggcaattataaatctgtccccctgaaataatgagcaggagaagggaggaaccccagagctgtctggttctcattaagtaacggacaggcaggcataaaaccgtccctctaagataataagtggccatgactggtgcctggaatgacaggagtcttagaacagacagaagacacctggaattagcaagccataatccccgatagggttttaagcatgtgcagtgaaagggcaagatggtgaaatttaactggtatatgaccttcctctggagcgctggaccagtgagaactgcccctactgagcatgtgcaccacttcaataaacacactgcacatgcagctctcccaagtgctggcagggccactgcacatgtgatagataaaggcccgcccaggggaagaacaaaaggaggacacagaaagcccaggaaaagatagggggtataaaaactctaa

SEQ ID NO: 32621 - DNA, 1026 bp, Homo sapiens
gagtgccaccttcagtccactccagccaccctggcccagaaatactctggacactctgaaatcttaatccctttacaccctacctcttgccatacttcttcccctctcatgtctctctctcccacctctgtggatgtctgagctcctcagcctcctgccctcaccgctttacctcttggtctcacttcctgctttgtgcagccttcgctcagtgatgtgctcctggatgccagtgatggactcaggctcacatgcacagcaagggccaggctgccacgtgggctgtacaggctatagatgtgtacttttattttaactgttttatagatgataaaaaatattttgagaaaggagtgtcttttccgactcatactcagaaatcatatgggccagcacaagtcccttatctgataagatcagcacccaggttggagctggttgattaatagaaaacatgagttgaagcagcagacaggcacacttaggtctcagtgaacacacagtgcagctgcagagcagaagaggggtgagtcattggccactcgtgctcagcacgccctgggttccactgagtctctaccctgcctccttcccttactgttcaaacagggacacctgcggtgggtgtcatatctactcaagagtggactgaggcctaaccacagtcaggtgccgcatcccagatgtcagtcgtgctgaagacaaaaaggctccccttctctgtgaaaagaaaatgaattatcaagtgtgttagcagtaggcacatttttatatttttctccttggagttcaggaacttaatgaactgagtttaaggaatctaggaaaatatatttgctttgaaaacttttctgatttatgtcttgaattttgttggtaagtgttatgctgttaggagccaaaaaccatttttaaaggataaagtcatatttatgatctcagttttttatcctaagagaagagagacttatatgtgttccttaaatgggatgattttgccaaggtgacattgagcggattggtggt

SEQ ID NO: 32622 - DNA, 1066 bp, Homo sapiens
ggtaaagtaggccagtttcaaaacatctaaatgaaataaaatatatacatgaacatacataaacatgtctctatatactcccgtacacactggaaatagtcgtttataaggtataatttaaaaagagattcccttcaaactattaaccagtttttaagtagtttcagaataatcctcaaaacaaaatgggcaaaacctatacaaataaactacaaagctttataaagagaaataaaaatttggagagagaagttcctgaatggcaaaagtcaatgttgtaaagttatcaattctctttcttttagcttataaaattaatacaaatttttctaataactagtgatggtgagcatcttttcatgtgcttattggccgtttgtatgtcttctttggaaaactgtctattcaagtcctttgcccattttttaattagtttttttggttgttctgttgttgagtcgtagttccttatatattctgaatattaatctcttatcagtatatgctttgcaaatactttctccagttctgtaggatacctttttgccttatgtcctttaatgcacagaagtttttaattttcatgtagttcatctatttttgcttttgtcacctgtgcttttggtatcatatccaagaaatcattgccaaatctaatgccttgaaactttttgcctatgttttcttttgagacttttgtagtttgaatttttgtttaggtctttgattcatttagagtttatttttgtacatggtgtaacataagcatccaacttcattcttttgcatgtggatatttcgttttcccagctccatttttttgaagactctccttttcccattgaatgtccgtggcacccttgtcatttgaccatatatttaagggtttatttccaggatattttattccattgatctccatgcctgtctttataccacaccatttagattactgtagctttataataagtttcgaagtcatgaagtatgagacctccaaccttgttctttcttgagattgttttggctattcagggtcccttaaattccataggaatctataaat

SEQ ID NO: 32623 - DNA, 1089 bp, Homo sapiens
aaattttaccctttcattagtttgctattaatgttaactttaattttaatgaaaccttatagataattttatttaattttaatgagtttgactatgaagtgagatttttatatgcccattataacccttgacaagttttgctaaagagtagattagcattttaagaaaatcttgtggtgcttttattttagtgtttaatttacagaaaaaaagcatataatactcttttgagtttagttaatgtgttaacacacaagagttttatttgcagaattaatttttatgatgtttttacaatttgcctaaacctttcactttattttatttaattttaagacaatttattattcttcagcaaaatgtacatttttatgcctttttataatttttaactaaaaacactttttactgtttttatacaccttgcatgcaaatccatgtttagcagttttaattacatgttataatgataacttttagcaatttttaactttaaggtaaaatgtgttaagtttttttgtgtgtgacttgaaactaaaaacactgactcattttgtaatttgggcgaagtagctctgaaatataatgctgttttttcaattttaaacacttgggtaaaatcgcaaggtgagtgcttaggtagaaataagtaactactgaacaggtgggagcaaagtttagttgggcaatactctttatgataccgacatgtgaatgcttactagttttaaaagtgctggctttattgttgtagtcacagaggagtctaaaggcaaggctgggtagcttctggctcccacgttaacattatttatttagtatgccagatttttcttaaggtgcactagccactgaggatatttttgctggtgggaactgagattttctagacaggtaaattagctgccaattatggtttatcttagggacatgtttatagagatagtattcttacttagcttgcattctaaattttgttcccttattatcttgttaaagcgatgaatatgtttgtacaatgaagacaactttttttgcctttttaggttagagcttcagcatgagaattatacttcaacacagaaagtt

SEQ ID NO: 32624 - DNA, 1022 bp, Homo sapiens
cacagaaaggctgtgcacctgcctgaggtcacctggcagacaacttgcagactcagaaatggagcccctgcttggagggtgggaaagggttgggggaggcccagggtggagtgtgggctctgcccagccttgtgcccttcacagtgtctagcactttcattccttcccagcacctgatttggtgaataggtgcattttaaaacatattccaggtttaaatccttagctgagtatttaaaccaaaaagccaaatgtcctcctagtaaaactggcctggggcacagaccttgccttagtttcctggagctccgtgaagcttcctgggtaagttgggaactggggctaaaggtcctggggtccctgagcaggaagagacttagagatctttgaagcatggaacagatgaggaaactaaggtttgggaaggggagcaaggacttgctcaaggttgtagctgatgatggtattggccattgggcagtgccgggtgccaggccctgaaggggtcctggagacagaggggctgggtgtagaggtgatgctgggcagcagagaacctctgactttggtgcagagcattccccttccccaagcttgataaacacccagcctgccctggtcactgagcagggacaaaggttcacagaggtggccccgtcacagctggacactattgactctccttggcaccagacctagcatgtccttggcttcagaggatgcagctttcccttctcctctctatcaaagttctctgagcccctgctgggcaccagcggccagtccaggcactggggacgcagcagagacatggagtgcactgtctcagggggagacaggcattagctgaaccttcgcaaggcggtgagtgtcccagatggagagagcaatggcagagagtgcaggggactccacttccttattggtcaggatgggctgggggggtggttgtctcctttcccactagatgggtgtgaagtccaaggcagttaggcacatgcgggtgctctgggaccccagtg

SEQ ID NO: 32625 - DNA, 1024 bp, Homo sapiens
gacctgactggtagattgtagattgggtgtgctcgtttttatatttcattttaggagcctcacagtctactcagagaaaaataaaagaaggcaaaatgagtcctccccatttccatgcaagccagaacagttggttgtgtgggagcctcgtggtgcccagcggaggacggccaggaccagctccagcagctggggtgcagtgcggggcgcagggcgtccaggtccagctggtgcaggtgagagctggccagtcacacaggccagctgtaggcggggtgggagggtcacgcaggtctgagcagtgtgcggcatgctgcatcccctgcccatcgcagcaccccctgcctgcctgcccctcgtgcatcctcccctgtagactgccccaagtcctgtctcctcacagcccagctcctccctttttcccagcctgtcctgcatctgctcaagctctgagtgttgctgggaccgtgcatccacttcctgaacctgtctgtgcacagccctgcgtctagccccagagtagcccgcctccctgcccgaggcccccagggctgttttgcagcaggatgagatctgtttgaggccaccctgcccttcttctgcagggctggggcaaaagggctccgcaggccgtctcagccaccccatttctagggcggcctgcttgtggcgcactagcagcctttctatgctgaaggtggtgggggtcttttcagtgtttttctattttctttcctacgaaacagagcccctccagggcaggcccaggcccctcccagcctgtccgggccacagatacctgcagctgtggccagtttccaggaggtctttgagcacacctgcttcagcagccctgagcacacctgcatcttcagtctcagtttgaggggctggaatggggagggaagatgatttggaaggatttggggagagaagagatatacaagccggggctgtctgggtttggcccaggtgtgtgcccctcttcaccactccactttgtagattccctgtggcaggggat

SEQ ID NO: 32626 - DNA, 1075 bp, Homo sapiens
aagcatttttaatataattttgcttttaatatcataattatctatcaaagtttctgatatattttgttttgatttgttttgcattactaataattgcagttgtaacagttcaaaccaaaaatgttaatgcctagaagttaaataaaagttaagtttatgtacatatttttatatgctagggtgataaaagacttgaaagcatagaaatgcattcaggtaaaattctggaggtaagtgggatagtatacaagctcacggaggatataggcacgcttcattttttgcagttgactttttttttgctttttacaaattgaaggtttgtggcaaacctgtatccagcaagtctgttggcaccatttttccaacagcatgttctcacttcatgtctatgtcggtatttgttagcaataaagtatttttaaattaaggtatgcattgttttagacataatgttattgcagacttaatagactgcagtactaggaactgatgtgaagtttcctcaaggaggggtgagtaagttttgtgccccaggcacctctcttgccccagacccagccctgctcttctgtctgaagcaagtagagcaattagaaaaagagaaaccaggcgtggagaacagtcagagatgatccagagcgagggttgctgggttttctggaacactgatggatgaacagaaaggaagtattttgtaatggaagtgcatctccctgcagtgagggggaactgaatctgtgttacccagaaacctcctggttagcatttgcacttcaaagaaaaagagccctgaggcacccagaaaagacagcaggctgtgcctaagtacagaggacccaaggtttgtgcacccagttggcttgcctgctgagtgtgaagctctccgggacccagggcactgcggaagacaggaagggatctggagtgaggtgagcaggtcagggagacagcatatgcagggcaagtcagctctcaccccatgggctgctcagaaccttcctgtcaaacagcctcgtaaaaacagcctgccttgggcagcagggtcacccaattgaatacttttattaggaat

SEQ ID NO: 32627 - DNA, 1211 bp, Homo sapiens
tgccggccttggtgcacacagcgcgtccttgtgctttctcaggagagcttcactggggacactctgtgatgtttttggagggtcatttggtaatgtgttcaggagccaaaaaatatgcataatattcagtcttacaattacattttttgaatttatctcaaggaaatcccagggatctgtgtgaagctgcacatgctgctgctgctcagtgcgggactgtttataatatttgtaactcaaatgtccagaagaactgtacactctgtgcatgttttcagtaagttcatatttgtaagaaaaagtgggtgtgttgagagacaaatttttgtgtacatttacctggaaacaagcagtagtacacatatgcatgcatgaagtggtgttttcctgagtgttaagattgtgaatgttttattatgatcatttctactttttctattggaaaatactttgtgtaattaaaacatgaagatggagctaccatcaaaatggtgagcaatagagcactgttcctcctggggtggcctggtgggcctgagggactcaggtggtgatgaggagtggccttgagtccctttcctttccatgggacagtggggacgagagctagagtgatgaggcaggttaagtgtgtgcctacctccctgtggctggagcactgttgtggccaccccgggaccccctgagcctggtgtcgccctggcttgctggtcccagcctagggagtgggcccctatgggcagagggtgaggtggctgtgctggcactgcagctcaggcacacacacactggagtgttccaatgggtgatcaggttggatggagccttgaaattaagtcagtgatgtaatttttataatctgtttcactttaaaacaaaaatctttgcacacctggtccaagttttctcccctttcttcctgttgctgccatgatgaaagcagaagggaccaccctccagggagagcagcaggaagggagatgcgggtaggggccctgggtcagcaggggcggtcagtccggaggtgcacccccatttattcctcgttctggaagagatttctagtcacatgcatgtggctcctgtgccacatgtgtcatgaggtgcccaggtgggtttggatttggatgagggcatctttgaggatgcaggggctttgtcataccctgtgggccccgtgtacacccctggggcagatgtggcctctaaca

SEQ ID NO: 32628 - DNA, 2492 bp, Homo sapiens
cactggttagggtggtagctgctaggtttcttcaccatcaacttcttgtttttccctttgtaattaactatcttgcagtagatgctttgagactgtatgtggggcttgggggtccctaagaccaccttcacttctaatagcaactgcaagcttgggggtcctcaagaccacccttaggtaattctctagaaggactcatggagctcactgatagctgttgtactcacggctaaggcttattgcagcaaaaggacacagattaaagccagctgagggaaaaggggcccaggcaaggcagggcccatgagagttcctagtgtgacgcttcaagtgtcctctcatggaggtgtgaacagtgccaacttctcccagcatgtgacagcacccagagaccattgccccccagggaagcccacctgagactcactgtctggagttttgttgggtctcagttgtgtggattggctggccttagtctccagccctccagaggctgagctggcgctgtgtgcccgaggcctccaccacagggttagcacagactgtggaagtggcccagggcacccagttagacagacattcttaccaggcaggactttccaagggtctagagatctcccaggagctgggggcagaggcgaggcctctctggcagggttaaccctttgccttgcactgcaagtgccctgtttctctttaagctttcctctcatgtaacactcagcaggggctttttgcctgtggggtttaatggtgattttccatttcccttattcttgtgtacttattaattttataaggaagagctgtctcttctccctcatttacttattcgcagtatggattcaatgatactgattcttttttttttgtttttttttgagatggagtcttgctctgtcgccccggctggagagcagtggcgcgatctcggctcactgcaagctccgcctcccaggttcacgccattctcctgcctcagcctcccgagtagctgggactacaggcgctgccgtgcccagctaattttttttttttgtatttttagtagagacgggggtttcaccgtattagccaggatggtctccatctcctgaccttgtgatccgcccgcctcggcctcccaaagtgctgggattacaggcgtgagccaccatgcccggcctcaacgatattgattctttgggctgtagtcagtattggattatgatcaatattatcaccatttattttgttgctccagttcttccagctgtggccaatccttcagttggattcttgtgccccatcaacattctccatcctggctttttgttttgagcacttccttccttcctagcaccaccaggctcttgtattatccctgtccctgccctggaatcgactcctcctccagagagccctggtttcttttgttagaggatggtatatagaatccaacatgcagacactcggtggacttattgttactggggttttgttatactagggtttcagtggtcagtgctagtatttatgtatgttaacccacgctgtgctttggattcaggctatttcaaattttagataatatggtacatatattattaataccactagttactacattggtacttttcagcaaaatatatctaagtgggatcaaatgagactgtaaatagctttacatcagttcaggtcagttatgttgctaaattacttttggcattaagtttagggaaaaaaaattgggtttgggattttttggtttcaacatttgtgattgagagactatggacctgtaataagtccaagaacagcagttgcagtgtaacaggactgttaatggaatcgggtcatttagaaacagtcaagacttcgctgttgtgcatgtggttaggagccagtgcacacgtcagttcttaggaaatgtacagtctgagcaatagcatttgaaatccaagactcttcccattgtgttgctgttgagtgtagaaaataaaatgtgtgaatttctttatcttgagtattgagattctccccttagaataaaacaagaatttttctctcagtgtaaaaatgtcaagttttattcttgaaatgaatagcaaagttaagcttaaaaacgtgaacagcttcagaactataaatgggtatgtatacctttctgctgtctaagggcagagaagggaaagaaagtgtggtgcttatcagaggagacagcagcaagacacattgtgacagaaaaccaagggtatcctgtgtcacagtgaagtgtaatgagggcacctctcctttcaagagacgaagattgaatacatgggaagcacactctccgctgtgtgttgtctaggagaggtgcaccctgtatggaaatatttgggaaggttaagattaagacagggtaaaataaagcaaaggcaaatcacaaagcaagggctaatgttaatatgaaaagtgcagaattcaaggaaaaagcatggggacaaagaagatttttcctctttttggtt

SEQ ID NO: 32629 - DNA, 1046 bp, Homo sapiens
gccagcaagaccttggtcttaaccccgtgttcattttcttgctagctgtgtgacgttgggctacctcgcttctctgagtacaaatggtgtgtggtgaatgggtcccaggtatgctacgagctttgagggctgctctttttctcttcatagcgataagtgttaaactgtctttcttaggaaacgttcacagacttgcaacagctgatgtcctctgagtactgtctgactccctcaggcaagttcctgaattcagtaccatcattattatttttgtgtaagactttgacaaagtatagcccctgccaccagagcagcctgtacagtgggtctctaaggtgggacctgccccgggcctgccatgcacgtgtgtgaaacagcgtgaaaagtgtcgcggtaaggtgaccctgggttacccaggcaaggctcggtgtttgtttcagaaagcagagaagtatgtaattgattttaaaagtttctgtttaaaatatttggctatgttttagactatgaaggaatgaactttgcttctctggataagaaagtcacatacattgttccagctccaagtttgttcggccctcgccacaagtggatgtagcgtttggccctttgtgtgccttgctggtgactctggttttgggagctcggatatgtcccagaagcaggcttatggcacttctgtagctcccttgctacccttcctttgtgtctagataagtgactgacatgcttttctttggtctcaggaaagtgggggctcagcaagaactgattaccgagccattcaactagccaaggaaaaaaagcagagaggagcggggagcaatgcaggtgaggccgtgtgtgctgcagccggacgagcaagggcctgagggttctctgtcactgttactggcagaagaaacacagcaggtgtttctgtgctcttggttttacttttctgttcagaatacccttttatcaactccttagttttatttgaacttaagggaaaaaattagtaacaaaattcccagcatcagtatgaacatattttatttgcctaa

SEQ ID NO: 32630 - DNA, 1026 bp, Homo sapiens
acctccctgctaataatagctccctagggccgatggaacccctggtcctggtggcccacagtgatattcccccaagcctggacagccctctggttctcgggacagcagccacggttctgcagcagggcagcttcagtgtggatgacgtgcagactgtgagtgcaggagcattaggctgtctggtggctctgcccatgaagaacttgagtgacgacccactggctttgacctccaatagtaacttagcagcacatatcaccacaccgacctcttcgagcaccccccgagaaaatgccagtgtcccggaactgctggctccaatcaaggtggagccggactcgccttctcgcccaggagcagttgggcagcaggaaggaagccatgggctgccccagtccacgttgcccagtccagcagagcagcacggtgcccaggacacagagctcagtgcaggcactggcaacttctatttggtatgaagcactctattcagtcaccaccatataggtcacttctctcatactcggtcttgaggatattctggattaatcctttctatgcagacgtttctggtttacaaaaggacgcagccctggactacaagtctggaactgacaagttcttatgaccttgacaaatcaccttaacccatctgagccttaaattctcatttatttcctgcataaggagatttggctaaatgctttctgaggtcctttggagtcctgtggctccatggtaatgtgctcctttccttgaagattgggggttttgtaatgttgagatactttgcctctatgcttgtcagctcatgaccagtcctagaagaggagtcgagacataagccaccttcagaggttcaatggaaactttaaaaccataccaaactcttttttaaaattagaattaacaagaaaaaaaaaaagggtggggtttatgagccttagttcttggaggattataagagtacttccccagttttgaggctggacagttaatatactttatatcaattatacatttaat

SEQ ID NO: 32631 - DNA, 1031 bp, Homo sapiens
acgtttattctgtccatactgtctctcctagaattccagctgcagatgtgttaaacttctaatgtcctacatatctcagactttcaattttttcctctttgtttttcagtttggataattgtaattcagtttggacatactgacctgtctttaggttcactgattatttcttctactatatccaatcttctgttaaaactattaaatgaattctttatttatgaattgcatttttcctttttagcatttctgtaggttcttttttatattttcacttatcttctcaaattcctcctctattctcacataacatccaccttttcctttagactatttaacatatttatccgagttctatagcccctgtctgttcccaacaccttggtcatccctgtctgcttttattgaacgttttgaacgttacctcttattgatgggttacattttcttgttttttgacatgtctcctaagtttgcatgtcaggcattatgtatgaaaggataggctgaagaaagggcaggctctgccctccacaggtaaggtaagggagggctatccaggaccctggggttggctgcccattgaacagcttgaagcccagcgctcagggtgttagtgattctcacgacctaaagtagaggctgaagtattaataaataacatttaccctccagaaaaagagtgttcctccttttctgcccatgtgttagtgtgggtggctcagtcgttccaaatgtagccaagctgggctgggctttttttgcagttgtagtcagactcttctccacaaacctcacgtcttgaaagtgtgatcaggactgacccatcggtagggcttaggatctcagcactggaaagactccagccatcttcatgctttccagcctgcacccagcatctgaccacaggagacttttctctgccttactgagagccctcggccctggggactgcttaggcattcttgttgctctccagtgctgcctctggggtccccttgtgccctgcgccatgcctccagtctttactg

SEQ ID NO: 32632 - DNA, 1037 bp, Homo sapiens
ataaaataaacctcatatagattttaaaattcaacaaaaagggattagggcacagacttagcactgaacttacttcataattgcaaacaaggaaaccccaagcagagaagttcatggggtctagtggagtgccctctgagttggtgatcctgagctgtggctgtgacaggttcctgctaaacttcaattaaagcatccttgtcaaagcttgcaccaaagattactagggaaacctgttcatcaaacaaagctgtgtttattaagcttagcaaggaagagctcagccttgacagagtcgagtctcagtatcattgcaaatgggagttaggagagagtactttgtgagactagggttagtcatagggtagttataggagagagattagtaagtgtgtcttggcagcagtgggtcagagtttgaaaactatttgctggaatggtctgttagtggtcttatttttagaattgggggtatacgagaccatattgagtttctgttactgtagtcttttcttgaaacatggatctgaatgagctagtgtaaaagattttcaacttagataatttgttgtacaacatggcttagtatggttcatctatttttgagtaatagtacacttgttaagtagttggctttattttccaatggagaaccatccagtgcttctaagcagggaataacaatgagacctgttaggattttattgcaaaagattattaaatatttattgagacttatgtttcgagccatgctggaattacagtgactatactcacttttcctccataagcaaactggaggatatatgaaatgactacacccagacatggaacaacaaactgcaggacggtgatcccagacagaagggaaacaaatgaggtgatacttaacggttgcctcaactttctgcatggaagtaattttcagctccaaacaaagggagaactcagacagcctggtgaccttcctgagttatggtggacatcagagtttagggaggttcagacagctgacagttgtaggggagatgcaggtg

SEQ ID NO: 32633 - DNA, 1039 bp, Homo sapiens
aaatcagtaaagacttatttttgagtagcagaattaacaagctcaactcaaagattgtacccaatatgaaagcacactcatttcaagcatgcatggaatatttatggagtttgccttgtgctaggccataaaggctaggcttaagaaatttcaaaaggctagtgtcgtataggcattggcaagaggatttcagcggtgggactaactagaaacccaaagaccttaaactccatatagcatgatggaaagtagagggaggagttggtgtgagggaagtgaggggttagtgggagaacaagctggagagttggtagaaccaggagctgcttcacaggaagcagagagcaatagaaagttcctaggctttgaagaatgataaacttgggaatgcctggtctcatgacttactagatgtgtgataggataaattgcttaaattttcttattcatttattaagtatggacagtattacctgtctcacagacttaaagaattgaacaacatttattaagttgttaatatagcactttggatggaaaatcttggcttctgtgatgataagtagggtcccattaaggaaagctcttgtggacactcaacagtacaaccagtaggcaggcagacaggaagaagggggacaaattgctgctcttgcagactttcactgtggaagggagcctccaggttggccgccaaattggatctccaccaatgggaaatcacacctttgtataatccccgcctgttagaccagggctggtctgtgtggccagtagcatatggcaggagtgatggtatgtccctgccacgattaggtcatgaagagattgcagcttaagttttggtcaccctcatgcactctctcaggtcacttgttttgcgagaaggcagctatcatgttttgatgacgctcaggaatcctatggagaggcccatatggtgaagaactgaagtctccaaccaacagtcagcaagaaactgaggtctgccaatgtctgtgtgaacgagcttggaaatgaatgctactccagtcaagcc

SEQ ID NO: 32634 - DNA, 1030 bp, Homo sapiens
ctcttcatctattgtatgcttttactgttgaagatcacagtgaaggataatctgatgaaggaacattgacaaatggacagcctagaatgcaccgttaccgtggaaaacgactgcacatcttgcttcccatcttggtgggtcagctcattgcctgcaccccatacctctcagcacacagccctgggtgacagccctgcaccagcctctcctttgtctccacttgatgttgggagcagggcatcttgcttcctgggccagcaacctcttatttccagtaaaacctgctgccctagagttattccaatgttggactttaattcagatttgttatgttgttgttgagcattgtctcagcataatttggaaatttacatcatactaatgaactccttcatgcagtgggtaaattgcttgttctagtaaatttgagtgcaaattaactctggatgtgcatttactggctcatttaacagattcttacagtggcttagtttcatggtaatgttctctgctcactttgacattgaagttctttttctgtagtagatactgtatattttaactgtgaatttgcagtgaatggatccatattcagaccattaacctactgggattctctttgttttgtttctgtattaaaggatcgggtgataggatttcatattcttggaccaaacgccggtgaggttacccaaggatttgcagctgcaatgaaatgtgggctcacaaaacagctacttgatgacaccattggaattcaccccacatgtggggaggtaggaaacaggaggttttaaaaattggcttcagttgatgtagtttgaaaaactattataaagcacttgtcagaaagatgtcatattagtaactgatttgtatatttttaaatttattttatttcattttatttttttcagacagggtctcactctgtcatcgaggctagagtgcagtagcatgatcttgactcactgcaacctccacctcccaggtgcaagtgattctcccgcctcagcctcctgagtagctg

SEQ ID NO: 32635 - DNA, 1079 bp, Homo sapiens
gagcaattctattatttcaagacagaaagatatttcttggatggcagattctgaggaggtggatttccctaagggcacctaaaagtaaggaggccatagggaccctttttagaatgtccctaaaaccttcttgggcacccattcttcatggggacacatggcatttggtgagtccacgtagttatgaagcatctgttgtgtgttacaggaagggctagtttgatcatggtatttgtctaaagccaaggtaatgggagtgagcaactgacttggcataaagaaaactgttactaaatcacacatcgaacctctaacatcatctaagctacttctgatcacaaggagggccaaatgagcaagaggatatggcccagggccagcatcatgactgttgctgaaagaaaatgggagatgttggtgttgtaaaggaagctcacctgtgtaactacaaaagttagatcgatttatgagaagccatgacaaaatttgctgataatgcataagaattgttttcaaaatgaagactagcacaagtgagctaatgaaaaatgatacttggctattccactgcacttgactataatattttgataattagaccaaggaaaatgacctcatcttacataggtacagagccacaaccttctaggttatttgacacattcctagctgtcaggtgtaagaagggacaaaaacatatgtactttggtataagttctaactagttggaccctgtttttaaatagcatccagataaatttacaactccaacttagatgaattatagatttttcctaagatttttataaaagaaatccataccagttgaacatagggtgtacataaatagctgtaaaactttaaattctgcagtgttctttctcctgtaattaaaccataggcatatcagagtggtttgttacagaagctccttcaggaagatttggcatatgattatgatctcatcatcatcggtggtggttctggaggcctttcatgtgcgaaggtatgaatatagaaatgaaactcgtagataattttcctgatgactgccatagctatttcttctgctacttaaa

SEQ ID NO: 32636 - DNA, 1079 bp, Homo sapiens
ttgatcttgggtgttataggttggttggctgacgatttctttcttacaccgcattcctcctccaccctccccaaagagttaatttttttgagttatatggtgcctagatattatggctatgtaaatattcatttcagacctaagtggtgcactatgattgtttccatttgtttaaaccccccccttttttttttttgagacaggctctcactctgtcacccaggctggattgcagtggtgcaatcacagctcactgcagccttgacttcccgggctcaagcgattctcccaccttagcctcccaagtggctggcactgtgggtgcgcaccaccatgcccagctaatttttttattttttgtagagacctggtttctgcacgttgcccaggctggtctcaaattcctgaactcaagtgatctgcccactttggctttccaaactgctgggattacaggtgtgagccaccgtgcccaaccctagatcatatatattttttttattatagtcataatttgcctcatgttttcactgcagaattctctctgtttacatacttaattcctttcccatgttctatcatttcttcaataacccatctagcatctaattgttttgtttttgcttttgtattgaactccttcgtggagttctttctctttctcccacccggagtgggtgctctctgccccacagtgagttggtcagcctgggacttcccaagactgtcctagtaggatccactgtttcctggtccatgtcttccttttccttggtttactaccttattctgcttgagcacatcctcaaggagcctcttaagaatgcatggatggtagatgtggcagttttgaaacatggctgcacatttattgcctcttctgtcattgagaggtgagtctatgtccttcctcttgagtctgaaacttgtgactgcttcaactaataaagtacagtggaagtactttaagagacttctgagggtgggtcatgcaaggccatgtgcttctgcctttcttgctggaacacttactcttggacctgtgtatctgccatattggagggccacagggacccagt

SEQ ID NO: 32637 - DNA, 1049 bp, Homo sapiens
tttgtttcttttctttttcttttttttttttttttgagatggagtcttggtcttgtcactcaggctggagtgcagtggcacaatcttggctcaccacaacctccacctcccaggttcaagggattctcctgccccagcctcccaagtagctgggactacaggcacgtgccatcatgcctggctaatttttgtatttttagtagagacagggtttcactatgttggccaggctggtcttgaactcctagcctcaggtgatcacccgcctcagcctcccaatcttttatttctttttatttatctttcttgcctaattgtccagctagcaccaccagtacaaacttcaacagacatggtgagagtaaacatccttgtttgttcttgttcttattgggaaagattttagtcttttgccattaagtatgattttagctgtaggcttttcatagatatcattttaaggttaaggaattccccttctagtcctaggtttttgagtatttatatcttgaagcgctgttgaattttgtcaacttgttttttctgactctattgagatgataatgtgttttttttttgctgaggatctttgcatctatattcattagcaatattggcctgtagtgactttttttctttggctatcagggtaacactgacctcataaagtcataaagtgttgagagtgttttctttctttctttttttttttttgagatggagtctcgctctggctctgtcgcccaggctggagtgcagtggcgccatctcggctcactgcaagctccgcctcccgggttcacgccattctcctgcctcagcctccccagtagctgggactacaggcgcccaccaccacacctggctaatttttttgtatttttagtagagacggggtttcaccgtgttagccaggatggtctcgatctcctgaccttgtgatccacccgcctcggcctcccaaagtgctgggattacaggtgtgagccacctcgcctggccaagagtgttttcttaacttttttttttttttatgaaaagtttttgaa

SEQ ID NO: 32638 - DNA, 1032 bp, Homo sapiens
tgcaccaaaacatcaagacttaagaaacagtatggactctgctcagtgtaaccctgtggcagatagtgttccaacaaaaaaaaaaaccaactttatggagacataattcatataaaatacagtttttttttgtgatttctagtgtattcacagagttgtgcaaccatcaccacggtcaattttagaacattttcatcaccccaaaaagaaactatacccatcaatagtcatcgtccccttctgcacccttacccccatccactggcaaccattaatcaattttgtctctatagatttgctttttctggaaattttgtataaatagcaccatataatctggtcttttgtgactggcttctttcacttagcatgatgctgtagcatgcgtagtacttatttctttttccagctgaatagtattctattatatggaatatttaatagtgtatcttatttaaccattcattagttgatggacattgggttgttgggttattatgaataatggtgctctgaacatttgtgtacaactttttttttctttctttctttttctttttcttttttaaagtagagatggggtctcactttgttgaccaggctggtcttgaactcctgggctccaaggatcctcctgcctcagcctcccaaactgctaggattactgtgagctaccacacctggcctatgtacaacatttttaagtggacatggtttttatttctttcggttatgtacctaggagtggaattgctgggtccagtggtaactgtttaacctttcaaggaactgccagctgttttccaaagccagctgcatcatttgacattcctaccagcaatggacgaaggtcccaatttctccacattcttgccaacacttgtctgtctttttgattatagatattctagtgggtaatgaagtaatatctcattgtggttttgatttgcattgccttaacgactaaggatgttgagcgtcttttcatgtgcttattggccatttgtatattgtctttggagaaatgtttat

SEQ ID NO: 32639 - DNA, 1058 bp, Homo sapiens
gggtaagccccacaatgggggttctgtagtgctgtgagcactgcagtatagcaacagcccttccccctcaggcggtttctttcacttgcaattaggaatcgaatgcgtgattcaagtccatgtggcagcatcttgtagctactctgaatccccgtccgtgatgctctctagacaagaccactgtcataagtgcttcctaagtcttggagagaaagtgtgtgccagatccagcatggctacttgggcagcttctggagacagatgcatgtgggccttatggctggtatgcctggcatgcctgtggctgtctggacttgcttagccttggctaggccaggctgaagcctgacagtgcagttggtgaaagggctcagccttggacagatggtgccccctgctggggagctctgctaataggcttccctccctccacagtagggaacccagcccagcccatacctgcagagcctggcatctctcgtctcagaagtaaggtctctcagtcccatcccactcaggactaaggtgcacagaaaggtggccttgatctcagaacctgctcagtggagacaaagctctggtcagcctgagacccgggagatttggccccagccccatctgggctgatttgatcaagggctgctagaggttgtggagactccttgctagactgtagttactcaagtggaaggaagacactcagaacatggatttttaggcaggtcggctcaggtaacgcagattcggttgtttgctttggaagagaattttggcactatgttctagtaggaaatttgttgtagtggtgataataatgtcaacatggtaatgaaaaaagtaatagccaacaataatagccatctgatatgcttcccacagactccacccctagaggggaactacagggcttccttaccccccagaaccacatctgatctctagagctccgaaggaaagagagggggaagggaggtgactaactgagggcttcctgtgtgtcagaaactatacagagcactctacatgggccatctcatgtcctcccaggacaccctgac

SEQ ID NO: 32640 - DNA, 1056 bp, Homo sapiens
actcctccttcatggcctagtcacccccaaaaggccccacatcctgataccatcactatggaattaggacatcaacaggtacattttggggggataaatgcattcagaccatggcactggtttcagttgtcatgtaagtcaccactcatatatcaaggctaactcatgaccctagatctacatggggtctgccctctacctcacagcagagatggacacccacaccaccatcttccccgtgtctcaccacctgcaccccaattacggacacctatgcctctgtcttccctgcgtctctcagcactctacagcgagtgacacacacaccttcatctttcttccatgcttcatgttgcagtggagaggctggggattgggaggaggtgctgctggggtatggggagtgagatctgtgccgcagtggggtgggattcaggagaaaaccaggcagtgtcccaccagttcacttgcttgtaacacagaaacctcttcaatggaaatggaaccctgtctagaatgccagactctctgctgaccattctctctggtcagaactggatcactttatttgatgtaaattgtatttgatttatttttttcttttttaagagatgaagtctcactatgctgcccaggctggtctcaaactcctgggctcgagtggcccttccgcctcagcgtcccaaagtgctgggattacacgtgtgagccacagcactggccataaattgtatttgatttttacagctacctgtatttagccatgtgaaagtgattttccacttatgtcagagatacaaagtttcgtttagggataaattgtaaaaaagaatataggcctgggtggtggctcatgcttttaattcccatactcagcttgagtaccggaaccaagactagtcgaggcaacatagtgaacctcatttctttaaaaaaaaaaaaaagaaaaatggcttgagcagagtggagctggattagctggaagctccacctcgcagaggccgggagccggtggccagggttgggttgctggatttgacgccacctggctgtgtg

SEQ ID NO: 32641 - DNA, 1022 bp, Homo sapiens
cagggactagactgctgcagactcgtagaccttctgcaggcccgtttcactcaccattaggcagggcacaactgctccgagtttcagccactcctcacactggcctgctgtgctctctagggaatcccggttgtgtgttttggggttctgctgttctcaagcccatcagttgccctgtttcttctctctgcgttctccttcacagacactgataacgtgaaggtcttgtggctgtcggtgttttgacccccatccctgtctctgtgttgtggggttcagtagagatactttgttgcctggttttgttgtaaacatggtccgtgggtttttggttttgctgtctacttgctctgtctttatgtgagcccctgtacttctttctctcctgcccatttgatccgttttccacatcattgcttatgcttgcttgatccttcaggtgaccagtatgcactgaagatgaggtttgtggaccatgtgtttgatgaacaagtgatagattctctgactgtgaagatcatcctgcctgaaggagccaagtgagtgtgactgttcctctcctttgcacccgatttctctggttgtacccttgtggtaccctaaggagagcctatgttctaggggcacagtctttgtgtcacttttctctagatttactttatcagggaacatctacttggcctctcttgagtcacatgtccactctgactgccagaatgagagaccccttgattttcttcctgtggagaatgttccatagtggaagagtagttcctcatgcaaatccaggctgtgctgtttaccaggagaagggacagtgggcctgggcagacaaaagcaggacatgtcccctgccccgtaagaagctcttattcatgtgaagagaaagaacattcagaacagctcgtgaggcatctgttcaagcctcccagggattcactgggtaggatgtacaggagagctgtgtcaactttgtgactccaaggagtggggccagtactggtgagaacttgggagtggag

SEQ ID NO: 32642 - DNA, 1044 bp, Homo sapiens
ttaaaaacattctaataggtaatcccagctattcgggaggttgaggcaggagaatcgcttgaacccaagaggtggaggttgtggtgagccgagatcgcaccattgcactccagcctgagtgatagagtgagactccatctcaaaaaggaaaaggtgatctcttaaagataattgcttttgtctttggttcaaaattttgttgtgactttgaactgctactactgttttcagtatcctcagtctctcttacttctcttgccttgttcttcctttagtgggagattcttcacagtcaagctcccagttgctcttgatcctggggccaagatttcagtcattgtggaaacagtctacacccatgtgcttcatccgtatccaacccagatcacccagtcagagaaacagtttgtggtgtttgaggggaaccattatttctactctccctatccaacgaagacacaaaccatgcgtgtgaagcttgcctctcgaaatgtggagagctacaccaagctggggaaccccacgcgctctgaggacctactggattatgggcctttcagagatgtgcctgcctatagtcaggtaagctcaggtggagtccagcccatccctgtctgcttcagagaatgtcttgcagagtgactactggttgataggcttgggtggtgtggggtggatgaaatctgcagtcatttctaaggtcatcccaaaagtgtttaacctgcagtgaaatgactccatgggggtcttgtttctccttgggggatcacaggtagaggctaggggtagcatttggagaggtggaatgggtgttggagatggaagcaaggcattccacgcagaggcagtaagagggacaaaggctttgagatggtgtggctgggcagatactggggtagcaaagctgttggagtggttgagggccttccttgaatgttgggccttggttggaacttgaagagagagggagcaattaaggcttacaaagattttgttactatggcaaatcgcaaacatgccaaagtacaaagactagtataaact

SEQ ID NO: 32643 - DNA, 1025 bp, Homo sapiens
aaacaaaacaaaaattaactgggcatggtgttgcaggcctgtaatcccagctaatttggaggctgaggcaggaaaattgcttgaacccgggaggtggaggttgcagtgagccgagatcctgccactgtactccaacgtgggtggcagagcgagactccgtctcaaaaaaaaaaaaaagaaacaaagcttttgtccccatctccaccagaagtgaagaaaagaatggcttccagcttgaggaatggggaatggggatgatggtactacactactactactactattaaatactactgctactgctacaacactacacattcatatctattcttagaaggtattaatcccagaaattcaggttgaggttgggaaaagtaggttccttatccttgggaatctgtttacttacctataaaaccagagtgtagtaaataggaatccctgtcctggctgcctagccaggttgttaggaggaaagagagatttggtgtcctatactagcattcagaatgacttgtgatgggacactgtttgcaaggctggggaaagcaggctgtgatacctacaagtgggagtgtacatttttacaactccatgaggaggcaagctggcatatctgttaatgtaacattaatcctttgtaccaatcctttgattaagcacttcagggccaaggaaactatcttacatatgtattcccccatgtgcacagacaaacgtagaaagaggtacagttgagggctgtttgaatggcaaaagcatggaagcaaactaattgttcataaataggggactggcttgatttttgaaaaatgacacatcaagcctgagcaacatggtgaaacgctgtctctacaaaaaatacaaaaatgagctgggcgtggtggcaggcacctgtagtcccagctactcaggaggctgaggcaggaggatcacttgagctgcagaggcagaggttgcagtgagtggagatcgcactactgcactccaacctgggtgacagagtgacaccacatctcaaaaaa

SEQ ID NO: 32644 - DNA, 1047 bp, Homo sapiens
cactccccacttcccgagctcctactcgccaaattatccttaaaaactccgatccctgttttgggggagacttgcttgttccccgactgtagcattgaccacagtgttgggaaatgcctccagcttccattgtgtcaactccttgagaagaaaaagaaatccctttcatctcagcaagctaagctcagcaccaaaaaagattacattgctaacacaacatcaagaaaaaagagctcaaaactctgcaaggcgtagagtctaaactgcaaaatatttgcaggcatcttttcagattattttaccttgtctaaggtctctcacctggtttcttcatcagtggttgatatttacttgcttagcattcagcttcacaagaaggtatttggaaacaactgcctttgtaaattatccccataggtaaaacaaagaaaaatatacatatgttgcaaaaactgtttcaattttgagctgctgtacttttttgccaaacaaatgtagtcaaatcagtcaagtactctgttaatgtgtcaaatgtttagtgtacacaggtctccctaaatcaaccaaatgagaaatccagtggcacagaattttacaaaacaaaaattagaaaaatgttaaggcatagtttctaattgctccaatagagtatagcagaagagttttgctgtttcactactatactagtttctaaattcagtttcctcatctgtaaatatgagtatgataccctttatctcacaggacttttaaaaggtttaagtaaatccacatgaaagcacttagcacagcaagtgataaaaatgacaatagttacactttgatccttccatcttatatttaagtattagcctctgagaaatatgatgttgttttaaacagtttcccctgttcagtgtactaaaagaaaaacttcagctgaattaaatttaaaggagcttaattggccgggtcgggtgcagtgcctcatacctgtaatcccagcactttgggaggatgaagtgggcagatcacttgaggtcaggagttcgagaccagcctggccaa

SEQ ID NO: 32645 - DNA, 1054 bp, Homo sapiens
attgcactccagcctgggcaacaagagcgaaactcagtctcaaaaaaaaaaaaaaaaaaaaagtaaatttaatcaaagttaaataaaactaagaattcagttcctcagttatgctagctacatcaagtgctcagtagctacctgtggctcacagctaccagtgcagccagaaagcgtttccatcatctcataaagtccagttggacagtgctgatctacaacttatattaaaagttaaatagtttacagtcatttttcccagaactgtagttctctcttgtttgtactacaattatatgaatctagaatgtgactgtttatataaacacaaaatatatacaagtgagggtcctgctgcggtctcacatcctcaaaggaattattggactgatgagcaaaccactaagacaaacactgatgagtggactgactgggcttctaaatcccatgtgagtgaaggtagccagccctcgctaaacctaaacctacccaggacaaacttaaagctgggtccctgtcttcatcacccaaaagggtagactccaggtggactgaacacctaaaagatacaattaaaacaaaagaatatccagcagaatacccttgtgacctaggaacggaggaccactcaagaattcaaaggcaaaaatcataaagccaaaagaatttggtgaacctgattacatcaaagaacacactggggccagctggcatcacttggtcaaatcatttatgtgtctccacaagacccagcaacccctctcctgggacagttctcacagcaggctgctgcacggtggtgtgggggaggacacgcacttggtgtcatctggagtggcaggcagttggaggcagcctagtgtccacccctgggagtggatggaggagtttgcagaggggaaaagcagccagaagatgcactcgcagaacaacatttggggtgggaactccagcgccgagtggggagtcagaggcacagtgagacatgtgccacaacgccgccaatggggtgcaaacagacccgaaagactcacttcgcaagaacacatcccaa

SEQ ID NO: 32646 - DNA, 1021 bp, Homo sapiens
ttggctgatgtctaggctgctgctcaggtattatcctgggatttatctctctttccatcatcctggcatctccctttgcctcccttttcagttgaactctctgttttctggatcccacattttcttattttttgttgatttctttaggtagaggaactttcagtcactccctgaggaagggtagcaggaaggtgaatttttcgaggactgtatgtctgggagtgcctttattaaaccctcacacttgactactggttggttgggtagagaattctaggttggaaataatttttctcctcattttaaggcattgttttgttggctgtctaatgccacatgggtcttttgtgttctttcttcttgcctgttgttctggaacttctgcccatggatgcagtgtggtctgctctgctccattgtgtgtgtgcctggtgggcccctcagtcaattctggatacttttcttgaaatacttgatttcctctccttgattgtattgttctctttttctgaaactctgattatcctgctctcctaggctgcttcttaattttcttttcttttcttttctttttttttgagacagtctcactcactctgtcgtccaggctggagtgcagtggcgtgatctcggctcactggaacctctgcctcccaggttcaagcgattctcctgcctcagccttcccagtagctgggattacaggcgtgcaccaccacacctggttaatttttgtatttttagtagagatggggtttcaccatgttggccagcctggtctcgaactcttgatctcaggtgatccttctgccttggcctcccaaagtactggaattacaggcttgagccaccgcacctggctttcaattttattttctctcttttccatttctttgtattttttctctactttggagggatttcttcaactttatcttccaaccctgatgttgcatttttcatgtatgttaatcatatttttaattgagctcttttttctttctgaatgcgcctcaccaaa

SEQ ID NO: 32647 - DNA, 1021 bp, Homo sapiens; identical to SEQ ID NO: 32646

SEQ ID NO: 32648 - DNA, 1021 bp, Homo sapiens; identical to SEQ ID NO: 32646

SEQ ID NO: 32649 - DNA, 1021 bp, Homo sapiens; identical to SEQ ID NO: 32646

SEQ ID NO: 32650 - DNA, 1021 bp, Homo sapiens; identical to SEQ ID NO: 32646

SEQ ID NO: 32651 - DNA, 1050 bp, Homo sapiens
atagtttcctcaagaaaatggaagaagagggaacactttgtaactcattttgtgaattttagtatcagcattaccctgatgctaaaatcagaaaaagatattatgagaaataactactgacaatatttcctatgaatatagacaaaaatctttaatgaaacattagcatatcaaacctagcaatgtatggccgggcgcggtggctcacgcctgtaattccagcactttgggaggccaaggtgggtggatcgtgagatcaggagatcgaaaccatcctggctaacacacggtgaaaccccgtctctactaaaaatacaaaaaaattagccgggcgtggtggcaggtgcctgtagtcccagcttcctgggaggctgaggcaggcgaatcgctggaacccgggaggcggagcttgcagtgagccgagattgcaccactgcactccagcctgggcgacagagcgagactccgtctcaaaaaaaaaaacaaaacctagcaatgtataaaaaggataatacatcacaactaaggaggatttattctggaaaaacatagtagattcagcattcaaaaataagttaattcactgtgtcattccaaagaagaaaaactgtatgatctaagtagatgcagaaaaagtatttgacaaaattagacgtttattcatgataagaactcagcaaactgggaataaaagggaactttttaccctgataaagcacttcttttttttttctgagacggagttttgctcttgtcacccatgctggagtgcagtggtgcaatttcagctcaatgcaacctccgcctctcaggttcaagtgattctcctgcctcagcctcccgagtagctgggattacaggtgccagccaccacgcctagctaatttttgtattttcagtagagacagggttttaccatgttggcaaggctggtctcgaattcccaacctcaggtgatccacccaccttggcctccctaagagctgggattacaggcatgagccaccacacccggccctgataaagtacttataagaaacccatagccaa

SEQ ID NO: 32652 - DNA, 1050 bp, Homo sapiens; identical to SEQ ID NO: 32651

SEQ ID NO: 32653 - DNA, 1050 bp, Homo sapiens; identical to SEQ ID NO: 32651

SEQ ID NO: 32654 - DNA, 1050 bp, Homo sapiens; identical to SEQ ID NO: 32651

SEQ ID NO: 32655 - DNA, 1034 bp, Homo sapiens
aatagggactggagtatgatgtggagaacagctgtaagctgaaaccggtaaattatttcatttcttagagactcacccaaattagagataatatataccattctttggattttttttttaattttatatacgcacatgtatatgaatacacccatatttatgtatgtttgttttaaacactgatagacattgtttcttaaggtactataaatatgccatgaaatagctataacctagtttggctgtctctctattgcaggacagttaagttctttccaatattaaatacaatgcaatcaatgtttttcctaaggagagattgtagaatgaggtttaaggcttgatgaggatcatctggaatgaaaacttcaaatgtttttaggccattagatgatttaggcttaaggcctgaatcagttctgaatgttgtttgaaacttgtaaatagtataatggaaatgtgttatttttttctccttaggaacgaagaccctttctggcctcagaatgtactgaactgcctaaagctgagaagtggagacgacaggtatgttctgggtaaatctgatttcagtagaagtaacaagtctctcatttcttcttattatctaaatgactgttagaccaaaagtctaagtatttttaaatactaattttgaattatagtttttctgtgctttctaacatattcaaaaattattaaaatgtattacttttttttaatagatcattggagagatctctaaaaaagtggctcagattcagaatggtaagcaaacttgttcctttaaagtgcttgattctcaaatccacaattagacttgaggacttcaatactcctttcaaaataatcaatagagcaagtagatagtaaatcagtaaggacatagaagagccaatcaatacgatcagtcagtttgatgtagttgaaagttgtagaatactctgtctcacaacactgtacctaacaataaagaatacgtcattttttttttttttttttgagacagagtctcactctgtcacccaggctgg

SEQ ID NO: 32656 - DNA, 2656 bp, Homo sapiens
atctgactgcagccatgagcagcaatgagtgcttcaagtgtggacgatctggccactgggcccgggaatgtcctactggtggaggccgtggtcgtggaatgagaagccgtggcagaggtggttttacctcggatagaggtattttgtcgaatagaaaaatttgaagtacttcagtatttgttagtatcaagactggtctgactagccgaattctttgtttttgctcaaaacaggtttccagtttgtttcctcgtctcttccagacatttgttatcgctgtggtgagtctggtcatcttgccaaggattgtgatcttcaggaggatggtaagtatttaacacttccttttcatacccctctagagcttggagaggtgagcacatgcaactgtgtatagcatttccacctttgaggttttgtattgtataatttaaaacgtaacactttgtaaaggttttatagtcttggcctgtttcttttccttattgttgaagcctgctataactgcggtagaggtggccacattgccaaggactgcaaggagcccaagagagagcgagagcaatgctgctacaactgtggcaaaccaggccatctggctcgtgactgcgaccatgcagatgagcagaaatgctattcttgtggagaattcggacacattcaaaaagactgcaccaaagtgaagtgctataggtaaggtgtcagaatgttgttagaagaaaactcattgcagagattcttccagagatgaattagctataaatggaagggccttagtaaattcagtgaaacttagctgtgaccagataagaccaattttcagcatatgtaactggcagtctatctgtatataattctgtattctgccctgatatcctgtggcttatggtacctgggcagttttcacaactggacttttttaatatataaaagtaagagtgttataatttgaaacttccagagacttcatagaaagctctgtaatatacataaatcttttatcatgtaaccagaaatctttgcctgtttgtgacatgtaagtgtataatttgataaatgttgttgtgtacatatctgtgaaaccttaggggttaattgcatgaaaacaaagatcaggcgttttgttctgcatggtgactgttgctttggtagacagtttttttctgaggcccattgtgaaaacttttaatttcttttttaggtgtggtgaaactggtcatgtagccatcaactgcagcaagacaagtgaagtcaactgttaccgctgtggcgagtcagggcaccttgcacgggaatgcacaattgaggctacagcctaattattttcctttgtcgcccctcctttttctgattgatggttgtattattttctctgaatcctcttcactggccaaaggttggcagatagaggcaactcccaggccagtgagctttacttgccgtgtaaaaggaggaaaggggtggaaaaaaaccgactttctgcatttaactacaaaaaaagtttatgtttagtttggtagaggtgttatgtataatgctttgttaaagaaccccctttccgtgccactggtgaatagggattgatgaatgggaagagttgagtcagaccagtaagcccgtcctgggttccttgaacatgttcccatgtaggaggtaaaaccaattctggaagtgtctatgaacttccataaataactttaattttagtataatgatggtcttggattgtctgacctcagtagctattaaataacatcaagtaacatctgtatcaggccctacatagaacatacagttgagtgggagtaaacaaaaagataaacatgcgtgttaatggctgttcgagagaaatcggaataaaagcctaaacaggaacaacttcatcacagtgttgatgttggacacatagatggtgatggcaaaggtttagaacacattattttcaaagactaaatctaaaacccagagtaaacatcaatgctcagagttagcataatttggagctattcaggaattgcagagaaatgcattttcacagaaatcaagatgttatttttgtatactatatcacttagacaactgtgtttcatttgctgtaatcagtttttaaaagtcagatggaaagagcaactgaagtcctagaaaatagaaatgtaattttaaactattccaataaagctggaggaggaaggggagtttgactaaagttctttttgtttgtttcaaattttcattaatgtatatagtgcaaaataccatattaaagaggggaatgtggaggactgaaagctgacagtttggacttttctttttgtacttaagtcatgtcttcaataatgaaaattgctgttaaaaggatgtatgggatttagatacttttgcaaagctatagaaaattcactttgtaatctgttataataatgcccttgagttctgtgttcagtctgaacaggttttttggtggtggtggttttgttttgttttggagacggagtctcactcttgtcgcccaggctggagtgcaggcttggctcactgcaacctccacctcccgggttcaagcaattctcctgcctcagcctcctgagtagctgggattacaggcacccgccaccaccccccgctaattttttgtatttttatttttattttattt

SEQ ID NO: 32657 - DNA, 1051 bp, Homo sapiens
ttttttgagacagagtcttgctctgttgcccaggctggagtgcagtggtgcgatcttggctcactgcaacctctgcctcctgggttcaagcaattcttgtgcgtcagcctcctgagtagctgggattacaggcatgcaccaccatgtccagctaatttttgtatttttagtagagacagggtttcaccatgttggctagctggtctcgaactcctgacctcaggtgatgcatctgcctcggcctcccaaaatgctgggattagaggtgtgggccaccccgcccggcccagaccttatcttgactatcttagtcatttcttctcttgcctgacatgccctgtgctcctaccaccctttaaagtggtttgtgtcataaacatttgatacacaaaaatggaaacttaggacaaatatcttgatgtctggtggttgaaaatgtgaactgatttggaaatcaccggtgtttctcctcttaatctcttctccattccattcaggaaatagactgtaaggtgggaaacaagtataagcagttagcctcactctaaacctgctatgtaatagacattggactgagttctgtctactctctgtaagcaatccaaggtaattggcgaaagtggaaggaatatgtactcagaagaccaaaactttggtttttaaattgaatatctattaagcacaaggtaacaattcttaccacacacatcagttttattatttcccttttacaaataagacacagatgggtagtcagatgtctttgaggtaacacagcaagtagttaaactgggttaagtgattaacccaggttgagtatggttccaaaatctcttacagtgtcaggcaggctacatcagtgcagtatacgtacatcaggtttcacgaaaaattttttccagagaaaacacaaacccaaggaaccttcagtaagtggtgccttatattagtggtttttagcaaaaggaagaaacttaagtgttttcctgctgcctgacaaaagtgaaaaacagtattttggtttttattgaagttagcatgtatgtttgta

SEQ ID NO: 32658 - DNA, 1133 bp, Homo sapiens
taaactgccaggatcctaggtacatgctgtttttagtttgttgagcctgattcttgtctacaagagttctttgtgtattggaatataaaaggaataatttattacattcccaagggcagaattaaagacttaagtttttccgatttcatctcttgataagtttttctttaaaaaaataacagtttgtgtttttctgaggaaccaaaggtcctcttttttttcatattggtaacaggagaggtaatgtatttcagatggtgcagtctgtaaaatattttgaaccaaatcagtggaagaccaggggtttttctttttttttttctgagacggagtctcactctgtcgcccaagctggagtgcagtggcgcgatctcggctcactgcgacctccgcctcccggattaagcgattctcctgcctcagcctccgaagtagctgggattacaggcgcccgccgccacacccagctagtttttgtattttagtacagacggggtttcaccatgttggccaggctggtctcgaactcctgaccttgtgatccgactccctcggcctctcaaagtgctaggattacaggcaggagccaccgcgcctggccaggtttttcttaaactggcatttgaacatctggaacaggcagggagatgtcttttttaaagtataaatgtgttttgttacatgatttatgacaattctacttgtctttttttttttttttttttttttttttgagacagagtctttctctgtcggccaggctggaatgcagtggcacagtctcggctcacagcagcctccatctcccgggctcaagcaattctcctgcctcagcctcccaagtagctgggattacaggcgtgtgccaccacgcccggctaatttttgtattttttgtagagacggggtttcaccatgttggccaggctggtcttgatctcctgacctcaggtaattcacccgcctcggcctcccaaagtgctgggattacaggcctgagccaccgtgccttgccaacaattctacttgtcttttaaagttcaataaaaatatgtggcacgtatatgggatagtaccaaactggtgcctaaaagcagtgaaaccaccattggactaattggaatgatttgtct

SEQ ID NO: 32659 - DNA, 1031 bp, Homo sapiens
ggacaaaggcggcaaggccaagaagacggcggccgccgggggcaagaaggtgaagaaggcggccaagcccagcgtccccaaagtgcccaagggccgcaagtgagcgtgtcggccggtcagagcggccggcgtgggcttttcggtgtttttgtttttctaccccaagtgacgtagattttgtacggctcacgccggccggggccgcgaggcctggtctgagcctcagggaggggccccgggtcctctcagtctttcccctcccccaacgatgtagcgtttttcgttgtttgctttaggtttttgaaacagccccggcgacgcctctattggctctcggccttggcaacggccgtcgtcatggttactggcccctaggcgccgatggccgaggccgcgcctgcccaccgggcggggtcgctggttggccgggcccaggcgcgcggggacgcggaggccgcgcatcctttcccagctccccaccctccttgcctttgggtgcgcgacaaacaatcgctccgggctcagggctgcgcggctcttcccttcattccatgggcctttttttgggcacaataaagcgtttaaacctttcagcctctctcgtttaatctgagtggaatagggatgggcgccttcggcacgcggggttggatggcgggcccctcgggtccttataccccagatctgttggccagggtaggcctggagccaggggccttcagcaaggggtgggaattgctggcttgggacgaacttaaagtacctgggacagggagatagacaggatcggtcccttaggagggatggatctatctgcccccacagggggtccatcggccattgcggggagcgggatgggggaggggagaggaggggggattaatgggttttcagagttaatggtcagggacctaaacttggcctccagagaggtagttcttacaaagtcacaccagactggcctgtaaacttagtcattctgactccagcgagggttagagtgagatgtgaccaggacgaagtgtggtggc

SEQ ID NO: 32660 - DNA, 1054 bp, Homo sapiens
cacaggaccaggcttcctgtcagagactgaggacccaggaagaaacatgtctcggcccctgtccccctccacaattcagaggccacattctaacaggggaggctgaccaattaaacagataatgacacctcctagagctaagagctctccgactatgaaccagatgcctggagaacacggatgaatggtctgagcatgagcaggggtgggaggcagcgttaagggaggcatcagagtcagaacctagcaaacaagtgtttgtgaagaagaattcatagaaaagggcaatgcgggcatcacatgggctaaggaacagaggggtagcagtagctgttgtgccaagctgcaggtgttatacactaccctctagatctgggtttccttaaaacaccttgagaggacaaccctgcaaagcacggcacagtggccgagagggaaaggagcattcgaggtctcagtcctcgctctgagcctacttctctgcttctgggctccagccatctttgtggaaagggggctgctagtgacaccctctcaagggtctttccagctctaggtcggctgtgctggagtctaggatttgcccactgagaaatctgtttccaagttccttcaacctgatgcatcctgcagcatcacggcagctgttcagagtggtcagaaggcccctgaatgagctcagtagagggaagcctgggaacagggaggcacctgcagctctactcatggcctggccagagctcagcagctcttctctgccatctagtggggatggcataccatcactggggaccaccctgtgcaaactggtgagcctgagtgcctgtcacagagggaaagaaaggggggggatacaggatttagatgaaatagcaactcctaccctattgtcaaaatcatccagctttttcaaaacatcatattgtactgatttttttgtgtttttgacagagtcttgctgtgtcaccaaggctggaatgcagtggcatgatctcggctcactgtagcctctgtctccctggttcaagcaattctgccccagcctcccaagtag

SEQ ID NO: 32661 - DNA, 1043 bp, Homo sapiens
aagctggtgaaagttttaacgactgctggaggcaacatgcttccacactgacagaaatcatctttcaaaaatcctgcacatatctcaggcttatgaaacaaactaattcctaatagttggaaatgaattaaaagcttgcggtgagataaaagatagattttggctggatgtgatgactcatgcctgtgatccctacactttaggagggcacagcaggaggatcgcctgagcccaggaattcaagaccagcctggtcaacatagcaagactctctctctgcaaaaaaaaagaaaaaaaaaaaaacctcccaaaaaaaaggttttactaggcatgaaaatgagtccatttccattctaggccccaggatatcaccatgaccaataaaaacaatctgtggcactcagcaggtgcatgtcaacatgggcaggttctttctccccgtcagcaggacaagaacatctcccctatccaaaaggcacccactgaggatccgcagttctctggaattatgctgagcacccagatgtgtgcaactaagccctgagcagtcgatgtggagcgcacttgaaggcacttcatttttttttaagatacactcttaggagtttactttaacccacttcccagctcatagcacacgaggagaggcagacattttaaccttggtaagacctgacaaatgacaatagttggaccccacagcaatcattacttttgtagacagcaaagttatgctccttggcttcaggtgaagacccccagatccaggccagtggatttacaagtgagagtcagcagcactgggcatttcaggcaatagctctgaacaagccctttaccatgcgggtaggtaaaccccagaatatacagatgccccttacgatacatgggtggggagggtatgtggccgagagagcataagcttaggagacagagtggatttgaattccactgagcttttggctgtggacccatggggacgtggcatatgtctcgctgagccttagtttcctcctgcatggaatagggagagcaatagtacc

SEQ ID NO: 32662 - DNA, 1025 bp, Homo sapiens
ctgagttaaaattttgttatccccggaagcagagatgcactgactctggtgatctcagtatgaatgtggtatgaaatcttctaggtgtctgtggtggggcctgagggagggtaggaaaggtgacgaggaaaaagtagagggagcctgaacaccctgggtctcaggtacggagtgaagaaatcactaaggtgaaaagacaggctggggcccaggagctcgtccaagtcctgatgaacaacaagtcctgggcaacatcacaggccaccaaacacaccttcagctccagggtcgaatagatggtggaagagcacagccatctggaaaatcagaaaaaagtggggaagattttctatcttgaacttgtgagctggagaattaccattagtagcccactaataggttatggccgatgagtcccttcataacacactgagagccacttttgacactcccagaaaaggcaggttaacaaaaccccttgatggaaggaagaccctcattgcccaatgtacccaagcctctttgaaccttgcttagactgaactgcaaatgtcttgactgctctgggctccttagtgcaactccttcccacagaagccatcaggagcctggtccaggaagctcctctcctacacctgccttaaaaggcccagctctgctggggagtaaggttcatgggggccgtcccaatgcaaaagggaatctctgccatcacccactgcaaccacatggtagccactctgcagccggcaggcgtgaggcatgctgcgctaacatgggagggcggaggctctgcctgacttcccagaagcccagtgagaagtccaggacaatcagcaggtgctatgggaaccttggctggcaggcaccatgtcgtcctgtatgatcggcaggaccggctccttcctgaagacaccgattcttggcggctcctgacaaggattgagaggatttgtgggggacagccctgaagccctgagccctcaactcaatgaagggattgtgctggtgtagacccacagcca

SEQ ID NO: 32663 - DNA, 1026 bp, Homo sapiens
gaaaactaaaaaaggatgtaggaagagctgttcaggttttgttcaaagtgatagcaaaagagaatctgtgtgtaataaagcagatgctgaaagtgaacctgttgcacaaaaaagtcagcttgatagaactgtctgcatttctgatgctggagcatgtggtgagaccctcagtgtgaccagtgaagaaaacagccttgtaaaaaaaaaagaaagatcattgagttcaggatcaaatttttgttctgaacaaaaaacttctggcatcataaacaaattttgttcagccaaagactcagaacacaacgagaagtatgaggatacctttttagaatctgaagaaatcggaacaaaagtagaagttgtggaaaggaaagaacatttgcatactgacattttaaaacgtggctctgaaatggacaacaactgctcaccaaccaggaaagacttcactggtgagaaaatatttcaaggtatccagtgctttcaagcactattaaacattatgtgatgagaaatttataatgctgcatcttgtattcgtgcccatacatggttaagatgtgaaaatagagccaagaaatagggccaaatatgagataccagttgatcctaatactttatcttaaactgatattcaagcagtttcctatggcagagagaaaatcggctgactgctgtcgtgatgccatggcaaaggagagtattactattaacagctgccatcgtctctccctggtgcagcagctgggactctcctcctcagcagtgctttcccttcttcccatcctctttccagccagtaatcttaaaacttgaaggaaaattaaaagccttcacttgtgaaaaatttagggaaggcttcttatatacataaatgagtggagaatagttggtgtcttcacacccctcctgatacttactactaagtgtgacttccaatttaattttgtatatatcatagtcatttttatcttctattttaatgtaatgcttctctaaaatgctttagagctctaaataattcaa

SEQ ID NO: 32664 - DNA, 1067 bp, Homo sapiens
actgagaggatccaatgaggccccctcagcaagaagctcttactctgtaggagacaagtcctgcagtgtgagtgaactacggacaacagcaaaaagccttcaggaaaggcttcctaattcctaaaggagggatgctggagtagggttggtttgtttgtttgtttttgagacgggatctcattctgtcacccaggctggagtgcagtggcgcaatctcagctcactgcagcctcgacctcctgggctcaagtgatcccctcatttcagcctcctgagtagctgggactacaggagtgcaccaccacatccagctaattttactttttgtaaagatagtgtcatgctgtgctgcccaggctggtcttgaactcctgggctcaagcgatcctcctgcctcatcctcccaaagtgctgggattacaggtgtgagccaccgcgcggggcctggagtgggttttataggagtcttggttaggccaagggtttcatcagcaattgtaacatgaacagccttgcagacaaggccatttccagagctcctcctctgtgccctccaccctggcaccttctctttgtaccctcacactctcccccagctctttcctgccctccccattttacagatgggaaaatggaggctcagagagaggtatggcttgcctcagtttacatggagagagcgagaggcctctccctatgtggctgggccggtacctacccctcaggcccagctccctgcccggaccctgatggcctgtcccttgtcccccagagtggttcgcctccagcacacagagctacatccttcgggacctggacgacacctcagtggtggaagacggccgcaagaagcttaacacgctggcccattacaaggtgcagccctgccccccgcccccatttccccaccctcatgcccccaccccaacctccggcctctgacctcggcctctcccctcccatcagatccctgaaggtgcctccctggccatgagtctcatagacaagaaggacaacacactgggccgaggtagtgcgggtgcacgtgggaagggagcccaggctgc

SEQ ID NO: 32665 - DNA, 1069 bp, Homo sapiens
attcacatcaatggtaatatattgaattcaataatgaactaaatgtgttttatggctcagagatcagcatagctcctgctcagatggcaaactgaggtaatacatcccagatgaaaaaaagaagatgttatccctaggttaattattggcgtttcataaatatttcaaacttggtgcattattgtcatgaaaatatgaggaagaaggtgatcttgtatatagttctttctagcaaattgttacctggtacagattaagatgggaaccaagaaaaggattgtaatttggcacttatactggggatttttattaccctaagaaggttattttattactcattactcattactctgttactgcttaacagagagcaggtttgtttttttatttttagagacagggtctcgctctgtcactcagactggagtgcagtggtgcagtcatagctcactgcagcctggaactactgggctcaagtgatcctcccacctcagcttccctactagctggaactatgggtgtgtgccaccataactgtgtaatttaaaaaaaaaatgtgtagagagggggtctcactatgttgcccagggtggtcttaaactcttggcctcaagtgatccttctcctttgacctcccaaagcactgggaatatagacgtgagccactgtgcctggccaagaacagtttctagagccttcttctttgggacctattcaaattcaccaccacaagccacacccagggatgacctactgaaggatttttttgtcctgaatttgggaaacttgacctccccaaatttagctaactatgttgaagagtgaacatttatgcttttaaatctgagtatcttgtctttttcttcaactcctttgaatggttctcacccacatgaaaggattaagtatacgtgctttggagtcccttgcctaacaaaaaccttttactggataaaggtcacaaaatatgggctccgaaagacctgatccttgtccctgacttgttaacttagctcttactgttcctgtccctgagttttcaagttttcttgctcaaggttatcacctt

SEQ ID NO: 32666 - DNA, 1029 bp, Homo sapiens
ggctgttgaaaaagggaaccacttttcagttggtgccttcaaaactcatagctaagtgctaagtattaatgcctagagcatggaattcccctttaaggactttgttcctaactcagagtatatcacgactgttttcctcccctgtcctgtgattctgtagtccaatgtaactttctctttctttcctcctttactctccctctgcaccccactcttcttcttcctctcctctggttttttcctctctccttccctttctttcactccatcattctcctctcttcccctccccttatttcccattttctccctcctttaaaaaaattgtttctgctagaattgggaggagttccagtagtccagtgattcatggtttcaggtgttaaactaccttactgctgaagctatgggttagtttttttagaggctgaagacgttgggttctatcagctatactcttgcaggcatgttgatgattctgagtaggagccaggacacactatggctccaaacagcccaagtaggacggaagtcagattaaagacagcctagtttatttcttcagttactacataaggaaataaaatcacatctaaaatgtgatcacttgtaaatatggggatacattctgaggaatgcatttagggagttttgtcaaagtgcaaacatcgctgagtgtgcttacacaaacctagatggtataacgcctgggctatgtggtatagcctattgtttctaggctacaaacctgtacagcaggttactgtactgaatactgtaggcagtgtaccacagtagtgtttgcatatctaaacatagctaaacagaaaaggtacagtaaaaatctggtattatagtcttatggaaccactgttgtatatgcagtccatcattgaccgaaatgtcattatgcagcatatgactgtatgttgaaagtttagtgtagagattttttttttttttcattttagagatataatcaaatacaatcatggctcactgcaacctctgcttcccaggttcaagcta

SEQ ID NO: 32667 - DNA, 1027 bp, Homo sapiens
gttgtgatttttttcttattttttgacttttctatatcagctgtatggaattgcttcttagcaataactaaaacattttgcaaaatcatgtttgatggaaaaggatgaccaagggaaccagaaggagaaacataacttgtggtcattcagttgtgaccttcagagataatccaagttttctcatgtgtctctcaacagacagaagccagaaatttccagagcaaagaatgcagactaacaaacctcttttcttttctttgaatagtcataattatgcttttttttccctgctttttctatagtctgaagcgggagaaggaaaaataaagccttcctcctgttatagagttgttgccactggaacagtaataggctgagaacataagtatggaggtggaggaaggcaggataaggagtctgctattttcatagctgtgcgttggtgggtatttgtcttgggttcattgtcattgctgtttgatatcaagtggttgtgaatgctgtatctctttgcctctactatgactgaatctcttttatgttctcttttgtatattttctttgccagactcaattctattgatatgaagcctttttctgttactgtttatacatattagccgttattagagaaaaaatagttgtagagagtagccctccaatatttatggacctcaaaaaagataaggatgttgtttttctctttaaaatgtatgttttacttttagcagattttggagtcttgcttctggattctttaataagtgttttattacaaattagagaaatgagttgcattagatttgcaaaatcctaccagaatcaccttgctttaagttggatcttatttcttatgttttttttctaaacattaaagtttacttttcctcatcctaacttaggcaggtgttactggaaggtatattcctatctcggagagccaagtttcctagctgcttagagtggccacagaagagatccattgacacctgactttttgctgactcattggttatgtaagccttgt

SEQ ID NO: 32668 - DNA, 1034 bp, Homo sapiens
agtggatacttgcaatacttcactcactgctagcaactggaggtggctgtgaaaattgtacagtagcacagtatatactacagttaattttatgcagtttatgcagttacgatttaatactgcatctttgtttacatttctcttgactgcaaatggcaccatgtaagtgtttgtataaattttgatagaattaacttcagatttgtacatactttatggtgttaaatgataaaataaacttagtgtctgcatatgttttatgcattcattcacgaatcttaattttttggtattcctaggttatgcaatttgccattttttcccaaattgtttcaaatctccaaaatattttccaatatattggaaaaaatatgcatataagtggatccatgtagttcagacctttgttgttcaagggtcaactatgtatttcatagtatcacaggaattcattgaagaattttaagcagaggactgatgtgatttgacttaggtttttaaaggatcattctggttgtagtattaagaacagatatgtgggcaagatagaccagttgggaaatcattttagtaactcagacaatatatgatcatggttcagactaaagtacaagtgaagattataagatgtagttggattttagatgtattttgaaggcgatgctaacagaattttctggcaggttggatgtaaggtatgaaagaaatcagtaactatgaggattttaacctaaacagctggaagaatagatttgtcattaactgagatgtaaatgctgctggagggcaggttttgtgggaaagtgctggagttcagtttcaggtgtccatcagccatctaagtgggaatgttgaataggtaagtgacatttttgagtctagagactcttagagtcataggatactaaggagaaagttctaggcagaaaatgtaattagggagaagaagaaaaggaagaagattgacctatgagagaagaggaaaatctagagaggatggtgtactggaaaaccaagtatggaaattcttcata

SEQ ID NO: 32669 - DNA, 1050 bp, Homo sapiens
gtcacagaggtggtttggggttcttcagctaggtcgtagtgcccaggaacagatcagatcagaatcagtatgttgtttatgatacagatcaaattaactaatgattcttccagttttcttcttcctgattatttcctccagacacaaaatagggtcaaggagaaaagttcttttctaccattaaacttttgagctgcctgtgtttgggattcaaagtattttgggtgcttattgcttaactgggctgaagattatctcatgtgacaccatagatctcttgttttggaattgccattactttctagaacaggcattctgtacagctgccaacatgccctgaatcctcttgcttcatattacagtgatactgctttgtcagggtagaattcagcctcacagggctggagtaagtctctgctgacctcatgccacagtacaacatgttcaaatctgggagaaacctgagggttattcggcatattcctcctcctcctctctcacaagcatggagccctcactctcctcggaaaccgtatgttgtatatgtgtgtgtatctgtcttttaaaaaaaaaaaaaaaaaaatctcatcctgaatcctatagttagttagtcctgcagctttaagtgggggctggttgaatagacagacaaaggaaatagcctgagctgctgaaacttagcgtttttcagcagtagatctcagccaggggcatttgctattttaggactgacttgtgtaaggttgtaataatggagaagcataatatgtgtttcctagttgttcattttacccaaagctatttggacagaatgtagagggtgctctgtagctgtatggacatgctcagatcatcctggagtgtcccgtctcttgtgtgtaatgggctgcttcattgcagagtaagtgtcatcctcactttctcaagcgaaatagttactggaaaatcagtgtttctttcaatgaacaagagtttcatttgccttggactgcttgggaaaaacatgggttaaattcgaagatgccaggcatgcataacaaataggaattt

SEQ ID NO: 32670 - DNA, 1206 bp, Homo sapiens
taattacaaaatttcattttaaaaactgttatataaccattcagtttatctatttcatcttaggtgattctggtagtttgttgtttgagaatttggtccgcttcatgtaaactgttgatttatgtacacacagttctttgtaggcattccctattatccttttaacacaattccaatcagaaatctcagcaggacctttttgtagagatagacaagcttattcttaaatatatatcgaaaggcaaaagaactagaagagtcaaccatactggaaaagaaaaataaagttacgtgaattattctgcccagctttcagacttaccataaagctacagtaaccaagatgaggccatattagtaaaagggtacacatgtagattaatggaatagaatagaaagttcagaaatagacccacgtaaatattgccagttcatatttcacaaaaatacaaaggcaattcaatggagaaaggatagtgttttcaaaaagaggtgttggaaaaagtagaaatctgtaggcaaaaacttgaacttctcacaccttatataaaaattaacacaaaataaatcataaattaatatataaaataaactatgaaacttttagaacaacacaggaaatttttaatctgtgaaagatgctatcgagagaattaaagggcatgctgcatattgggagaaaaatttgtaaatcacatatctgacaaaggacttatattcagaatacagatggttcctgacttaaaatggttcaacttaacaatttttttgactttacaatggtgcaaaagcaatatatgtctagcagaaaccatatttcgagtacctgtacaactattctgttattcactatcagtacaatagtcaataaattatttttctatttttttattttatttatttaaaaatttttttaaaagcagagacaaggtctcactcgttggccaggctggtcttgaactcctgggctcaattattcctcccatctccgctcaatattcctcccatctcagcctcctaaagtgctgggattacaggcatgagccactgtgcctggcctcattcctttttatgaaataggctttgcgttaggtgattttgccaactgtgggctaatgtaagcgttctgagcaatttaaggtaggttaggctaagccatgatgttcagtaagttaggtatattaaatacactttcaacttgcaata

SEQ ID NO: 32671 - DNA, 1036 bp, Homo sapiens
ctgggattatatgcaggtgccaccacactcagctaatttttttatatttttagtagagacggggttttaccatgttggccaggctggtctcgaactcctgacttcaggtgatccacccgcctcggcctcccaaagtgctgggatttacaggtgtgagccaccatgcctggtcccatcttacttttttaaaatgagaaaagattcagctgtgtctatttaaaggcttctctctctctctcctttgggaaggacatgctttgtgcagctaaaatggagaaagagtggctaagatccttaggatccagaatgtctggcaacaagccctagtggctgcaatcacaactataaacatacagcatttcccatcagggcatttgctctgaagaggaggattcttgtggaaacaagtaggcttagagaaatgcaaaactactcttggcacaggctgagctgcggagtgaagcgctcagtttagcactgtggctgagaagctgttggtgttattctctgtgctcacaagagaaggtgtacagttggtgtaggatatgacaacaaaatgttttataatctcatcatacaagcccaagagaagagtgaatttcaagaagtgtgagtgcatgtttaaaattgtaacgaagtttttttctctttgtttttgtacttttgaataaaaatcttcctagtagatagcagtgcctccagaaatggtagctgataccttgaaatctagtttaatttcatttagcacatgacagtgcagtgcatgtcttacaagaaatttttattctctccattattactcaatatgtctacatctccccttgaaattgctctattattgtgtgataatggagaaatctcttaaactttctgaactgtgaatttttccttctgtggagcagtgaggaagattcttgatgtactctaaatgattaacaaaaagcatcataatagttcaaggcacagataggctttgtaagctgaaaaccgtggatttgaaatccttctttattacctctcagctttgttaccttga

SEQ ID NO: 32672 - DNA, 1582 bp, Homo sapiens
tagatatctgttagatgtctccaactgtaatctagtaccacaaagttcattcttgccttttctttttgcttatctgtaaattccctcaccaacagtaagacatctgatccaccacccatcatccatttacttattgtttatccacagtatacatgtaaagcagtttcaggactgtggatctgggagaaacaaatttaccaactagcatacagtgtttatgtatagttccttttgttttcagtcttacagtttccagccaaaacactattttccaatgttatatcaggtatttgtattaaaggtagattcatttttcacaatctttatctcattcagagatccccattgcatggttgatttttttttccattttctaagttcacatacatcaaagtttactctttgtgatgtccagttgtgggtttggacaaatgcatggagtcatgttgtgattttgagtgttatgatttcttttttttttaatttatttatttttaagatggaatttctctctgtcacccaggctggactgcagtggcacaatctgggtttactgcaaccttcaacctcctgggttcaagcgattctcgtgcctcagcctcccaagtagctgggactacaggggtgcaccaccacacctggctaatttttttgtttgtttgtttttagtagagacggggtttcaacatgttggccaggctggtctcaaactccagacctcaaatgatccccccaccttggcctcccaaagtgctgggattacaggcatgagcaaccatgcccagccgattcctttttattttggtctttgtctttctgttgagaggggtcataagccaggatagccactctttaggagagccctggttggcagggaagggttatattcaggtgtgtcaggtgagacacagtaagaaagttaaaccaaaatgcatgagagagaagaaatttgtaatttgcagagtgcagaaaggttgctgaggggtggcagtgggaagactggaggtggcagggagctcaaccagaggataggggagtaagagagaaggaaagaaaaagggaggaaggacctgtgggactgtgcctttattaaggttcatgggcattatctttcccttgggggttgtagattgtagattggctaagttaaagaaaacaggagtgaaaggggaaacttatttgtatgactctggtgttgactgttaggttttattatgatctgcagtttggaatgttgtgggctttgggtcaatgagatgaggaagaagcaggccatatggcaaacagccacacagcaaggagaagttttaactatgccaagggtgagaggcatttcagaaacttatgtcaagcctaaggatgaatgctgaggcagcaactatattaaacaaatttatgacacatgtatcctatagtaccatacacaacaactcctttaccctaaaaatttcgctttgcttccactttataatcaacaactcccctcactaccaactgctggcaatctaatcattttccatcactatagttttgccatttccagaagtcatgtgaatggaatcatacaacatgtaacactttg

SEQ ID NO: 32673 - DNA, 1050 bp, Homo sapiens
caagccattctcctgccacagcctcccaagtagctggaactacaggcgcccgccactgcaccgggctaattttttgtatttttagtagagacggggtttcactgtggtctcgatttcctgacctcgtgatccgcccgccttggcctcccaaagtgctgggattacaggcgcgagccaccatgcccagcctattactttttttttgcctgtaacttaccccgatataaaccttatgacaaggacttttttctgttttaattcacttctatatccaggaacatagaataatgtctggtacttggtagctgctaaaaaaaaaagtttcatgaatgaatttgagtataaggaataatcaaaactttgcttgtcttcttgtcttctttttcccatcccttcccatactaccactgccgtcttcaccccaggctacgtctaatccagttttcattctactgcagagtgataccatgtttgataaggcttgacacattgaagataccaaatatttgttgaatcttcagaaagatatgcaaatattgtagtctctgccaatattctttccgagctatcagacaagtctgaatatcagaaatggcaataaattatcagcctacttcttgaataataggtatccacatttctaacttcatctttttggtgtgacgaaaagatttcaaggtagaggagttcttctattctaattttagacagaccatttaatttctctgtgcttcagttcctgaattttacaatggcataatgattatttaccctcctacctcatagaagcaaatgaaacaatggatgtgaatatgcttggaatggtatttaaaattcctaagtataaagtaatattccagaccacattttgcaactatcaaatacttaaaacaggccctgaaggcaactttcagtccttttttttttctattttggtgcttgttggaaaatagatctccctactttattgatgaaagtctttgtcaggaggtgataatctaccacatttaataaggggtatatcatgtgggaaaaaaaatgatcataaaa

SEQ ID NO: 32674 - DNA, 1030 bp, Homo sapiens
cccagcactttgggaggccgaggcaggtgaatcacttgaggccaggaattcgagaccagcctggccaacgtggcaaaaccccatctctactaaaaatacaaaaattagccaggcatggtggcacacacctgtaatgtaatcccagctgttcaggtggttgtggcacgagaatcacttgaacctagaaggcgaagattgcagtgagccaacatcgcgccactatactccatcctgggtgacaaagcaagactctgtcttaaaaaaaaaaaaaaaaaaagggggtgagggtaagttctaacatgaacgtcctttcaaaatctaatcttctaagagtaaatttacattttctctgggatatttaaggtaatggggttgctaaactaaatgtcttaacttctgtggagggaatagaggggtaaatctaggaaactctcttctaagtaatatatgtaagttgcctaatattatcaattaatatatggaactgtagctggaaagccttaataaacttgtctgacattctttcactgtcttctaattatttgaagatcatagatctacatggtataaacaacacctgagtgtaactactccttctgtgtgtgtgtatgtgtgtgtgtgtgtttgtgtgtgtgtgtgtgtgtgtgtgtatgtatattgagacttaggaaactagacataaaggctgatctcaattaacacattctctttgggcaccattggaatctgacccagtctattcagtatctagtggtgaatgattacttgagtttgagccttatgaaatgctattgatcactgtatttagataacacccaacctttgggacttcaagaaattttaaagcatacaatgtaaattctatgtatattctaacttggagaaaacttggaacatggtaattgggggtcatgagttaggtataaagatgaacattcactttgtttattactgtttttcactgacactactctagctacatccaatttcttgctgtatttcagacataccacagctctgctgcacgtcc

SEQ ID NO: 32675 - DNA, 1044 bp, Homo sapiens
tgtggaatcagtgctttcatacatttcactattaaactgagaaaaactaccacaaaatagtttaatgagcaagactggcattaaaatgttaaaatgagtggttgtgttgagaaacttgaatacttaatgaagtatatgaaaagcagttacagagaggctcacaaagcagtttttacagagttctgatgaaaagcaggttccatgtgtgcagcttttggggaaaagtttttttaacctgagaaaatcatacttaaaatagtaaaaaggtgaagcacgcatttaagaggggatggtgatttatgaaatccactctgcctgtagccagccctccttgacccagtcatttagtgcagaaactaatatggaaagaggtgtggtaagagttgagctttatttcaaaacccattgtgttctttaaaagctccatttaaaaaatgtagcagttggtggctcagttgtgtcacagttcattccctgaatacagaagcttaaacaaatagtaagtctgtaggcattcttcactgccttggctgttaatcagaattgttagatcctgaaatgtattgtgatcttaagggaaaacctttagttccctcacaggtgaccccagtgtagagtgtgtgcactgatgcagaaatgagcaaagtgcttgcttccatccctgtgtcacatatgcatagtttttcttgggacttctaagcctaacgggatttttaggagtattaaaatatatttaacttgctcccttcccccctgctccatggtgtgtgtgtgtgtgtgtgtgtgtttgaaggcctccacatttctcttacacaataaaaagaatcatttttgttgctctttcaatgtcctccagtgcttgtattttcatatatatagtacatttaaaaagcagatgggtagatatcagggcagtgacgttcctgcacaagagtgtctgatagttgagagccaggtgataattttctaattagaaggtaactatattatgggtattttgctgccagtacttctctcccaattattttttaaactttaccctct

SEQ ID NO: 32676 - DNA, 1002 bp, Homo sapiens
gttacaatggcctaggtgctattgcttcacagctagtctctatagttttgttttttaagagatgaggtttcactctgtcacccaggctggagtgcagtggcactatcatagctcactgtaaccccaaatttctgggatcaagcgatcctcctgcctcagccttccaagtagctgggactacagtggtctctgtagttcttacagtggtattgtagtttacatattgttttaaactcaatatctctgggggaaagaaggcctatgtttcctagttcaccatcttgatgatagtatactctcaagtatcactttttgaagtataaatgttgccaggtaatttatttctttttgtacaatgtgtaaataaaagggaatcataggtgtaatattttggacttgagtaagacatttggttttgtcctttgtgaggcccatgtctacaaacagaaaaattcaaagcattgataacccaactttacagtttatgcaatcttatgttggagtgtagaaataaggtaatagaatagttacatattaatcccaagacaagactatatagtgtcttaaggttttcctggcattcacaaatatttattaaatgtctgctctatgtaaggtagtgtacagttgagatacataaagtataagatgcaatccttcaaagtgctaatttttaacttgaaagctctgatgccggaaacactaaataacactatttggtacaggagccatatagaacatataaatgtacaagaactgtcactgtacatgatcaattgtccagaaactgttgtgagttaaaaagtagaaatgacatgaagtggactgatcttacttctatagaaaatgaatttaggccgaatcttgagtgtaggatcatatgttagcatctaccctagagaacaactcacaaatgcaaaaacaggcatgggccgggcgcggtggttcacgcctgaaatcccagcaacttttggaggccgaggtgggtgggtcacaaagtca

SEQ ID NO: 32677 - DNA, 1965 bp, Homo sapiens
tactcagcagactcagtactatgcagccttaggagtctttcaatctggaaaatttatgagtcctttcaatctggaaaactcaaagactggatctggaaacactggttttaaaaaacttctttcaatatttttatattctgtattttatattttattgtgtaatattttattcatataaaataaacatataagctatgacacatagtaatacactacctgtgaaccagccatacaacataagaatgggaacattaccattgccatgcttttgtaactctttacagttctcctcctgtcctaaattatatatttcagtacctggacttctaaaagaagaattactacaaatgtttgttgacactaaacaactattgtttagttttgcctgcttgggggctttgtaaaatgataccatagcttatgtagtcttttagggcttgctttttaggcaaaaataggtttctaagattgatccatgttatcacatatagctgtattcatattatttatttaatttcctcctccacctatatatatctttttcttagcagttagctctcctgacttaccgtttagtggttttttttcctttgttctttcttattttctctctgtcttttgttctaatttctggtagatttccttaaagtttattttccaatcctttcactaaatattttatttctggtattatgtttttaatttcctgagtgcttctttttcttgtctatgaatgcttcttttttgtagcatgcttttcttgttttatatatttgttttcttttgtctctgagggtattttcttttgcttcttgtaatatgtctgtcttctgagtttcttctccactaagtgttttagtttctgtcttttatgttaaagacttttctcaagtgtctggttaaccatggcttccttctcctatttgagagaggcattaaaatggtatgggaaaccctgtgaggacagagactagtttattgcaaggcccttcagttatcagtatctataggtcttttctccagttttccctgagaaattgttcaaacctttgcctttggaaatgggtggatgatggtggtggtaattagtctgggtgcctgtgttccataagacgaggtggaagaggactgaaattctcatctgttggcttagtctatctgtcctcagaatgatgatctgtttttcatctttcataattttattggaatcttttatctattgctgtctcctctccagttctctgcctgtgtaggtttatgccttttattattcaattttagtagagagccaagataagtctgttcaaccctccgcgtttaatccatgcttcccaaacttgtattagaatagaacttcaaggggcttcgatacaggcttgcccactaaactcttctttgtccctaaataaatcactaggaatctcacttctgtgacactgtaggccaattaaaagaaaatgacacttacattacttacgttttgttattgagtaaacagaatttgagacagaaagtagctaccaaagtgattttgctatataattgttttttgtttttttgtttttttttgaagagacagggtcttactctgtggcccaggctggagtgcagtggtgagatcatagctcactacagtcttaaactcctgggctcaagcagttctcacctcagcctcccaaatggctgggactacagggtgccaccacacccagctattatttttattgtttttttgtagagatggagtctcgctatgtggcccagtctggtctcaaactcctaacctcaagcaatcctcctgcctcagcctcccaaagtattgggattacaggagtgggccacccagtccagccagaaatgttcttttaattgttatgattagaaacaaacggattctagtctttgtcttctctacttcaaaacagtagttccctatatttcaacagactgtgtatgtgctagaca

SEQ ID NO: 32678 - DNA, 1026 bp, Homo sapiens
tggtgcctttgttgaaaatgggttggctataaatgtgttgatttatatctgggttttccattctgttccattggtctgtgtgtttttatgccagtactgtgctaatatgtttactattgctttatagtatgttttgaagtcaggtagtgtgatacctcccattttgttctttttgctcaggattgctttggctattcagtgtcttctgtggttccatataaatttaagagtttttcctgttgctgtgaatgttacttatttctagctttattccattgtggtcagaaaagttaatatgatttatttttttttaatcgttgagatttgtttaagatatggtctcttctggagaatgttcccttgtggtgatgaaaagaatgagtattctgcagcaattgggtgaagtgttctataaatgtcaggtctattaagtatggtgtctactttaacttttgtgtctctgttgattttctgtctggatgatctgtccattattgagaatgaggtgctgactttctctactagtattgtattacagtctatcagtctatctctccctttagatctactaatgtttgcctcatgtacttgggagctctgatgttgggtacatagatacttataattgttacatcggcttcctgaattaaccagtttatctttatatagtgacctactttgtctcttcctatagtcttcgatttgtaatctattttatatgatgtaagtatagctacttctactcttttttgttttccagttgcatagactatattttccccaccccttcactttcagtctatgtgtatctttgtaggagaagtgggttccttgtaggcagcatatagttgggtcttatttctttgtccattcagccactttatgccttttaattggagaattgagtccatttacattcagtgttatttttgataagtaagggcttaatactgccattttattgcatattctggttgttttgtaactcctcttttcatcccttttttactattgtctttgtggtta

SEQ ID NO: 32679 - DNA, 1033 bp, Homo sapiens
tgtagttgatagtattctttgcaagaattttgttgaagtgaatttgtttttatatcattatatcagatcattcttaacaaatatttgagtgtctaatgtatgtaagatcctttccatgtatactttgcagtttaatttgcatgtgagtattttggggcaggtcaatacctttaaaaaaaaatgaagtaattagtgcttagggaaaattttaaaacttgtctaagaccagagagctagttcatggctgagtctaagctctttgcacatgtacacatctacatctacatctacacatctacagcacagatgcctcaatattgatagcttttatcatgtacttagtgtggggagtgtaatataaaggcagagaatatagatcttagaatgatacaggctgtcaaaaagtcggtaatctgccaagtaattttcctaaaacacataagaaaaaaacttgaacagttggtcttagttaaaattgaagcaagatttgaggcttcataattaactcttgaagtagaaacttagatgaaagaaaaaagtaagtttcccactgctttccttatgtactatcaaaaggccacaatgaaattgctggaagtcgccacctcttactaacctctgaacagtgcttaaaagtaggaagtgagaggtaattggctggtttatctttgcttccatgcagttttactggcctataatctggtggttaatagcatcgattgtttttaattctgttgtttttttcctgccaagttgctataaccatctgggaagggtaagataagagtgctggagcattgtcctaagaaagttccacttctccttttgagcctttctttaacacaaatctcatattgggagagatttctacagtcgttttcatttatagctctctaacattctccctaaacggttgtctggcctctcagaatctcccaaagcagcctattctacttgtgcctctgttagacaaatctaatatattaatctgaatctggtaccctgtatttctccagttagggccaatcagaat

SEQ ID NO: 32680 - DNA, 1148 bp, Homo sapiens
cccccctccctttttttttttttttttttttgcatgtgattttagtaaccatggcagttgcgttgattttacatctcttagtttcagcttccttttaatttcttgcatttaatactggtatatgtttgctgtttgacctttctttttctctacttttctatcctacccagttactttgcttttgagtttgtatggatatatgggaagcttctgtcagggatgacactatagagaaagggatttctttgaatctcctttcttgatagctggtactgagcaaagctctagtctctgattctgattctgtctgaaccattcactcatatggtgccagaaaggtcatttgtgcttcagcagagaattcaacttacaggatttttatttccattctcttctcaaaagagcaaacctgtcatctctagttaccagtgaacttgatgaatatgaatggtaacacacttttccattaaaatccacatatagttagattgggatatccatttctcactgttgttctttgattatactgagtttcagcctgtgaataattaactgtggttatgaatgagagggattaaattgcctcagctagagtaaacctattggatggtctcttctcttgatttcccaagcaatggctgttctgtcaactaccattatagtgtccattccaagatggctcctctaatatctaattctgtatatattgaatcttgtagggatttttgcttttgaacattgctgttttaatttcctatggacttgttctgggctttttctctcattctaaaaaataatcattacccactatctagaaaactgtcttttaatcttctgattaaagattgcttaatgatagtgcctatttgtttggccagtagcatgtttttctttgttttaacactggagtttctgcatggatttataatataaggttttttttttgtttttttgtttttttgtttttaacattagataggcatgaagccttcgtctcacagctgcatgcgtagtcactgttgaagcaaatgcctacctaatttgacactcttggtgtgtttaaaaaatttttttgagtttgcaaataagcatattaagtctactgatggagccttcgggcagtgaacagttatttgaggaccctgatc

SEQ ID NO: 32681 - DNA, 1062 bp, Homo sapiens
aataacaaaggagtctaatttttgggtcacaggtagcatcaaagaaggaagtattttgagagtaaagagttttcattcttactagtccagcagttaagttagaaaactaaaataaaggattcagttctccatcagctgcctgcctagaccagattttggatttcagatgaaaagatgcagaaatagtgttagaatcaaggcagaatgacctagcacctttcttgcggttaccgttcaggaatggtgagagaagatgggagaggcagggaagacaaggcaaaaactaccaatgcaaactctggatttaatttgtacgttcctgaaaacaaaggtaagaaaaaaaacaccgaatgttgggcattgttagaatttattcttgcatatgtatcatatacctaggatttgtaggtttcaaacatttaattatttttcccagttttacccaaaagatccctgtctgtgtggatgccagatgaagactagtccatactttgtatgtttctttctgtaattccattcactcctgaaatcatggcagtgtttttccacctataatattattccttctcgattttttagctttttatacattactagattttgtagatttttggtagatatccttattaaactaagggagttcccatctgtctttgttgggagtatttatcgtaaatagatattggaatagtctaatgtgttttctgcgttttttgttatgatcacatggttttcttatttagtttcttagtatggtgaactacattgatttttgaatgtgaaccagccctacatccctgggataaaccctacttagcctagatgcattgtctttttatataatgctgtatttgatttgctaatattttgttaaaggtttttgcatatatgttcattagagatactggtctgcatgcagagttgtttttttttttttttggtagtgtctgttttgttttggtattagagtaatgttagtctcataaaatgagttgggaaatgttcccttctcttttttgcaagagagagtagaattgttattatttcttatttaaatggttg

SEQ ID NO: 32682 - DNA, 1113 bp, Homo sapiens
attccgtagtcacatgtttgcttgctcattggttcacattacatttattcagcatctgcttgagccaaggcactgtaactacatgttttttttagttacctacttttgtaaggtcctgtttctttggctacatctgattacagtaaacataggaagtttaataaaacaattttcatgaccgaggagacagcattcttttttcaaaattatgtatgtatgtatgtatgtatgaatgaatgaatgacaggatcttgctctgttacccaggatgaggtacagtggtgtgatcatagctcactgcaggccagaactcctgggctcaagcaatcctcctgccctttttttttttttttttttttttttttagtagagattgaggtcttgctatgttgcacagactggtcttgaacttctgggctcaagtgatcctcctgcctcagcatcccaaagtgctgggattatgggcttgagccactatgcctggccagcattcttcaaagtcataaatgtctactgaacttgattatatttttcttatttttgttttaactcttggatttcctattactgggttagtaatgtgttataaaaccaggaggtcaagagaaagatttgttttgagtgtgaatgactggttggtaaaagatgttgctaaatcacaaattcccttagtaggtggttggaaaaatgttgctccttataaaatagaagcacaagaaagaaataactttaagaatagaactgttgaataaattttcagtgtagcaaagcataaagtatgtgttaccttcgaaaccatttcaaatgacctgcagtgaaggagaaagcataaatgggagatgtttttaaaatctgaaaaacatggctaaggtttcacttctataagtagtgtgataatagctccctgcagcctctatctcttgggttcagtggatcctcccacctcagcctcctgagaagctgggactataggcatgtgccactatgcccagctaaagtgatctgcctgccttggcctcccaaagtgctgggattacagtagtgagtcaccatgcccagcccaaaagagaatttttcccccaacgccttttggctgccaaatactaaagtatt

SEQ ID NO: 32683 - DNA, 1016 bp, Homo sapiens
aatgtgtatttatttcataatcgtaagtttagaaatcagtaggataaaggtcagattgggtgtcagggcatccagaatagtgggtgtattccattttgatctgcatatcttattctgttgttgattaagagcagtgagagtccataaactatggtatatgatagctgtgatctctgatacaagcttcatgtagatgacactcaaatctgcacattcagcttgcacttccctactgcctgctggacatctgcattttgagatcccgctggttcctgaaacctagtgtgtcttctaccaaagtcattggcattttgcagtgatatttttttgcattcccataaacctatacctcctctagttttacttatcttgattaatggcccatcattcatttagccaaccagtctacaaaacttggggttttctttaatttctttcttttttacttctgaaacatgtcttccctgttgaaccttaagagtgttcatttattcactcattcactcgtttattctgacatttattaagcatctattatgtgccagacattatgcaaggaattaaggatatagtggaaaataagatcaattttctgctcttacagaccttatagttcaagctttcatcattttctccctatcctctttgggctattttgatagccatccatattttttctggttataaacataatacatccttattttaagaagtgcaaggatgccaggagtggtggctcacgcctgtaatcccagcactttgggagtctgaggcaggtgggtcacttgagcccacgagtttgaaacaagcctgggcaacatggcaaaaccccgtctctataaaaaaaaaaaaaaatgatgtggtgtcatgtacctgtacttccagtgggagctgaggtgggaagatctcttgagcctgggaggtggaggttgcagtgagcccggattgcgccttgcaccactacagggaaaaaaaaatgaatgagaagcctgagctttctggagcaaatcttactg

SEQ ID NO: 32684 - DNA, 1032 bp, Homo sapiens
ctcagaacagtataaaataattatactttcctctctataactcagttctcattcatttacttgttccatcttcctttctcccattttctctttttttctagcacctgtagctcaacaagaactttcttaatgtatataatgaaacagctcatttcctacattcttcctgaatgttattagacacgggattagacttacaagtaacggggagcagcttgaatttttttcttttaaattaaatctttattttttataatagagacagagtcttgctgtattgcccaggctggtctcaaactcctgggctcaagtgatcccccacctcagcttcccaaagtgctgggattacaggtgtgagccactgtgcccagctgtagcttgcattcttatttctcaaattgaaattgtgacttgggtaaactgaatttgttctcattctgcatagacactggatggtttaggaaagcttagtaacgttagcataatattatggctgtatgatttcatagtctggttcagtttcattggcaagaggaggtgtgatattgtagagttttgaactaaaaattgagacttcagtcccaggtttgacattattacttccatgctttgagagttaaagtatgtttgttttctcacctttaaaatgggcttatcattacttgctttacacagctcatggggttattgagaatcagataagaaaatttgcatgaaagatttttatcaatgtaaaggattgttattgcgttgtagacagttataggtatatctgttgttttcactcaaagactcaatttttctttctgaaaacctttttttttaagacaacgtcttgttctgttgcccaggctggagtgcaagggtgcagtcgtagctcacagcaatctcacattcctgggcacaaacagtcccctgcatcagtgtctcaggtagctgggactgcaggcatatgccactgtgatcagctaatatttttattttttgtagagatgagggtctcgctatgttgcccatgctggtctcgaactc

SEQ ID NO: 32685 - DNA, 1024 bp, Homo sapiens
gtaggaaagtgtgatgggaactgagttctaattctaataatcagggtactttgaagtttgtggaagacaagcatgttggaagatatgtataaattctttttttattttattttgtagaaatggggttgcactatgttgcccaggctggtctccaattcctgggctcaagtgatcctcccgtctcagcctcccaaagtactgggattacaggtgtgagccaccatgcccagcctgaaaattcttgatattgcttttttctttattttaataatgtaaatgattctgctcatactattataaaagtctttgtccagtatgcgtgtatattttgtttattcatatattttacctttttttggtgctctttgttcttttgtatagttctagatttctgtgtggtatgattttccttctgattgaaggatttctaatgtttcttgtagtgcacatttgctgacaatgaatccttttagtatttggacatctgaagactttaatttgtttttagttttcgaaactgttttcacaggatatgtaattactgttgacgtttctttatgatgctgtttcaccatcttctggcctgcattgtatccaatgagaaatctgctttcattgggtttatttttctgtatgtaatgtgtggttgtttccttctggctgcttttatttttctttcaaaaatatattttttctttttttaatttaatttttttatttctaaaataaaataaaatagacgcgaggtttcaccatcttgtttcaccatgttggtgaaaccaagttggtcaggctagtcttgaactcctggcctcaagtgattgatccctcttggcttcccaaagtgttgggattacaagtgtgagccactgctcccagcccaaaaaatatattttttttattgtggtaaaatacatataattaaaaatttaccattttaaccattttttgtttgtgtgtttttgagacagcgtctcgctctgtcacccagggtggagtgcagtggtgtaaacatgaattactg

SEQ ID NO: 32686 - DNA, 1031 bp, Homo sapiens
cagcccctgcacaggaatctattggagttcacccaactctagcaaaggaggggaggggaagcagggaggagaaacacatgggtgccaaggagcttgccccccgagtcagttcccaaagtcccagatgtgggactgccacatctagccctggggactgcctccatcttgaaactttttttttaaaacagggtctcattctgtcacccaggctggagtgcagtggtgcaatctgacctcactgtagccttgacctccccagttcaagggatcctcccacctcagcctccgaagtagctgggactacagccaggcaccataatttttatggctattttttattattatttcttgtagagatggagtcttcttatgctgcccaggctggtctcgaactcctagactctagcaatcctcctccttggcctcccaaagtcctgggattacaggcatgagccgccacacccggcccatctctaaacatttaacaagcacccactatggtgtcagactccttggtaggtcctgaaggcctagaagtgaatgaggctcagccccagccctcaaaaagttcagaggcagtgagggagacactgcaaacatgaaacctcaggcttggtctcccaactagactccaggatttgaagaaatgccaccctagctaagatgaaatcagatagacctgttgtcttttgtacacaatgacgagggtataaattgatccaatcttttgggtggcaatctgaaaatttaacacatatgtaccttccatgagacaattctgtttttcagaattcataatacagatactcccacctatatacatgagaatgtatacctcagggtattcagtgcagcatggtttatacaagccagaattggaaccagcctggatgtctgtccatcaggagggggacacttaagtcaactaagacccatctaaaactgtggggtactatgcagcctttaaaagaataaggcagttccatatgcactcatgtggaataagctcccagaagcagagtagagaacta

SEQ ID NO: 32687 - DNA, 1010 bp, Homo sapiens
tcagtcaagtgtgcccagtgctttctctcagaactcatcaaaaatgtcagcaatgggcagtgtccgcccagtagctggacagcatagccacctgcgtgctggagcccccgtccttcccaggccctgggcctgctttgccaataccagcatggcaggggcctccccaggcaactggctgcagctgagtgtgacccatgggagacagtgcagggcaggaagaaggggagaccagcgtctctccctcactctgcctcatggggtttccacagcagctgcttctctggggccccagctcctagaatatgaattctcattcctaccaggctggtccagcccacagcactggaaccctcatccacaccctctgtcctgcccgctgaagggtttggagtttcctgctcttgtctgtctctgggttgccccacaggcccctgttggaagatttagctcttgccatacctttggaactagttcctctgtgaattctctgcattgatcctgctggaatgagctctttcctgactgatacaggatggattttattttttacttatttatttagttttttgagacagtctcactgtggtgcccaggctggattaccgtggcacaatctcggctcactgaaacctctacctcctgggttcaagcaactctcgtgcctaagaagctgggactacaggcacacgccaccatgcctggctaatttttgtatttttagtagagatagagtttcaccatgttggccaggctggtctcgaactcctgacctcaggtgatccgcctgcctcagcctcccaaagtgctgggattacaggcatgagccaccacacctggcctaggatggattttaaagatgggcccaaacatgcagggtttgacatgaggatgtcgagaggccgttccttagtaggcagtagcagacctgctgagtgaaagggccacacttttagcaaataaacaatcccctgcttctccaatacctgctttctccctagtcctccccaaaa

SEQ ID NO: 32688 - DNA, 1049 bp, Homo sapiens
tggtttgaccatgcaatggaatattattcagtcatcaaaaggaatgaagtactcacacgtgctacaacacagatgaactatgagaatattatgctaagtagaagaaaccagtcacaaaggtcacatattataagatttcatttatatgaaatgtccagaacaggcaaatctatgaagacaggaaccctgtctctactaaaaatacaaaattagatgggcgtggtggcatatccctgtaatcccagctactcgggaggcaggagaattgctttaacccgggaggcggaggttgcagtgagccgagattgtgccactgcactccagcctgtgacagagactctatctcaaaaaaagtagattgtcagggcttagtgggaggaggaaatggcaggtacctgctcatggatacagggtttcttttggggtgatgaaaatgttttaaaattgatcatgatggtggttgccgagctctgtgaatgcactgaaaccattgatttgtttactttaaattggcaaatcatacggtacctgaattatattttaatagttatattaaaaaagtaaaatcttccttgaagagatgacacttaaggagaggcgtagggggtgggatgagttcactatgtggagaaatgaggaacagcatttcagggtgaggaacaccatagtaaagtccctgaggttgataggcatagagcagatgtaagggactgttttttttgagacggactttcactcttgacgcccaggcttgggtggagtggtgccgtcctggctcactgcaacctctgcctcccgagttcaagcgattttcctgcctcagtctcccgagtagctaggattacaggtgccatccaccacacgtggctaattttgggatatttagtagagatggggttccaccatgttgaccaggctggtctcgaactcctgatctcaggtgatccacccgcctcagcttcccaaagtgctgggattacaggcatgagccactgtgctcagccagatttaagggactttcaagaagtttctgtggctgaagcctgcag

SEQ ID NO: 32689 - DNA, 1048 bp, Homo sapiens
gccaagtgctaagtagaacttagagcctgtctgaaaaaacctctgctgacagaagtgtcctagaatctgtactacctatatggcagccatgagccacatgaggcttttgagcacttgaaatgtagtgtgactgaggaactgaaatttaattttaattaaccacatatagctggtggctactgtattggccagtacaaaaaaggagccatttcagacaatcgtattttacagggatgttgtggaaagagttttgggttcaaacacattcttcacattttaatattctagcccctagccgagcagctttgggcaaatcatttaactagagtgacccttgtttcttcaggtgtaaaatgggaatgaaaaataacttctgttgttgtgagcaacaactgaagtcccctagactagttgtatatatatttatttgagacagggtctcactctgtctcccaggctggagtgcagtgttgccatcatagcttactgcagcccagatctcctgggctcaagtgatcttcctgcctcagcctcccgaatggctgggactacaggtatgtgcctccacacctggctaattgttttatttttggagagctgaggtctcactatgttgcccaagctggtcttgaactcctggggtcaaacagtcttcttgccttggcctcccaaagtgcttggattacaggagttagccacccatgtaccatcccagcatttccttattatcttgcagagtgaacattataaactcaaattccccaaagtgacgattgtatgcatagaacattggctccactgatatgggaagggcattcttttgagtctgaagcacgctgttttcatggtcttacctttactggactcttccctagccccttcacgctgcgtccccctaccccgcacctctccccacctccccgccttttccgttaggtcctttgttttcttttatggcaggtttagttactgttacctttcttcccatctttgttacgaaaaaattgttaaattagtaagtgcttatatagcatgatattgctatatt

SEQ ID NO: 32690 - DNA, 1190 bp, Homo sapiens
agtggctactcatgaaatccaatgactaggaccctagaatgtcattttggctcctctactccttttgctcaatgtattcgtgaaagcatgactacaaaaggtgttaacttaaatacaacaacagtatctcagaagcaggactactgacgagaggaaaaatgtggtacagacttttaacctctggcttgctcccttttaatcaccaaacaggaaattcagaataagcagaaagtaggaccaagtgatgacacccctcgaaggggcccagagtccctgcccgtgggacatcatgacatcatcactgatgtcgccacattccagaccacacagggcttcatcgtaactgcttctagagatgggattgtgaaggtgtggaaataaaacctactgatttgtataaattttaatagttataaatataatactataactcgagaaaaggcatttctagagaacagattcatttgcttaattttcaaaattatgtctccatattactgtttcatgactgactgactaaatgacacccaaaatggttaagatgtacttgactagtttacttatgcatctctttgcaagaatcagccagccaacaatgtctgggatttttattgtatatgttatagaggtgagaaatgtaaaatatgaaaatgaatatgtttattttgtattgaaaaagatggttgaaaagatggttgtaagctattatagtataaacacatttttgctattaaaaatgctattcaaagcagttaaactgtattcatgcatcctaagagtttgtggttttggtggtatttttaaatggtaaatttaagcagaggaataatccctccattaagcagaggaataatctctccagcagcatttgttctaaggtgaagaaatggagtccatgtcacaaggaatcagtgacagaaccaggtgttaggtccaaatctctggactctaaatattgtgctctttctgctctaatatttcctgtgtgttttacagtctgtcttattagttatttatttaacactgtagaattgatttcctgcatattagttatacaagtgtgcctcctcttggccatcattattttttatgggctgtaccataaattctgacacttggcccaacaggttgcttttatccagtatagactattgaatgcatgaaaaagaaaaaagtacaccaaaaatata

SEQ ID NO: 32691 - DNA, 1057 bp, Homo sapiens
tcagttcccagtcctgattttcttactgaattatgactggtgatttggactacctagatcttggctctgccattttcttttttcttatttgagttaaactttcagtttgtctctttgggactagttcttgaaaaattgctgtttttctaaacttttgcacagctttttcaacttatttgtttatagtattctaaattatattttctatgttttcttcttgtgctaccttatttctggctcattcagcttctcaattttaggggagatggatgcatttggtattcgttgaaattggggtggtagtaaaatatctaaatggagttctatcacagtgaaaacttaaaacaatatgagcagtacaaaagaaagttgtcaatgttagggttacatgttttggagtcactggtagtgttgaaagtcagcgtttttgagtggctatgaagtaaagggaatatgaagggcaacaaaagcctgatgtctgaatcttaggaagttaaatttttggaacaggaagagaggggcaagaaagggaaagagaagaaaccatttaagttaatattataaactacaatgaaagagaaaacttatgaaaagaatatgtaggcctctctcagtgagacaaaaaccctactagcatgaaaacctcataatgccattgatgcactctcatatagtgccctctggtggaatgcaattgatacctctttcctggaggtttttttacaatatatgtatcacaagcctttatgatgtacatatcctaaggaagtaactaagaatcaactcagatttagtttcaagactgttcagattgactttctttataatagcaaaaaattaggagcaaactaaaagttcagcagcagttatcaatgaaaaacattgataattgtgttttttaaaattaggtttaagaaaagcatatggggtttctattttggaatggcagagtaaggacctccaaaaatctgttcctccataaagcaatgagaatactggcaaagactgtcaaagtcaattttctgagaactttggaaatcagctaacacctttcagc

SEQ ID NO: 32692 - DNA, 1048 bp, Homo sapiens
gagcaagactctatctcaagaaaaaacaaaacaaaccttaatcttgacattttcttttccttatcagtcattagttacctcatggggccaccctagcccctcatctcttctttttaccttgctaaggtataggttttgacactgccatgggtaaaaggaaggagtgggaaggaacagtttccatagcctttctacttcctgcttcctacggttcttgtaatcccttctaccactactgctccttcaatgccagcccccgttactgggtgccatgataaaaatcactaaaactccctgacccgtattcctctgaaatgttagtgcttcgtatattcattggtctgtcagtgatcccctcatttgtctgagtggaaaaagaggaacaaataatcccccattttatgttatttctggtgccagtggctttaggagactcctaaaggttaggggacaatcctctgttcaagagataagcactgctagtagaagggagagcaggccagaaactctgaggttcttaccagaaataacagcagaacaacaccagcttccggttttttgaaagccagcaatgactttaccagagcagtttgtgatttccatatttttgactatccttaaaacaaatttgagcaacaggtgttattcctattttatagataagggaatggagacacaaggaaggtagttaacttgcttatgttcatatagtgcagtaagtttcagagttggcatttgaatctaaacctatctgattccaaagcctacactcctacactgtgctgtgtggcctctaaagtaaaataaacagaggacagagagctaagacccagaagctggcttgggttttatacagacttagggagaagcccatgtgcagtttatctgctccagccccttacaagccttttctctaccttcacttctttttggtccctgtgctacctgagtttcttaggattactagtagagacttggatccaggggaggctttggagataggaattgagtccttgtttctttttttttttctttttttaattgagat

SEQ ID NO: 32693 - DNA, 1024 bp, Homo sapiens
caggtgaggaaactggggttaggagagactaaataacatgacccaaatgtatccggtctaattctcagttctcagagctcctgctctacaccttggttttgaagcaatcctgcttttctttggtcttctgggtctttatggtgagagtccgtgataacccagggtcagtgccagcaccttgcattgttatttcttcaaggcccagtatgtgatcacccaggctggaatgcagtggggagatcatggctcactgcagctttgacttcccaggctcaagccatcctccaaacgtagccttccaagcactataggtgtgtgccaccacgcctggctaatttgcggtcttttaaaatagagccagtgtatttgaatgtgtatggttaaatataattaaaatacatgtgtcagtaattataaaagtttaaaatcaacatttgtttctttacagtattttttaaatatcatagatgctggtacagatttgtgtaaagtgaacttccaagtgtgctgtggtttatggacttaaaaggggaaataagcatagatctactcagactttagaggtgcccaggaaagtaagagacttttcctaataaagatttgctcattaaagtggggatattcatctagaattttgacatattatcaggatatggcccagagtttttccatttttagggcgagcaggcgttatagggtatttacatcttgcttacttagaggtaaatttttattctattcagagcattgttgaacctagcaggggtggggagtgggacccaggatgaagggaataattgtgtttgattgactcaaagatctcaactgccataaggtacattttgatttcagagatgttggaaagcaaggaaaaagtaaggttattttaagtttaaggtagttaaactttacgttcagtgctattcactgctaagaaggaaaagagtacagtctttgaccggttgtgatcatatgttaagaaacacatatgttaagtgggaggcaaggtaggagaagaaagtgt

SEQ ID NO: 32694 - DNA, 1028 bp, Homo sapiens
aagagatccattgctttcctcagattcttagtggtatctcctacttagaaaagtttgtaagaatctttgagttgtggacagcaatatattagtccctattttaataaatggggaatactgagccatggtataacctcctctttatgtgtcagggccatctgtaatatatttgtatataattttttactgctttctaggatgatggagtcacaaatcacttagcagtcaggttctgaaagatcctttaaatcgtatgtaaattgcctttgtagctttcatctggtttacttttctattctcaaatctattttaattccttttcttcccttggtataggtaactcagatgattcaccgtgagccagataaacgtttagaggcagaagattacttaaaacagcagcgtggcaatgcctttcctgaaatattttacacttttcttcagccctacatggcccagtttgccaaggaaacgtttctttctgcagatgagcgtattctggttatacggaaggatttgggcaacattattcacaatctctgtggacatgatctgccagaaaaagccgaaggagagcctaaggaaaatgggctggttatcttggtatctgttataacatcctgcctacagacccttaaatactgtgattccaaactagctgctttggaactgattcttcatttggctccaagattaagtgttgaaatccttttggatcgtattactccatatcttttgcatttcagcaatgactctgttcctagggtgagggctgaagccttgaggacgttgaccaaagttcttgctctcgtcaaagaggttcctcgtaatgatatcaatatttatccggaatacattctgccaggcatagcccacttagcccaagatgatgctactatcgttagactagcctatgctggtaagagtttattgtccaaatattagccacttagatattttttaagttaatgactataatactgcttgtttttctgatttgtttgagaattgcaagtatgaactttgct

SEQ ID NO: 32695 - DNA, 1047 bp, Homo sapiens
agctgggcatgtgcagcaggcagaggggatagtggaggaaagcctttgggttctgccttttcctcttcactgcctggctttaaatgaatccttgctggtccctttgcaattgaaactggcagcatcaacgcaggctgctagtgttgtcagggtgcataaatgtactgcaaaaaccctgttgggatgagggttgatgaaaacaggactggccagctgatatttaacatccactcatccacctcttccacatcaaactccctgggatggcagattttaatctaggtgactattgcccacaggagttgcccggcagagtggtaccaaaaatagtagcctatcgaattctgtggtatctggagcatccagctctggggtttattccttctctgttcttaaactcacatggagggattcagctcctgcttaaaacacattaccaggcagggtagattaaaacagaaacatgatttcccagggtaatataactgtctcctaaagacaacaaacgttgactggaacttatagagcaagagcttaaataaacaacaaatataacttaaagtgagaatgtattagcaatctgaagcaggaaaagaatgtttcagaggtatatacatatgtgaacatttatcaaattgtacactttaaatatgtgcagtttattttatgcaaagtataccacaatgaagctgttaaaaagaaaactaaccacttactcacaaaataaaatgcaaatctaacaatatcaccctatttaacactcttcaatggtttcccaattatcttaggataaaattcagtctttagaatgtggcttggaaagcttgcatgatctggtccctactcaatacatcctttccatacccaaactctcaaataggagacccagacatctcaatttctttcgattcttgggtctgcctccaagcatttgcattctgttgcttgttagcatttttcccatattccacccctacacatacatatacacatttacctggataattgctttaggattctgcttagatatccttttcatgaagctct

SEQ ID NO: 32696 - DNA, 1027 bp, Homo sapiens
atgtagtagcgagtatttctttgattatgaataatagctgaaaagtctacctttaaagaacttaattggtttcactaagatttttgccttctctcaggtcaaagattctaaactgcctgcatataaggatctcggtaaaaatctaccattccctacatattttcctgatggagatgaagaggaactgccagaagatttgtatgatgaaaacgtgtgtcagcccggtgcgccttctattacatttgcctaacatctttggacgtggcagaaccttacatattctgtgagcttcgatgagccagagtgatatcataaccaccagaaatcatactctcctttcttagtcacaacaaaatcacacatgtcatctttgtcaagggcataaatatatcattcatacccccattaaattttgttagaaaaattaccacattaaatatatgagttaagtagattggatttgctgaaattggtgttgggcatattagcaaaatattcttaatttgtggactcgattcttttttactacatatttcccaagttatcttaagatgtctgtaaatttaacttttattaaagttttgtcaatctttgtgaaatagtggttgtggaacagtagaaaaccatatggggactatagtgcaacctatttgggtaaagaaaccatttgctaaaatggagaaagtaaatagatttttatttaaattacagaaacatgttaaaggccggacaaaggaaagacaataaaatcataaattatcggtcctgtttacatttttgttgggagaggtgattactttttagttttatcactcaattataagatcagtgtgttttggttttgttttgttttgttctgtttaggcagggttttgctgtgttgcccaggctggagtgcagtgcagtggtgcgatcttggctcactgcagccacgaccttctgagctcaagtgatccttccacctcagcctcccatgtatctgggactataggtgcccaccaccatgcctggctaatatttgtatttt

SEQ ID NO: 32697 - DNA, 1053 bp, Homo sapiens
aactgtagtacatacaatgacattctgatgtagttgtataaatagttgataaccagtaacatttattactcagatttatcgcctacttcagtaaaagattacttccaaaaactctattcactctcaatcgataatagtttgccatcactgaagatactcagaagatacaccaaagagttctgaaacgggagtctaaatacattttgagaaactggcatcagaacaatgtctagtcccttttgaactattaacacactagtgaatatatttccagcaagtatatttgtataataaacacgtcctttaaaaaaatctttgaaatatggtgcttaaataactttcttttgtaaccttaaagtatctgcccaggcattaattaaggtatgaatttggggaacattttataggtttgtgttttaaatggtaaaacttgctatgtcctttcactccattatttacgttcttccagtgactccgtagcaggtaaattagtccttccttgcctatgggttttgagccacttcctagtgggcagccaactttgttaacatccactcacttcttgggagcttttgtttcctcagagtacagggttaccaataacttttttttaagattccaaagttagtaaagatagtcttagagatgaccaacctatttaattggcattagctttttgttttgctgtttggattcactaaatgtattaatgaagactaaagaactattgtttacagcataataagtataaatgtatgttctaaagtacggttcattcgtgttcattcctgtgtcctatatatcatttattttcagatttgcctggcttttgtctgtccttcccccacattttcttaaaagatttagactggtttgctgatagacataaaaagaatgaggtagataattgagggagtcttggtgcaggcagggaaataataaacctgaggtaagattaaatacacaaaaatacatatgggctgcagacctttggccctcaacttttgcaccactaagacaaaaatggttgagatgtcatttacgtttcagatc

SEQ ID NO: 32698 - DNA, 1019 bp, Homo sapiens
gtagtcctcagtccgtccttgatatgaagtcacataattttagtctgacacaaggggactccatgtacttgtcacccttttatggatccttgcccctcactcatttcccagagccagactagaattagttatattccacaaggttagctgagcatctgtagtttggctgtatataccctgagtctaaatttaaaatgtactttgtgcaaatgttgaattcagtttgtcttttgaattagtatcagttaacaattctgaaataattttctgtgaattgtaggattgagtagataagtaaatgtattgataatggagctaggtttctcactgttggaaaagggcgttaaagtatgaaaatgggaaaattaaaatgaaccctatagtgttgaattcaaactataagtatgcatatactgtttggtgggggaggggaatgcatgcatgcacacaaggaaaaaatgtagcacacagagaaacagaggggtgtgtgtgtgtgtgtcttagttctgtctactggaacattgtagtcatatataacggaatatatttgtagaatgaataagagtgatacttagtctgtaatactcagaattgtcttttaagcctgttggttacatattaaacatatctaatgccatgatgaggtacttccactgagagtttcacctgttaatgtgagagcagctgatggaaaagtgtttatattgtgagaattcatgtgttataagaagctgttccattttagtcataattcagatttgcttctttagatgtagaactattacccgttatcagagccaaaatcagagactgttagatttatgtaaatcagagaaaaccagggctagacaaactagtattctgataactaactctgtccttgaataattttggtcaaggaaagtaacatctaaagcaaggagcagtaggaccattccagcaccagtggtatggatgaagtccattaagtcagttaatacagaagatgagttcaaaacaggcctggcagtccatttttt

SEQ ID NO: 32699 - DNA, 1048 bp, Homo sapiens
aaacactgcaagtgaatggctgaggtacttccagttggatatggttggtacatctgtagaatgggatcatggcaaaattcttgccagagtgcaagattatggaactccagcttattactaataacttcaggggtctaaaaactttttctcaaagaatgggaagtaaatatcttaggtttgcagacattatgttctctcttgcccatgagagaactaacttattctgccattacagctctaaattggagataggcaatatgtaaattagtgtgcatgactctatcccaataaaactttatttacaaaaacatacggccagcacaggccagtttgccaacccctcttttaaaccttagtgagaagagaatcagaggcagcaagaggaaagagatttctcaaagaacattagggaagcaggaaaatagggaggaaatgatgacaatggaaaggagcgggacgttaaggggtagaggaaaaccctgtggagagattctattttaaaagatcctatagaaatctaaacaccgatgttaagaaattactaaattttttaggttgtgataatggtattgtggttttgttcttcaaaagtattcttatcttttagagatctctactgaaatatttgtgaatgaaatgatagggtatctggagtttgcctcacaataatctattggagttgtcagaggagaggaacagatgaaaaaaataaataggccttgagttgattattgttcaacactggatgatggatacatagggatttattgagttaatctctctgctcctgaatattccgtaaaacttccataataaaaaactgttttagtaaaagacttggatttgggatttggggattaacctcagagtgaaatccaaagagtaattggagaggaagatggattgcagagagtggatggttgatgagagaaggagaagcagtttgtgttccagtgaaagacgaggagggatatgaagggaaaagaaggtaggagaatccagtggcttctcaagggagatactcaggggatgggaattttagaggaag

SEQ ID NO: 32700 - DNA, 1050 bp, Homo sapiens
ttgttttttggttttttgtaagatcattttcatagaaaacaagattatgtaaagccatgcaccagcttcaggattaaatagctggtaagagttgggggaacaaccagccctggaatttaaagtagtgatagtcaactctggagaagtgaggacctccatttgagaagatcaccactgttatatgggctacaatacaatattctgtttaacttttactgtattaacagtggggcagggttttcctcgcatgtgtgtgtgcatatcttcatgaggtatttattacttacatgagaatgaattggactttatttgaccttttgctaaatgttaccaataactatagctcttgtagctgacatcttattattgctgtaaggtgcttttaattttaaatgcttgtaaatttataggattcgttgtccttctcatctggaactgttttgaatttcctgagtgcagcattgtattcccagctgcatacagccctagttgccactgcctcttctctctgccactgacttcccacgtctgtacatgtacacatacatgtgcatacctttgtttaactttttttttcttttttaaactcctctctctactttccttaatgcattttggaacttttcggctctatcttctggatattaatcctgttggaagggtgaacactaggggaacaatatgtgcagtgccatggttaagggagtgatgaaaggacatggatttataggctggagcagtgggtctcatgcttgagtaggctttataatctcttggaggtttagttgagcacaaattgatggaccccacccacggaacttctgattctgtaggtctggggttaatacctgagaatttgcatttctaccaagtttccaggtgatatagatgctgctggtccggaaacacacattgagaaccactgggctggaaaatagaagctcatcagttaaaccacttttcctcctcactcctctacctagcacagaattcagaatgcctttctttccttaactctgcttgaattataacatacaaacatctgtttaa

SEQ ID NO: 32701 - DNA, 1055 bp, Homo sapiens
atgcttagtttttttatgtttgtttttttaggtacaagactgtcatgtcttaaaatatacgtcaaaggaaaactgtaatggaaaaatggcaaccctgtctgtaggaggaaaaactgtatcacgttttcgtgtaaggatgtattttcatagctagaatactgcatttttcatcagtttcaaatctggatgagtttatgttttgagattgttccacagccacaaacttgcatttgtttgtgaggtaaattgtgtatttgggggaggcagtctggcacagccattttgcccaggagtcttggagactcttgagtttgttctaatacctctccctgtatctggaacaagtaattttacctctctaagctgtagtgcttgtatatctgtacaatgggaacaaaaatactacatacctaatagatttatcacaaggattaaattaggtttttcagatgtgcttggaatataacagacactcagtagatttggttattttgttattgttttatgtttcatttcactttcttcctatggaaaattgtcttaactcttgacaccaagagcatgtggaaattaattttgtgtattctggaaggagctttcagtgtttgggagaaagctgtataagaatccaaatcagattttttttaataaagcatttttttttaagtagagtactgagtttgtagtttaagtttggaaaagctgcccaatgagtatcctgtattgaataactaaaaccagaaaacctttctcaaaatggtgatggttttcagtaaacatctttaggtttactataacacattgcttatctctaagacaaacttttttttcattgtaaactgtttatgaaatgaacaaggcagaaattaggatacaacccatactctctgactgtcaaaactatcaggtgtttatcctactaactactctattttctgatagttaacttttattgaacatttattacatgccacgtgcataagcattacgcttttttcatttgttactttatataaacttttcagcctctgaggctaacgcagttaactaactca

SEQ ID NO: 32702 - DNA, 1044 bp, Homo sapiens
tcaaaaaataaataaataaaatttaaaaactggcaacaaccgaaatgtccttcaacaggcaaatggataaaccaactgatacatacttacaatggaatactactcagcaataaaaaggaatgaacagtcaatacacagaacaatttggatgaaactcaaaggcattaaactgaatgaaagaagttggtctcaaaacaatacatgctatatgattctatttacatgacattctggaaaaggcaaaactatagtgatggagaacctatcaatggttgccagaagttaggagtgagaggagcctgtgactaaaaaggggcagcaccagggagttctgtgggagatggaactgttctgtgttcttgactgtggttattccaatctatacatgtattataattcaactgtctactaaagaaaaggtcatttttaatgaataaataacaataacaacacagcaaattgctgctgaactgtccccacactgaaattgtgctgagaattttctagtttacctgtaagcagcttcactaccatacatttagccaagtttccatgacagcaggcaattagcattcaggagggcctttgagtggtttggcggtaaggcagttgctcagttcagccatctttaccttagacattaagatatccaaaataaatgatttttctgggaaaataaaatttctttctaaaatatttcaattttaactgtaagcattccacaagtatgtggttaggctggtgtatatcaaatgaattaactcttccatttaaaaatacatagagtaaagcttgtgaacaatctctggcttagagagtgttttcaccaaactataagactgtgttacacgtggacatcagataccagcttagctcctccttcttttgctgccttttcctcccctataggaggttgtggctcactggattgctgaaagccgcattgccattgagaagatccgcttgttgactctgaaagctgctcacagcatggacactctgggcagtgctggcgctaagaaagaggtgaggctaccttctccc

SEQ ID NO: 32703 - DNA, 1046 bp, Homo sapiens
ttctatgtgatgaatcagatttattgatttgcaaatgttgaaccaaccttacatcccaaggatatagcctactggatcatggtggataagccttttgatgtgttgctggattctgttttccagtattttgttgaggatcaaagacttaactgtaaaacccaaaactataaaaaccctggaagacaacctacgcaatgccattctggacataggaatgggcaaagatttcatgatgaagatgccaaaagccattacaaaaaaagcaaaaattgatcaatgcaatctaattaaactaacgagcttctgcacggcaaaagaaactatcaacagagtaaataggcaacctacagaattggagaaaatttagcaaactatttgcatctgacaaaagtctaacatccaacatctataaggaacttaaacaaatttacaaaaaaaaaaaaaaaccgttaaaaagtaggccaaagacatgaacagactcttttgaaaagaagacagacatgtggccaacaggcatgtgaaaaaaagctaaaaatcactgatcattagagaaatacaaataaaaaaaaagccacagtgagatactatctaacactagtcagaatggctgttattaaaaaataacagatgctgggctggtgaggttgtggagaaaaaggaaggcttatacactgttggtgggagttcagccattgtggaaaacagtgtgaggattcctcaaagaacttaaaacagaaataccatttgacccagcaattccattactggatatatacgcaaaggtatataagtcattctacgttaaagacacatgcgtgtgtatgttcagtacagcactattcataatagtgaagacatggaatcaacctaaatgctcatcaatgatagactggataaagaaaatgtggtacagaaacaccatggaacattatgcagccgtaaaaagaataagttgatttcttttgtgggaacatggatagagctggaggtcattatccttagccaactaacgcaggaacagaaaactaaataccacattttgtcac

SEQ ID NO: 32704 - DNA, 1046 bp, Homo sapiens; identical to SEQ ID NO: 32703

SEQ ID NO: 32705 - DNA, 1033 bp, Homo sapiens
agaacacatggacatggggaggggaacaacacacaccggggccagttggagggtgggggcaaggagagggagagcattaggacaaatagctaatgcatgcagggcttacaacctagatgacgtgtagataagtgtagcaaaccaccatggcacctgtatacctatgtaacaaacctacacattttgcacttgtatcccggaacttaaaataataaagaagaaaagaaaggaaaataaaaggacaattaaacgtcaaaaaaatggctaagatgtaaggaaggtgcgcagtttcaatcccctgcagatggctagcaagttatcccagcaccatttattgaataagggagtcctttctccattgcttgtttttgtcacctttgtcaatgatcagatggttgtaggtatgtggccccatttctgggctctctgttacattggtctatgtacctgtttttgtaacagtaccatgctgttttggttactgtagccttgtagtatagtttgaagtcaagtaacattatgcctccagctttgttctttttgtttaggagtgccttggctatttgggctctttcttggttccatataaattttaaaatagtttttcctagttctttgaagagtgtcattggtagcttgataggaatagcattaaatctataaattgccccaggcagtatagtcattttaatgatattgattcttcatatccatgagcatggaatgtttttccatttgtttatgtcatctctgatttctttgagcactgttttgtagttctccttgtaaagattttttacctccctggttagctctattcctaggtattttattctttttgtggcaactgtgaatgggattgcattcccgatttggctctcggggagtgctagtgatttttgtttgttgattttgtatcctgagacttcgctgaagttgtttatcagcttaagaagctttagggctgagactggggttttctagatatagaataatgtcttctgcaaacagggatagtttgactttctgtctt

SEQ ID NO: 32706 - DNA, 1033 bp, Homo sapiens; identical to SEQ ID NO: 32705

SEQ ID NO: 32707 - DNA, 1076 bp, Homo sapiens
tgggatcacagcctcatatacgttgacatataaaatattatattagacatataaaatttctcagcttttctagcatgctgatgtctgaaatggtgtaaatgggagaggtggcagttctttcatgctgctttgacttctggttatttttgtgtagcagctttcattgatggggtccattcttggccttgcctaatcatttttcttggatgatatagagtgttacaaaagaattattatcttaatgaatcaggaatgttctctctatttgttttctgacataggtaaagtgggaaggattagaaccttcaaggtgaaatgtcaaactagaaatttccttttataatctgcttgtgttccccttggttttaggagctgggaatcccaagtgcaaaattgcaattgttttgggaagaactcaaaatacttctctctccaggtaattaaacaattctgattgagaaacctgtgtaggaatgagccagtcttcctcctatctaggtaatttacttaaaattcactgtttggactcacaaatcataatgtaagatatgagagtaaatgtcatatatttgtatttcacaagtattttctaacaggtgtttttggaaaacattatagggagtattgctgaacattcttcgctgtggaattttcagtattagaaagtgttgctaaattatcaaagctgtttggattaaattatcagacaaattttttcagacctgtgtaatgaagtgattagatgtttagatcaaaggcaataatcttgaaatgtttaattatatatataagttcccagttaccattgttgagcagtgagaagcttcaatcaaacaactcatttattttcaaatcattgtttctgttccagatcacagcctgcatcagactatgttggtgtacgtcttttacacagttcccattccagtcatcactgcttacatgactacatgaaaacatcaaaaagacaattgtgattctgcttattatctgttttatttttcttcttagcaaactttttctaatacaatttttcttttgactagacacaaacagcacagcatgattcttgttcc

SEQ ID NO: 32708 - DNA, 1029 bp, Homo sapiens
taatgattaaattcatgaatcaatcaactgatatttaagtaacttatcctccacagacataaagtttagcaatggagctggagttctaaattcagatctttagtctattttatcatcttatctcttatatctctttattttatgatgccatctattatagaatcttgatactcttttatagattcaaaagtatctatccctttcctttatttaccccacccccaacaaccataagcttttttgtaaatgggattcctttattgcaaatcggttgtaatgctataatctttacatcttttgaatttacacattgtttttgctaattcagacacatacaaagcccttgaggcataggggatctcaggattgagcagcttcctctggtagcgtgtgtatgaatgctgtgtataaatcatagtgtatgaatcatggtgaaactagctgactggctggccttttcctgtattttcccttttctcctgatagaactaggagagacagtggtaatagggaaatttgacaaaatacgtgaaataatcatgtagcttagagggtaggcagaagcatcactcaccttaggcaacttttcaaagtacttacttgatgcttctttagctctcttctacttctcatattccttagaactgactatgattccattttgctgcttaccataaattggctcctactcttaacctccctaacatagcaatgtcccttgttcttgaagaatctctctccccacaccctcttctcatccctcctcttgtactgtcattttgctatgttgcccagcctggcctccaactcctagactcaaacaatccacccatcctggccaacaaaagtgctgggatgaatctgtaattttgatgaatattgccaaattgtattccatagggatggtattactttgttctctaccaataatgtatagaaatgtctgtttttctaaaatattgtcaatagaatgtgttgttttactaccactttgctttctaaatgacttgtaacaaattcagcacccct

SEQ ID NO: 32709 - DNA, 1029 bp, Homo sapiens; identical to SEQ ID NO: 32708

SEQ ID NO: 32710 - DNA, 1042 bp, Homo sapiens
tgaaagccacaatccaagctccttagcataacacccaaggctcccttcataatgtggtgccatccatggctcctgccacctctccctactctgtgtccacactagagacagtgataggactaatttctcagcagtgggctggcacccaccatgcagcagcatctgtctacatcattgctcattctgttcctttatctaccatacaatttcctgcccttccctggaagggccaattcctactcaataaacgcggatgcgacctccccagaagactttcctgatgtattagcaatctctacatacccctcagagaactgatccattctgtggaaaggatgcgtttcccatactaccttgttcctctaggttttaagttcctcaaagcatgacctatttgatttgtgtttgtaaataaaatcttgttaatgtgcctggcacaaagtagcttctcagtaaatatttgtcaaattaaagcttttgccaacaggtataaagctgttactctagaatggatagatagtatgccagaaatcttctatgtcaacattgttattgcactatgttggctactagcaccccgtagtattaagataagcttgcacagaattcgtaagttttggaatgtataaaataatgactttcagtgtttttattatagtgctgaattttgttttcctttttcttatcctttctattttccttgggttctttttgtcctctgaagtatctcaaatattcttatagaatcaataatgaaaatattatttttaaaacagtgtgccaacttatagtacattttcaaaagaaatgttcttatgtttgctaactttttttgaatgaatatagcaaagaaaagaaggctctgaagaaagacaccacatagaagaattgctttcattatgtaaaaaccgggtgccaacttttttaaatgactctttttatcattaaagttacttaaaaagttccaatctggaagactactctggtcttcatgttcttatgcattaattattaacacagtatgaaccttgttcttcctttc

SEQ ID NO: 32711 - DNA, 1042 bp, Homo sapiens; identical to SEQ ID NO: 32710

SEQ ID NO: 32712 - DNA, 1050 bp, Homo sapiens
ggcaagcaccaccacgcttggctaatttttgtattttttttttgtaaagatggggctttgccatgttgcccaagctggtctcaaattcctgggctcaagcaatccgcctgccttggcctcccaaattgttgggattacaggcgtgagccactgcacccggccaatctgatgtcttttattaggttggcgcaaaagtaattgcagtttttgttaaaagtaatggcaaaatccacaattacctttgcactaacataataaaagcttctatacagagaaaatcacataaaaaagataaatgacaaaaatatttgcaaatacacattcttaatatacaagacaaaaaagagcaacaactattagcagataattcacagaagaatgtaagtgttcaacctttttcacaaataaaaagaaaaattaaatgcctgttttttacccaccagaatgacagattacagagtttgatgatactcaaagttatcaaaggtatgggtgaaccaggtactcctaaactatgatacaaatgtataatccttttgcaggagaaatttagtaaatatttcgtaaattcagaaattctactttaaaaaatgtgtactataggccgtgtgcagtggctcatgcctgtaactcctagcactttagaaggtcgatatgggcagactgctcgagcccaggagttcaagaccagcctggaaaacaaggagactttgtttctacaaaaaatacaaaaacattagctgggcgtggtggtgggtgcttgtagtcacagctacctgggaggctgaggtaggaggatcacttgaacctggaagactgcagttagccgagattgtgcctttgtgcctctgcactccagcctgggtgacagagtgaaaccctgtttaaaaaaaaaaaaaaaagtactatagaaaactctaggctgggcacagtggctcacgcctgtaatcccaacactttgggaggctgaggtgggcagattacttgagctcaggagttcaagaacagcctgagcaacatggtgaaaccttgtctctacaaaaaatacaa

SEQ ID NO: 32713 - DNA, 1050 bp, Homo sapiens
ataaaataaatttagttaacattttgtgttatgttcaaatgtgaagaaagccttcccctcaaatacacaataaaagttattttaatttttttaagttgctgataaaatctaaatgtagcatatttctttaatttaaaatgctgtgtgcatttttatggacctgatgtttatgtgtttacctatggggttgataaatatctgcaaattaattatattctattatttcttgaagcactttgagatatagtttactttctaaaatataatcattttcatgaaatagtttttaatgaattttagaatgtgttgccatgtggaaatatttgtatttgtaatcatcaagttaatttagtgtgatgcttaaaataatagttatctagattaaatgggaaaaaaggaagattttttaggaccctcatatattgtttcagaatcaaggattgcacctacttagtgattgcttttcatttttcatgtttgctgcagtacggatttgcccttttacgtagacgggctttacagttagaagagcttacattaggtaaggacacacctgataatgctcggaccctcaatgaactgggtgttctctactatcttcaaaataacctggagtgagtaccatggggttaataatgaaaataattaaccattttctctttgatgcaatgctgttttacatttttgtcaagtctaaagctagaaaaaaaatgataaaaaccacgcaaaatttcatgtatgatgttatataatgagcatacacatacctaaagaccatggcattttctctactgtgtttcttttcacactcttttttttttttttgagacggagtctcgctctgttgcccaggctggagtgcagtggtgtgatctcggctcactgcaacctccacctcccattcaagctattctcctgcctcagcctcctgagtaactgggactacaggcgcatgccaccacgcccgactaattttttgcatttttagtagagacagggtttcactgtgttagccaggatggtctcgatctcctgacctcgtgatctgcc

SEQ ID NO: 32714 - DNA, 1771 bp, Homo sapiens
gggggaggttagatagatctgggatgcaagggaaaagaaagagccaggatgattctggagtttctgacttgagaaattaattaatgtagcttcatgaactgaaataggaaacacaaaggacaggcaggttgtggggaaaaggtgatgagtttagtttttaatcatggttagtttgagtagctccacgtaacgatgtctagtaggcagttaaatttatagatgaggaaaatagagaaagggccgggctgggaataatagacacctgttattttgaaatgcaagctcactttaatggttctttaaaaagtagtagagtggccgggcatggtagctcacatctgtaatcccagcacttcgggaggccagggcgggtggatcacctgaggtcaggagttcaagaccaacctggccaacatggtgaaacccatctctaccaaaaatacaaaaattagccaggcatggtggcgggtgcttgtaatcccatctactcgggaggctaaggcagaagaatcgcttgaacccaggaggtggaggttgtagtgagctgagattgcaccactgcactgcagcctggacgacaagagtgaaactcccatctcaaaaaacaaacaaatggctgggcgcagtggctcatgcctgtaatcccaacactttgggaggccgaggcgggtggatcgggaggtcaggagttcaagaccagcctggccaacagtgaaaccccgcctctactagaaatataaaaaattagccaggcgtggtggtgggcgcctgtaatcctagctacttgggaggctgagacaggagaatcacttgaacctgggaggcagaggttgcagtgagccgagatggcactactgcacaccagcctaggcaacagtacgagactctgcctcaaaaaaaaaaaaaagtagagcaattggatcccatggagcagtgtttctcaacctgtttttgctcctataaggagccattttagacattttatttgtaattgcctcccccaagaaattttaataccacacacatattgtatatcagcttgtgtatatagatatatgtgtctatgtgtactttatacataaaaagagtaagttttttcactcccccacaaatgcaattttcagtaccatatcaagaatgtatattgtaatagttaaatttcagttgcattacaagtgcttgtggacaataattgtgtctgatgccactcctcatagatactcatacctatgcttagttttactgatagtatggaacatagaactagaaatgttttaccatgtaactatctaatgtatatactgtttattttataacactgtttgttgtgattcattgctcaaagtaatgatacacatattagaataagatatattaattacttaatatgattaatagacattagttttgcttattttacaaaagcagtataaagtgttaattcctgtggtggattttaaattgtgttatgggtaattacagttcttgttgtattattaaaatttcatttttcttttctttacataaaaggttgtggcctacacttcatcttgatcccttaagtccaaaagatgcaaaatctattataattgcagaatgccactctgtagacattaaattgagtaaagagcaggtgtgtatttttcattttgatgcaatcttttactctctcatctttcctatgaaacatcttatgtgagacttaaaattcaatataggggatctgttataaggaaaactggagtttagtaattactttggtaaatgtatt

SEQ ID NO: 32715 - DNA, 1103 bp, Homo sapiens
gcagaatgaatggcagcaagtgaaagtgaatgtacttaccatcattagtgcttgaaggataacatattttcagtaacctaatataaaaactgaatatgaccacagagatacttgagatcaagaaatcacatcttagtaattcaattcttatagcatatttcctagccattagtactttataactattcaccagccagatacaaccaaaatgttgtgtaacatttttcagaaaacaaattccatgggattcaaatattcctttaattttatttttataaaaagaggtattcatttctattattttaatatttttatttctttgtttttaaattagtgatttttttgtagttatcagtttattcttgtaggtattatacaaaggctgtatgtttgaacttgccctcccaaaagtaggtgaagcccactttgggcctgggtgaccccgctgtaagatctttattttcttcattcatttttgtgtggttgttctttgtgtttaggacatactgggttttgagaacacagacttggagactaaggatttgggcagtgaggattccattccagaagaagatgattttggtgatgttctgtgggacatacatgatgaacaagagcaaatggaaacttttcagcaggcttctaattcagcccatgagttgggatttgagaaagtaagtgcttggagtattattgcaacaaagatctgtcaccacttaaaggctgtattatgattgtattttcatctaaatatagttaaggtttatgattatattagttgtctaatctcatggcttgattatccatgttgagatgtgcttaggtttgtgtcataagaaagatatgtgagattcaaatgtgcttataaagaccgaacatttttagttatggactagaatttatcaaccacatgtttattatgctaccatctgcaactcactcagaccaggattaggatagctaggaaacttgataaggatagtaaggctgaggccaggtgcagtggctcacgcatgtaatctcaacactttgggaggctgagacaagcagattgctttaagcccaggagtttgaaactagcctgagcaacatggcaaaacctt

SEQ ID NO: 32716 - DNA, 1022 bp, Homo sapiens
ccctcctaaggttgttgtgaagataaattagctaatatgtgttaaatatttagaatagttcctgtcacataagcagtataaaagtatttaccaccacttccttctgatattatggtttttctcattgttcttaaatgatttttatctagatcattgatcactcaggagatcctgcagaaggagtatataaaacttatatttgtgtagaaaagattattaaacaggtaaatatgcattctctgtaagttttcatctaaaatattttaagatcactttctatgaaattgatttttccagagaaaaccacttgcttgtctttttgaacacagtacctgaggaaggcgctgttgtttctgttgggagtccatcctgtggtatgttcttagtattactaggaccatgtattaatatctttatctctcatctatctcagaggactatttgatgcttcaatacctaagtgtaaaacatattacaaaagtgctagccaaaaactatttaagagaaagtgttcattttattcaatagggaggctcctctgtgaattttgaatttttatatattaggaaagtctctctcaggttttccccccatgttatccctaacagaagagggggatgaaagcatgcctccaggggggtgagaacatggaccagggaggggccttgagctggaagtctctatgaagtttcatgtgctatcttgaaaatttatgtgagttatatattctgcctgatattatgtctatgtttgtgtttaatataaaaaaattttaaattatatattagaaaaaaatagtaatagtgattatttattattcccctctccctcaaacagaatgggcgcagtgggaagatgtaccatgtttagcctgtggttgcccacaccttctgacacctcccccagccaaccaaaaaccctatttgagaagtaggaagcttgaagatttattattagagaaaaagagtgagccccaaaatgatatgacctctggcaacacattttgtatggtgctctctagt

SEQ ID NO: 32717 - DNA, 1040 bp, Homo sapiens
tgtttcataggtcatatgatcaacaccttaatttttagcttattttaatcagagtttggcaaatatagcccaagggccaaatctagccaggagtttgcttttgtaaataaagttttattggaacacagccacattcattcattcatatatatataaatttttttttcttttttttttgagacagagtcttgctctgtcgtccaggctggagtgcagtggcgcaatctcggctcactgcaagctccacctcccaggttcacaccattctcctgcctcagcctcctgagtagctgggactataggcgcccaccaccacgcctggctaattttttgtatttttggtagagatggggtttcactgtgctagccaggatggtctcaatctcctaaccttgtgatccccctgccttggcctcccaaagtgctgggattacaggcgtaggccaacacacctggcccattcgtgtattttctacagctgccttcatactataatagcaaagttgaatctttacaacagaaaccatgtgtcctacaaaacctgagttgtttactatctggccttttacagaaaaagttgataacccctaatttcaataatcaacattaaccttcattcttttctttctttggatacaaactgagaggtatttgaactatgtattttacatataaagttcatgtacttgatcacttgtgtaggtgttgaatcataatttacattttttgaggagcttactatttaaatagacccagtaaagtgaacaatgttcttataatgtgaatataatcatgctaatgaatcttgtctgcaagtaaagattttttttcaccagttagatatagagataaaggacaaaataagtttaataagaggctaatttttctttctagatttactgtctaaatttaacctttccaaagcattttgcttttttaattgtggaccaactctgactttaactgtgtatagatatatgtaaggccttaagtttcaccagtttccctgtagcataacccattgtagacccttaagactt

SEQ ID NO: 32718 - DNA, 1040 bp, Homo sapiens; identical to SEQ ID NO: 32717

SEQ ID NO: 32719 - DNA, 1061 bp, Homo sapiens
cctttcccagaaggtacaacctaagatcacttctcaaatcccattagtcagaactataactgggaagactggatagtgtaatcagcagccaggcagacatgtgtccaactaaaatgtagtgttctgttactgaagaaagaagaggagaatggatattggagttactagtctctgcaatgttatttctttacataatgatgtattctttgcaactatcatttagaatacttgccttatagttcactgagtggtttccagtatagccttgtgaactattcaaaaagtatttgttttataattaaacaaatgaaacatgttttctggaaataaaagcttgaaatcacagagtgaaagggtttacatattctaagaaaatgttaaagtgtgattgatactgaaaaaagaaaaatattctattttaaaatgcagtggaaaaatgtagtcactctcccatttgtaatgaactgtaagtatattctcacaaatggatgcattttggagtaaaatatggtaactgacagttccttcttaattttcattgtagtatcattggaatctgaccaacatcctggaatttttattgctaacttttaaggaaaaaaaatgaaggccgggcacggtggcttatgcctgtaataccagcactttgggaggccaaggcgggcggatcacgaggtcaaaagatcaagaccatcctggccaacatggtgaaaccccgtctctactaaatacaaaaattagctgggcatggtggtgcgtgcctgtagtcccagctactcgggaggctgaggcaggaaaatcacttgaacccaggaggtggaggttgcagtgagccaagatcgcgccaccgcactccagtgtggcaacagagccagactcatctcaaaaaaaaaaaaaaaaaaaaaaaaagattcttaatggccaagagtagctgagaaaatgctcttttataccccaacacaagtcttagtgattatttcagtattgacatactcaaatgtacagtgtttcaaaactattgtaattgtcttggcaagttagaaacaaattcctttctaggt

SEQ ID NO: 32720 - DNA, 1061 bp, Homo sapiens; identical to SEQ ID NO: 32719

SEQ ID NO: 32721 - DNA, 1070 bp, Homo sapiens
ccaggactagtgtcctggtaagaagagggaggcacaccaggagtttgccggcacggaggaaaagccctgtgaggacacggggagggcagctatctgtttacacaccaggaagaaatgtctcaccagataccaaccctggccgtctcctggattttggatttccaatctccagaactgtgagaaaataaatttctgtttaagccactcagcttgtgatgttcctttgtggcagcctgagcagaccagtaacaatattaacagtaataaggttcttactttggggcctgagatgcctgggaatggaacaggctgttttgtatatgagcatttttagggtagagttcataattctagagtttggatctgtgactttccacccaaaagtcacaaaccactgctctaatgcaaacctattatttcacatttacacctctcacctagaagtgctttaatacaggctgctttgtatcagggcttggtttccttctgacctttcaagacataaaaatcattactagcttgaggccatgcaaaaataagcagtgggccatagttgactgttccttattttctatccctaaaaagattttaaaatctagatctgtcaacaagcaaggcacccagctcaattttttttttcttttgagacggagcctcgctcttgttgcccaggctggagtacagtggcatgatctcagctcactgcaacctctgcctcctgggttcaagccatgctcctgcctcagcctcctgagtagctgggattacagacgtgtgccaccacgcccagctaacttttctatttttgtagagatggggtttcgccatgttggccaggctggtctcaaacttctgacctcaagtgatctgcccgcctcagcctctcaaagtgctgggattacaggtgtgagccaccgcgccctgccactcagctccttttctaccatcctgagtagcagtctatggcagacatacttgacaacaactcaggcataccctgggaagtgaccctgtggtctaagaagaatgtatgtttggagttccaagttaaggaatccaggagtggccag

SEQ ID NO: 32722 - DNA, 1033 bp, Homo sapiens
ggctgaggcaggagaatcgcttgaacccgggaggcggaggttgcggtgagctgagatcgcgccattgcactccagcctgggcaacaagagcgaaactccatctcaaaaaaaaaaaaaaaaagaattgcaggccaggcacggtggctcatgcttgtaatcccaccactttgggaggccaaggtgggtggactgcttgaacccagaagttcaagaccagcctggacaacatggcgaaaccccatctctgcaaaaaatagcaaaaaattagccgggcatgctgtttgatgcttgtagtcccagctacttgggaggctgaggcatgagaattacttgaactcaggaggcagaggttgcagtgagctgaaatcatgccactgcaactccagcctgggtgacagaatgagaccctgtctcaaaaaaaataaatgaattgcttaacatttctgatatttgttatttagaatattgccctattagattaaaacatactgttattggaactctgtattgcattagcctttattatgctaaacctaaacacctaatactacatgcgttaccagaattctctataaatacacctaatttcattttaaggacaaactagaatccgttaggaatgtaattttgatgtaaaccgttcaattccaaatgactttttgaaaggcagattcaaacagtgaaggagagagtgctcaacttggacacaaaatcccttaaattttcatcagattttcttcaaaatggagttgagggtatccctgctgctagaggattggtcctacagggttttcagctttgagctagttcacagcttaggacaatacaaattctacacagagaaataggtagcattatgatgtaaactgtccccctcccaccaaacaaaaaccacatgggcctgtctttatcagagctattttattttagctgaatcattttgtagattgtagtacgtttccctgaattttattactcagaatcctttgaaataggccaggcacagtggctcacacttgtaatcccagcactt

SEQ ID NO: 32723 - DNA, 1036 bp, Homo sapiens
tttctttatatgtggttttttgtaacgaattttctttactagatacagcgcttttcctattttctgtttcattttatgtcagtttttaataactggtgtttttcaaataatatatccatttcatcttatcaaatttgttggcataaagttcttcataatattcttattatccttttagtgtaataagtttattcctggctgggcacggtagcacacgcctgtaatctcaacagtttaggaggctgaggtgggcagatcacttgaggtcaggggttcgagaccagcctggccaacatagcgaaaccctgtctctactaaaaatacaaaaaaattagcggggtgtggtggcgtgtgcctgtagtcccagccactcgggaggctgaggcaggagaatcgcttgaacctgggaggcagaggttgcagtgagacgagatcacgccactgcactccagcttgggcaacagagcaagactccgtttcaaaataaataaataaataaataaataaataagtttattcctgatattgtcaacttgtgttcatttataactggcttatttaggagtctgttgtttagttcctaaatataagaggatttttttttctatctttttaatttgtgattgcccattgaattccattgtaatcacagaaaatactctataattttaattcttttaaagttattgagacttgttttatcacccagcttcatctatcttaatgaacatatcatatatgtgaaagattttatattctgcagctgttgggtgttgtgttctaaaaatatcaaataggttaatatggttgataatgttgatcagattttctgtgtatgtgggtttttttgtttgtttagttatatcaattactgatactaaaatctccagctgtttgtggaattgtctgttttttctctttaattttgtcagcttttaccccatttatttcaaactttgttgctagttgtttacccatatataatttctttgattttcacatattgatcctttgttataacacgtatctctgggct

SEQ ID NO: 32724 - DNA, 1048 bp, Homo sapiens
tactgactttataaggattaagtgatggtaaatcttagtggatcaccaagcatcttagaaagtctataataaagtattttataattaattcttaaaatggcttttgatttaagggagttttttgttttttttttgagatgcagtcttgctctgtcaccaggctggagtgcagtggcgtggtcttggctcactgcaacctctgccttctgggttcaagtgattctcctgcctcagcctcccaagtagctgggattacaggcacgtgccaccatgcccagctaatttttctatttttagtagagatggggtttctccatgttggccaggctgctcttgaactcctgaccttgtgatccacccacctcagcctcccaaagtgctgggattacaggcatgagccaccgcgcccggccctaggggagctttttgaatgataggtttattatgtagtatctcttaggcttttgggtgcggtctgtttgaaaagagatcctactgctaaaataaacggaaagaactgctgtagaacatgttagtttattatgagtctcttaataacttcagagttttactgatggtttataagaacttagtatttctactttgtttttatagtagtagtctaaaattctactggatttcttcctccttcccatcttaccaacaacatatagacgtcgaaaaaagttatttttttctcctagatgtgactgcaaaataattgtacttgcaaaaaataagaaggtttttacttataaaacaaactttacattttaacaaaactgtttaaaaaactttccggaatgttttatagtattgcctcacctttaattccatctaagcatattcattcccatgagtatatctgtaaattataagtatactattaccctttattccttatattatgaaaccaagggtcaaagagactataaaactagaacccagctctcctgacttactgaccagtaaactccctagacaaaactatgcttccttagtgcgaataagtacaattttaatacttatgtttagtaggagtcataag

SEQ ID NO: 32725 - DNA, 1050 bp, Homo sapiens
ggaagttgtttattgccctatatttgtaagaaaagttaatccatagacaatatgtaatcatgattattttatctcccataaatttatacgttttcaaaatatgtaggtcgtactctttcagatgtcagcaatatttccaacataaatgcaagttgcgtaagtgaatcaatatgtaattcacttaacagcaaactggagcctacacttgaaaatctagaaaatctggatgtcagtgcatttcaagcacctgaagatttattagatggttgtcgggtacgtctttattatataatacatgcagtagatgatatacattagcatttcctagcctgactttgaagacccttcagagttgggcttgctccttactatctatgtaaaccctccactctagctaagtagatgcacttactagaccatgtccatcctttggctgcgagagtccctctgcctgcaaggtatcttcctctgttatcttttaaaagttcatttcaggttttaactcttctctgaaccctcctaactacattaatcttttcatctgctatatttcgagagcacttagtttctgaacaacttattggattttttttttttaatttttttgagttagggtctcactctgttgcccaggctgggatgcagtggcacaatcataacttcctgtaaccttgaactcctgggcatcagccacccctcagtctcccgagcagttagaactacaggcatgtgccactacacctggctaatttttaaaatttttttgtagagacaaggtctcactatgttgcccaggtttggactttaaactatcatccaagtgtttacagtgtattagacactgtgctaatcattttatgtgtgttaatatatatataaaatcgcatttaagtcccacaaataactctaaaatggatattatcttgagggtaagacttagagaattaaaattcttgttcagagtcacacagagagacattaagtggccagttatctactccaaagtctgtattcctcaccattagagccactgctttgtttggtatttct

SEQ ID NO: 32726 - DNA, 1022 bp, Homo sapiens
caagggtttagcattagctacagagtaggaaatgctttggtgataaagttctcagctgtaaatatttctgaaataattgagaaaacgagtttggcaattctgtagcttttatgttgcattatccttcaacaccattcccatatgttaagatagataataaattagtcattttggcagttgcattccttccaaaagatggcatatgtaaggttgaatataaacatatgcaagtcatcagctgagatgtgatcatttaataaatgctaattgagcccattttacgtatctgacttgaggtaggcattaggtatatgtagtaagcaaaacaagatagtcacttccctcatggagcttagagcctatttcaaggggcacacttcagtttcccctgcaactagataaacaaccacaagaccaaacaccacagaattgtattggcatacgaattatatcggcacttttctgggcttgttttcaacaccatccagcatatcccaaatatgtctccatgtcagcaactctcattcccaatgtgattacttcatcagcacacctccctagcatggcaacagaataatgatatttttgttggtattttgccaaaaatcattgcttttacttgtatagaataatggaaagattaaaaagttcatttatctaataggcaaccaaattacctttgggtttttaagtagagattcagacttatcattttggaaaatatactatgaccagcaagggctagagttaaggaaatatatatttttcccttaaaatggttttgagagactgtatctgaaacaattactttgttttagagacatgttattgaactaggtgaacaattagtgtaattctgttttggtggttctcctttgtaaaaaaaagattataaatcctaaaaaatgagggaagcaatagtgatatttgtgttgtttttcattattcttctggtaaatttaatatgttcttttttaaccatttgattcccacagaaaaataactagatatactgatataaa

SEQ ID NO: 32727 - DNA, 1061 bp, Homo sapiens
aacctcctttcactgactttcctgtctcagttaatggcattccaaccttaggtgattagaccaaaaacttggagacaatagaaaataagctttaaaaagactttttaaaatctgctttactgacatatagtttatgaacaatgaaaagtattaattttaagcctacttgctgttcaatgagttttgacaaatgtatacaaccacacaaccaccattttaatcgagatatagaacatttccatgaccaccagaaaatttcttgatacttccttccagacaatactatccccacctcctcactccaccctccttccttgtgcaagcaaccaataagccttatttcactatagattagcttaacctgttctagaattttatataatcggggtcatataatacattatgtatctagtttttcttgcttagcatgtttttgaaattcattcgtgtggctatgtgtataagtagttcagtccttttcattgcttggtagtatttcattggataaatagatcataatttgtttttctgttcatttattttttggcatttaggcaaaatatgtttttctgttcatttgttttttggcatttgtttataatgtttttactattgtgaataaaactgcttaaaaattaagcagtgcacatttgtgcacaagtctttctgtggacctatgttttcttttctcttggggaaatacttaggagcaaaacttgctggatcacagggtatgtgtacatttaactttgtaagaaactgcctatttccaaagtcatgccatttaatgcttcccactggtatgggagaagtcagttgctccgtatcattttgaaaacttggcatcattagtgtttttaaatcattgtcttgaggtttaacttacatgcaatagtatccatatatttttatttttatttattttttgagacagagtctcgctctggtgcccaggctggagtgcagtagtgcaatctcagttcactgaaacctcagcctcctgggttcaagcaattctcatgcctcagcctcccgagtagctgggattacagatgcacacc

SEQ ID NO: 32728 - DNA, 1077 bp, Homo sapiens
gtgaacacttcttatgccaaatggctcacagctctccctctgcaaacgccctcaacaagactgagaattagaggcagttcttgtgccaagccccacagaacctacccttcctgtaccttctttcttcactatagcatctcctgctttcattcactcttcttagagatccagaccttccccttcatcctccttttcattacaagatgggcagaatgaaaaacagccatttgtactttgaaacattttcatgaagtttgttagctctaccagtggatttttaatcctgtggtagtggaataaaagatttgacttcacccagcaaacctaatggataaaatgtctttaactctgctaaatgaatttcagtcacaaagaaagaaacagaagtaatctttggtgagttaaatagattgggcaacagtgtttaatggtatgcccaagttaatccttagtgtaaacctgtagtcattttagtattcatgggagttggtggaaaggaagctctgtaatctcccatgtgatctcccttgctcctctggagagaaagtctagtggtccaggggaatgcaaagggtattgaatcagatgaagatctgatatttttctccgtgtacttgctctttgtccttggcaggttacctaaactttctctcccagcgtggatttccttgcatataaagtggaactcctaatcgctgccacttgagcggttatagagaggttgcctcttagaggtttactgatctttaagtcctcattttcccacctcctcagggtcagtgctttccatgttagtaactcctgcaaatatgaggggagcgcacagctttgccacttgtgcattggtgattgtgccacggttttataactggggtttaaaaagtgatacatgctcaattaagacaatttttaggaaatacagaaaacaaagctgaaattatctatagtcttacaacttaaagacaactcttaactctttgcatatttccatgcagacctttattatttttctccatttttataattatcttgcaaatgggaattttttatcttactttcttgtaagataagctttta

SEQ ID NO: 32729 - DNA, 1031 bp, Homo sapiens
tttaaaagcttggtattggtcctgttcacagaactgtaacaaaaacttctaccttttgagccagaagcagcttaaatgtaacatcataatgtgtgacagtatcaacattagagcaaatttttttaaagcactatatagagtcaacataatttgtatgtctactgaaaatttgatcacatatgtttaaaaaaagaactgtggttatctctgttggaagatgtttataggcttctgaaaaaatatagtttctgtatactttagacagttccttgagttctgctgaaaaataaggtgactacccagagccttacttttaaatttagttatattttggttcatattcagaaggatttgaggacctaaaaagaaggcagccacagtaagataaataaaatggtaatgaaaaagaaactgagttttttggcattgtggtggtaaaaaagaaaacaaatgagccagcagtaaggagaacaaatatttttactgtgactgaacataaaacacctcctagcttctcggcaaccaagggtgaaggaaacactaaaagttgataatctcagtagcagaagggaaagaaacagttggaatattgtcctttttggcagtgttgaaagtgcttaatggtctattacactgactctagggagaagggccaaaggtgtttaatcctagtatataatgttaacctattacttagatacctagccaatgttcttaccccagtgaaaggtttgcatcacttcagcacagaagtgagtagcagggataaatgtagacaaagccaggattttcccaagaaacggttttatattcactgtagccttaaagatgtcttggctgaaaaatgctcagagcaagcatttgcagtgttgtgtctcatgcagttttagattgtaaggttttgcagcatcccatcaggatgaattagcagtctcaggaggtccttagggaattgaatgacattacatactaaattggggttatttgatactgagcattcagtccttgaggaaagtcttgtaaaggtaggt

SEQ ID NO: 32730 - DNA, 1021 bp, Homo sapiens
caggactgtctggatccaaaacttgtactccctggccttcccttgaagctactttttaaggctctgcggtagagaggaaagttcatttttgtcttttcgtcatttctctgaggctaagcctagaaactcataaatgccattgtggatacctcattactgagctccaatgctcctggctatatcattagtttatttagtataattcaggaaaattttcatatacttagtttagatatggtgtttctgaaagcaagttaagatgtgtaatagtcacaaaaaacttttaacagtcgttaaaaccaaagatttgggtctttttactctagggctacagtaatgttgatcacatatgaccttgttatttttgttttatgttatattgtgccagaaagttttgtactataattttatgaatgttgtatgatctcattaattattacttttccttttaggtacttttgggcgtattttccatgggattttaatagatgaaaaagatccaaataaagaaaaacaagcatttgtcaaaacagttaaaggtaggatcttttttccatagtatttccatgatgctcttctgtctcaggtggctcctgccagcaaaattctgtctcagtttcccaatgtgtgccagaccttttaaatcagtcagtgttaatttagctgaaaacaaaaattgtcttatatgagcctaattgttttggaaatttgggttgttctcattaagtatagaaaaacagaagtctgttaaattaagacataagacatttcttagatattactcagttaattgcaagtcaaactgcatccacttgatttcattgttactatgtttagtgttggtatacttttgcaggtatagccatagttggaattgctggcctaagggtgtgtacatttaaaattttaatagagcccaggtgcagtggctcatgcctgtaatcccggcactttgggaggccgaggtggccagatcacctgaggtcaggagttcgagaccagcctggccagcatggtgaaa

SEQ ID NO: 32731 - DNA, 1856 bp, Homo sapiens
cacctggccaatactcctttctaagctccgagcatgttggcacatttgatttggtttgctctttctttatctgtaggccatttgatattgggccatcattgaaagaggcctgtctttcttcttcttttctaaaaagcaatctaattgaatgacatgggctctttttttgagagatgatccgtagttccctaacatatttgtgtgtgaagtttaggacaattagctgaggtgtctgagcactagtacctacatttctgaataattttgataagatgaactcgcttaatgattttggagatagaaatgaaagaaaaaatagagctctataggagttagattaaaatatcagtattggaacatcatgaattattgtgatctccgtaaggattttaggctggttttaatggctatgtgcattttgtatgtatggaaaaaggaaatttctcattgaaactgacttgtcaaatatttctctcaaaaattgtttgcagcattagtgccagcagtagttcccaagggctgtctcagccatccacccagacgactcagtatctgagagcagacacgcccaacaatgcaactcctatcaccagtaagagttaatttaattctaaagccagtttactcaagttgtctatgctgcttcccagtggtcttgcatggttagtgtacttgtgggacatgttgtgtaaatcgtatctaaagtatgcaaaattaggtatgctcttcaacttttgctttctagagcattgaatgaaacattctaaaattgaggtatcaaaaatgaaatttaagtttgctagaattggtgtggctttcgggagatttccatagatttattatactaaaagggctactaagtcacttctatagaaattcaaaaggaagatttttcaggtaactatatggaattaactattgagctgcataaagacagagactttagactgtaaggaattgtttgatggtcttatgggccatggtgaagactttacattgttttttaatcataataggaagttagctaccactggaaagttgagaatgtcggatctgatttccttttttggactggcatttattctttagtaaaataagattaagatatctgtcctctacccagtgccctattgtggttttccagtactgtctcccatgaaaaagaaccaggattttttggagaaatggctgattccaggtctgagttaggaagtgaacaagataagcctgggacatgttgctgagtcagatatcaaggaaatagctaagacttgaagagcttccactggctaaagataggaccatttgatcatcaaaatgaataatgactataatgaattaaaacgtaaaatgtgtaaaaatccacaaatttgtaataatacattatttaacaaaattgttcattatgagaggtgactaaggctccagtgaataccttactctaccaactgactacatgaactgtatttcaggttaaccagatggtgctggtggatgagagaaaatttttctttacagatgattctcagctaataaatgtggaagaaattatataattagaaaatcacatgtgcaactcctgataaaatagttgattcagaaaaagatcatcagtgattgaaaggaaaatggggaactctgccattgagggatcaggctgtcaccacctgaatacactgatgaactcagcattactaaaagtaggggacctaggtatttcgtacccaaggatatgatgtaccattcatggagcattcttttctgtccctgctgcaccccctacaagttaacctggatctgatcaaggttatagacctgacttacagtttacaggaaatactacttgaagaagtaga

SEQ ID NO: 32732 - DNA, 1198 bp, Homo sapiens
ccagcactctgaccagatgatagcctaatgaatctttattatagtctctttgagttgcaaagtatcttcgcagagttgctggagaaacagggctaactgcagcatcacaagaagaagtatcaggttggtgcagtaattgcagtttttgtcattaaaagcaatagcattaaaagcaatgacaaaaactgcaatttgcaattacttttgcaccaatctaatagataacctaaaatgatggacatcttcagggaaggcatgctgggggggcatttcattaggcaaacatgtatcttgagatctatggttgtgctgagcagaatggtttgcatattataagtgctctccaaatgtttattgcaggacatttctatcttaatttttgctatgactttctacagatgtttggttacaatagcagatagtagtatattgtattattagccatagaaaggctacataaagacttacagtcctcattgcctggatgttatatatttacatttttcagatttgtgtatgggctcttgaaattgataaacattcatatataaatgttatagattacatagcagccgtgtgtgtgtgtgtgtgtgtgtgtgtgtgtgtgtgtgtgtgtgtgttttgtttcagagacagggtctcactatgttgcccaggctggcgtcaaactcctggactaaagtgatctgcctaacagccttccaaatagctgcagctacaggcttcacaccgcactcagctttattatgtatttttttaaatcaccagtttttgaaaatacagaattattatgtgggaagtggtcagttaaaagattttgcatattaaggaaagttggagacttgattgggcactgctgatcctgtagctaagagaggcattgaaagacctatcctgctatctggtttcacccttcatgctgaatttctatgtttcacgtctccactgctgcaaaattataagaactaaggcagtgagaccgaaatgtacccacgagacaaggtttctccccactgaaaagacaaaactacatgcttgagcagcattactttgcagtaatcttgaacacaaggtttacaattatttgaacctatcatcttcttggtgtcctgtattatttagagaatatggtgtagtgtttcaagtactagagatttcccagaagttggatgaaagggagggattggggaagtagaag

SEQ ID NO: 32733 - DNA, 1049 bp, Homo sapiens
ctagatggcaggttttatggaagagtggtggtcctgttgtggacttaaaatagagggtggcttacttggttgaatttttatccaattgaaaattcttaggactgtttctgacaatttgcatttttttatagctagattatttgtacatatgaaaggctcatccattgattaatgagccaattaatgaagtcaagctgatagtatccttcttgttatcacaggtccattttgtttatttttgtctattttacaggttgaatataagctgggattccaagtggacaatgttttggcaatggatatgccccaggtcaacatttctgttcagggggaagttccacgcactttatcaggtaagtaagagtcttcaaagacagagttaacatactttttcaactgcatcccctatggccccaaaacagaagtttactgatgtgtagtgtgtattacttgataggcataagatgtatgagtactgtgaaaagtaatttttgtaaatatttgcactgtgttcttaaaccattctctcttttctgtccttctggaactctctgtgctccgccctccctgtctctttttctgcattgctggtacttacctccacatgagtccctgtgcctgatcttgtttccctttgattaggcaccacatttcaccctgtggcccagatgatctttgcacggtcatgtttgaccctgtgacgtgaagcccatcagtgctctccactcccatcaactgaacattccagactcaccaccttgtgtcctggatcctttaccatctgcccctgcctgcctgtctagccttgttgctgcacttgccccagagttgtagcagttccagactacatgcagttctgatcttcaagcctttgcatgtgctggtctcagtatttgggatcatcttttcctctttctgctcgtgaactcctttctattcatcctactcattctgcaagactcaagatctgcactgtcttttttctgccaccttctcttctttcatttgttaacttctattcttcctaccccttagaaccttatatttaa

SEQ ID NO: 32734 - DNA, 1040 bp, Homo sapiens
aatgaaaagaatagatgctctaatagatctgccggggtgttgaaaagaaaggcagaaatggggttcctctgtactagtggaaagggacaaaaacattgagtgtgaggaggtggggaaggcctgtaaggttggaataagacgagggaaaagagggtcagtgaggaagggattgctgagtagaactaagggcctcccctgagactggaggtcattgttgtgtaagagctccttttctgtaggatggatttccttcagcagtgctgagcagcaggagtagagtaagaaggggtggtcaggatgctagagctgccctttgagggtttggaaggagtcaaccagctgaaggtgccaatatgactgtcagtaatgttgccttctttagggcttgggctgtggagaacatgaaactaggtgttcacggctatactggagagaagggaagtggctttaactggctgctgcatcctgctatgaacacagcacctggctcataaatgtgcctcataaatgttggctgacttggagtgatggaatcagagaactagttttgtaggaatcagaggtggtgatgggatctttgatagaatggcatttttgcatttgttttggtagtgaagtaattctttagcgtgtcaggatattgaatactgaatattgaagccagggagaacatggcaggagaccaaggcctctgcaagtcctgtgtggcttattggtgttgatggcatgagaagtagccattatgagtagaagctgtgagcttcggccgggcgcggtggctcacacctgtaatctcagcaatgtgggaggccaagacaggtggatcacttggggccaggagttcgagaccatcctggccaacatggtgaaatctcgtctctactaaaaatacaaaaattagctgggcatagtggcgtgtgcctgtagtcccaccagctactcgggaggctgaggcaggagaatcgcttgaacccaggaggtggaggttgcagcgagccgatatcacgccactgcactccagcctgggtgacagagtgaga

SEQ ID NO: 32735 - DNA, 1447 bp, Homo sapiens
acagttccgtagcctttctttgtgttttttgaccttaacatttttgaaacttacaggccagtaattttgtagaatgcccctcagtttgtgttgtctgaggtttcttcatgattagattcaggaatatctctttggcagtgataccacaaaggtgctgtccttcccagtgcacaaggtgccaatttgtcccatgactggtggtggtaactccgaacactcttgtcaccagatttctcccctgtcaagttttttactttatatatagttagtaagtaatttgtggggagataatttgaaactatcttttaaaaaaatctcattcctcatcatcctttcaaccactactttttgcatctgtttttggaactagtttcgtatttcagcctgtggtgtggtgagggtagtgtgtttcctctcactggaagaggtcagacctacactggataaccattcaataaggctgttatagaaggaattcaagtatttgtggagtggttgttactgaattttaagttcccttgcaactctgaggtccagtgtttctatgaacatctttcaggcagagaagcttcttatattctccaaaaagttgatagctaattctttgttgttattcttacctttgatgttgatacatataaaaacaaataataaatgtatttcaaaatggtgaaaggtttattagagaattctgttctaggtacttctattgactttgaacagagtgtgaatatttctgggcacacttaggaaaaaagaatgctgatatgagaaggtttcctgggcaagtgtatgggtagtgatttgtgagtacaaaggcaatgtgggaagtggcagtcaggactgaacaaaataaaaccttcttttactgattcctttaaaacagttaaaatacaccgtttgttatttggaatgagctcagggccctgatgttgctggtaatgggtgtctgagtcttaggagcctgttacagggggaagttggagtgggagagagcaggtaggaggggctcgggtgaatatatatgtttgaaggggaagcagtgttagcatggtacattttgggttaggagaagccttggtatagctgtaactgtactcccatatcattcacattattttatagagcataatttctaagttacctctttggcaggtataaatattattagtgcacatttgggctgccactgctggtatgatattctttgtgaggcagaagtttcctgattttttttggagggtatgactattttcatgtctaggccagaaatgtagaagggatcctagtttccttctcctatactttctaaatctagttgattctctctaataattacatcttaaatttgtttcctacctctcttgtgacccaatgcctcacacttagtttgggccttcattgtttcttgctggattcggaagtggtcttctaactggtctccttt

SEQ ID NO: 32736 - DNA, 1025 bp, Homo sapiens
atgaatttttacttaaggtttaaatggcatatggaaactgtggatgatataataaaataatagtgttttggctgacactaggaaaccatggatgatatcatagagtaatagaattttgcggctgaggagagggacattaacatcatctggtttaacttttttgttttgtagttgagaaaattgttgtctagagagggcggttaagtaattggttgccaaaggtcattcagctacctactggtgaagccaggggaagggaagtaagaactgtgaactctgctttagttctctttctatgacatcacttttgtttttttgccttaactaatggttcttgacattttctttaaagtatcattttctttaaaacccattttctttaaaacccatctttgatgtagttgacttttatcgacagccagccattcatgcatctaatatttaagtagttacaagtaaactaagaccccagccttgtttgtgagatgtgcaaggtaataggaagatggacatttgaaacaactccctgaaatatgttttgttaagtgctataaaggtggcttttaaaataaagagagatggtttgctgatttagcacgaatgaaccatatgtacagctttgagaaaccaatagtcaacttttaaaatcatttggaaaaaatttttgaactgttgaattattagaacttgagttaggccagttcatgtggatcacagaccttgaaataaatttgaacttaaaatcgtctagggaaaaatgaattttttttgataagccttaagagttttgcaagaataactttggttttttagctttgaatttgagttgtttaaaaataaaattttgaaaaaatgccatgctttctaacaagagagcaacatttttcctttgctggaattggcaatgggaaatttaagtctggttaatgtaactgaacagctgaagtattttcatcctaaatcagaatttaaaaattctgtgcattctaatgacaaaatgctacctctttagttcgtggctgtcc

SEQ ID NO: 32737 - DNA, 1050 bp, Homo sapiens
cttagtggcacaaaaaataaggatgtactttagattaaatgaaatatgatattataaaaaggtgatactgtaaagggaacttaaatacatagtttgtcacctttctttttttttttttgagatagagtcttgctctttctctcaggctggagtacagtggtgcaatctcagctcactgcagtctctgtctcccagcttcaagcgattgtcgtgcctaaggctcctgagtagcttgggactacaggcgtgcaccaccacgcgtggctaatttttgtatctttttttttttttttttggtagagatggcgtttcaccatgttggccagactggtctcgaactcctgacttcaagtgatttccctcccccaccaaccctgtctgggcttcccaaagtgctgggattacaggtgtgagccaccataccaggcctccaccttttttatgtgcatatgcatgtgtttgtcacaactttcagaattgtaaaattcactggtggtatttattatttgcttacagcaatagctgtgtagtaatgcccttgcagggaaatcataaaatgaatgagatattgtcattagattaagagcaatagcaaggttacttttcagccaagaagctgcaggcaaggagaaatgtcagtggttctcagcctttttttgtgaaagccttaggccctttccctagaaaaaggcatgaatgtccacacatactaaaatttgtatactgtgctaggacctctagacttttggggcctttgagggactcctgatgaaaagcttaatgggtacacctgagtgtcacaaaaactggtatatgtcatattctgttttacatcctaagatctgacctcctacatgaatttttttgaaaatttgcatatattaagattcactctgttgaaaagttatgtaggtttcgacaaatgcatagtgtcctatatccactacagtatcatagacagtagtttgcacctttaaaaagtcccctgtgaatggggcatttgtatttataaatactccctcccttatattttaaataaggtgctttaaa

SEQ ID NO: 32738 - DNA, 1032 bp, Homo sapiens
tagtagtagttgacacttttaaaagtgctgtcttttgtctgtgtggggcatagaggtcatccctgtgttatgtactgtcatttccattttatagatgagtgttagtctgctcaggctgctgtaacaaagtaccataaattgggtggattgtaaacaacagagatttatttctcacagttttggaggctgggaagtccaggatcaaggctttggtagatttgatatctgctgagagccctcttcctggtttatggatactgctttctccctgtgttctcacatggtggaaggggcaaacgagctcccctgggtctttttataagggctctaatcccattcatgaggactgctcttatgagctaatcacctcccaaagggccctacctgctaataccatcccttagtggttaggatttcaacatagaaattttggggtgacacagagaaatgagaaaacaataatcttagagtaggtatgtattaatgactagcctggttttttggtagtagtagggcacacggtcctgatggaagtgtataagttctgaaacaccgaaagcttcagaagcttttaaactctggttggccttcctgtgttcctgggccctggttcatcgcttgcatttacaagcctgttacttgcataacaggctgcaatgtaggcattcatttctgcattttactgatgaggaccctgattcagggccttttggacagtgagtagaaggccaggtcttgactcagtcctgcctgagacctgaattcatactgtctctttatcagctctggaggagtgcaattaaccaaaaactcaaagagtagaaccgcaagcctcctgccacaggtgcttgtttgtggtctttattattatgctaattattcttgcatcctcccatgttctttaattgataattttcattgtactgagctctgtggaattccggagcctgtgaaggtggcatatggctgggcagtgccagaagcttgggaagaacatgctggtgggtgggtggggaatggtataaactggtt

SEQ ID NO: 32739 - DNA, 1027 bp, Homo sapiens
aagctgtggaattctctaactctagaagcttctggagagcatccagttgtatgttttatttgaagaaaaatgtggttcagggagctaacatggccaggtcagttaggagtcatgccaggactagagccccgattttctgagccatgttctgtccaccacacgaaaaccagagaaaccaaataatgagagtttaatgcgcaagatggggaagaacaagaagcagcagcatatgagctctgtttcttacttccctgcctgtggctcatcagtctttcagcatttttagaaacttacattcttggagcatacacctatcttaggttccctggaaaatattcagaagatacctgggtattcttttgcgtttaggccagtggccttctggaatactcttttcttccccatctttggaaaactctgctgcagggagtttgttaaacctcatgtaataagtgatccaaaagttttgcttatataaatgtttgtttaaaatcctatttatgtcatagaggcctaaaaaagggaaaacaggactgtttttctttaaagcatgccagctgccctgagaagagtagttagtattgaataaaatataatttatagttagaatatctgctgttgctgtttgcaaagaaataaaatagttcatctgtattttcatttacgaataagagatagtaatatgttcaatgaataatatacatatcaaataagtcatagcttagttcaagcttaggaaaatagtcaaaagagagagcataataagaattatagatgtcatttattgaataccagttttatgccatggactgaggttggaaatatacattatctctaattcttaaacaaccctgtgagggaggtgctgttattcccattttataggaaaagaataggatcagaaagggcaacttgcccaaagtctggtagcaggtaagtagggcttcatataacatatacctaggtctgtgaagttccaaatcctgtcttgtgaacttctgttcattcattcatttgacaagcattt

SEQ ID NO: 32740 - DNA, 1077 bp, Homo sapiens
agaagtagcagggcgcattttgcttaacttttgccgagatccttgtcatgggggtgtaaaccctttcccacaccaatctgtgtataatttttgccaaggtgttagggatatcttgcagttatcctatgggggacagctgtgagcctttttggttttttttgtttttttttttccgagacggaatcttgctctgtcgcccaggctggagtgcagtggcgcgtggcgctatctcggctcactgcaagctccgcctcccaggttcacgccattctcctgcctcagcctcccgagtagctgggactacaggcgcctgccaccatgctcggctaattttttgtatttttagtagagacgaggtttcaccctgttagccaggatggtgttgatctcctgacctcgtgatccgcccacctcggtctcccaaagtgctggattacaggcgcgagccaccgcgcccggccctgtgagccatttttacaaaaacttccacctgccttggcccaaacctcagcgttcttaggcacaggagctcatgaacatactgagataacactaaactggactatgcgaagggaccaactacagacctgacacaaatcctcaaggcaagacgatgtctgaagttgagcttgtaaaggaaatggcttccttccttaaaatatcacccaggctgagctctgaaaaaagcacctccagatggtgggttccaccccgctccaccaccccaaaattgcttattgtgtgagtctccatagtctcagaaactgagagtacctttgatgccagtggcttccgggctttttggattgtcacttggtagcagggagcacccataggatgatgcctatgatgagtcagggcccaaccttggaaacagggaaatccagaagtatcctacaagctagccagccttttggattagattatagcagtttcagagaaaaatggggaatcagccatggtcaaggagctaaataagcatcgtgaccatttgggccagaaattgaagggagtgtagcgttaagaattagaggaaggaacctccgaggaaggagctaccccaaagggaagcagaaa

SEQ ID NO: 32741 - DNA, 1107 bp, Homo sapiens
cctcggccacagttcataccttgaagcactgccctttgtcatcctgcctgagggagaattctatcctcactctaccatcagtgtccccagactcagatggccactccaggcctaggtaaatgcacaacaacaccggctgaaagctaggccaatacacattttctttgattactcagaaggcctagcccagtggttcccaagcttggttacctactggaatcacctggggaaagtttatttgtttgcttgtttttaaagccatgaatattttaatttattcgaatttctcggagtggtgcccaagcattggtaggtttttggtgatgcttcaggtgatttgaatgtcaggccattagtcacagctactggctggagaagtggttctcaaatttgaatgtgtatcagaacctactggagggctcataaaactggttctaacccagactttaaaatttactagttctggggtagggcctgagaatttgcattcctaacaaattcccagtgtggttctcccactttgagaactgctggcatagatcaatccgacataagtcatggattgctttaggaattgtcttaaatacaaactctgataattgttagtgcctggtttaagaaggattctgaggcttcatgactgggctcaacaagaggttttgactaatgactacatgtaagaatcacctgaagcacattcaaatcatcaatgctcgggcaccactcccagagattctaaattagaatactcaaggcactaacaaaaaataaaactttccccaggtgactccaatgagcaaccaagcctgagaaccactgggctagaccttccaggtatggagagaagaggggtatttgtgttgatgagcaatgtcttccttgggtgaggaagtaggcagctgtttgcatggcaagtgatatggtttggctgtgttactacccaaatctcatcttgaattgtagttcccctaatccccacttattgtatgaaggacccagtgggaggtaatttaatcatgagggtgattactctcatgctgttctcatgatagtgagtgagttctcacaagatctgatggttctataaggggctttttccccttttgc

SEQ ID NO: 32742 - DNA, 1068 bp, Homo sapiens
gcttagaaagtaaagccaaatactttgcacttttctcacacccctctcagctcattccttccagctcatggccatgcctcatttttaatttgtttttaatgacaggaccatgtttcttttgggcagcttttcattttccctaaacatccggagattattttcacatttgactaatagaagacctttatgtgttctctttatactatggattgaatgaaatcctcttatttcttcaaaaacgttctttctttgtggaagtcctctatcctcctgtttttatgggactatgccctataaatgttgcacagcagttacctcattgtgaaagtccatgttttcttctttctttaatttcctttttggctatctgggaatatatccttgagcatttctgtttcagaaaatgtacatcaatggaatttaacctttctaaattgtcatttcaccctcacgtttgattgatcatttagactggcatagaattcttggttcaaataatttgtccctcagaatttgaaagcattccacctttgtcttctagaatttgttgttggacctgaaaagtctgcatccatttgatttttcttcttttaaggtaaccttgttttcttctctctaggaagttgtaggatcttttattctttggagttcagaacttttgatatcactcacataaggaaaaagccaagtagacaacactgagatatcgttctcactgatcaggtgagttgagtctgataatatattttgttggacagggagaaagacactgaattctcctcactcttggtgggaataaaaattatacaaactcaatggatgcagatttaacaatacatataaaaatgagcagtatgtatacactttaaccagcacttttgacatttaggaatatattatcttgaaatactaatctatgtgtgcaaagatatttatacaaggagaatcattgtagtattgtttgtataacatcaattattttttaagccagatattcattatgagtggtcttattaaaacattaaaaatctataatttgtcaaaagcttttatgcattaatctctatt

SEQ ID NO: 32743 - DNA, 1035 bp, Homo sapiens
tcagtgtttccctcaggctattccagctctcctgcccattgcagaaatatttatcatcttgacattccacagaatctcacactggtcactgctggtccaaaaagtataaagtactttagatgtgttagtaagatacatccgtgcatccaagcacggtggcccacgcctgtaatcccaacactttgggaggccaaggcaggaggattacttaaggtcaggagttggagaccagcctggccaacatgaggaaaccccgtctctactaaaaatacaaaaataagcctggcatggtggcatgtacctgcaatcccagctactcggaggctgaggcaggagaatcgcttgaacccagtggatagggggaagttgcagtaagctgagatcatgtcactgcactccagcctgggcaaaagagtgagactccacctcaaaacaaaaacaaaaacaaaaatccttaaaaaaccaaaacatcagtgcccgaggattggagagaaatcacataaaaattcaggaacttactacatcagtgacatgtctagggcttctgtgatctagatcatatgagatatgcccttcaatgtgaaagagaagttcctataccttgcaccatctactactaagaggaagaaacatttgaggagcttccttagatttcaaaggtaatacataccacatttgagtataatgttcagatccatttatcaagcaaactaaaaagtttaagggaatcctggagaaagaggaggctctgtagaagttcaggcttcagggaaagctgctctgccacttgatcttatgacttgggagatccaacatcacagaaagtttctgaaggtttatgtgtcctctgcaagaatcacagagaaaatctcatctctcttctacagataattattctccttttgagaaatagcttcttgcttgctatttaaccttagtagtgcctgaatatctgcccatgaactccaggtgacatgtgaactaagctgctcatcaagaattgagtattattggaccactcatgtcacaaggtta

SEQ ID NO: 32744 - DNA, 1082 bp, Homo sapiens
tttctaagattttgtgtgaggtttaataccaaatatgagtctaagatgtctgggatggggtccagaagagaataaagatatgtattgtatatattaatatctgtgtctatatatatgaaaccacataacatactatcaactgagatagagaatcataagatcctacagacttggaatgaggggacccctaagagctgatgatttggttcaggctctggatggtgcctgattctcggttgagcatgctttctagcacaccatattctagtatgtagcataactccaggtaccaatgaaaattttaaaataataataagataaacataaatcctgattaggtacttgggcatgaaataagtctgccaacaattgaatcctgggtccattatcagctacctgtgagagcttttgtaacttagtaaacttcactgtgtctttgtttcttccactttaaaatggaatactaattatacctagctcatcagattcttgggaggattaaatgagaggatgaatatacatgttttaggacaatatttgctctatataaggtgttcaaaaagtgtccataataattaatatcaaaacactgctcagttgcaacaaatggtttacttcttctaatgggttctcaacacaaccagtgtgggcctatcggtacagttacaaagtatttgggcactggcctagaggtttcagctaaaaggttcaatctagattctgttttccacaggggcttgcagaaaaggactcccattgatcctaaacaaatttagataaattctattggtttacaaattgatcttatgtgagtgttggcttgtcttctactgtaatgttgccaagaagaaatcagcatcatattgggatggaggaggtacaggaggatcgattctaaaatcattgtaaagaaaacccaagaagcaagctatgccacagagagcctcgctcatctgagagagctggtataacaaagggctaagtgaatggattctgggggtaccttgggcaagtcaccttgctttgttctgcctcagatacctcattcatgaaatggggataattataatatctaattcaca

SEQ ID NO: 32745 - DNA, 1025 bp, Homo sapiens
ctttccatggcttgcaaatggctatcttcttgctgtgtcctcacgtggttacctctcagtctgtgtgttgtctgtgtcttaatctttttttttttttaacgatactttaagttctagggtacatgtgcacaacgtgcgggtttgttacatatgtatacatgtgccatgttgatgtgccgcacccattaactcgtcatttacattaggtatatctcctaatgctatccctccccccttccccaaccccacaacaggccccagtgtgtgatgttccccttcctgtgtccaagtgttctcatcgttcaattcccacctatgagtgagaacatgcggtgttcagttttttgttcttgcgatagtttgctgagaatgatggttgtaactcaaaataatcttctcttcttctaaggacaccagtcatattggattagtgcccacccatatgacctaattttactttaattgactttttaaagaccccaccttcaaatacagacacattctgtggaactagtgttaggacttccacatatgactttggacagagggcacaattcagcctgtagcaccatttctttatttttcagtgcctcattatagttggttgtttttaaaaacataattatttagatataattctgtattaccctgttcttgcattgctgtaaagaaatagctgtgactggataatttataatttaattggctcatagctccacaggttgtacaggagacatgatgctggcatctgcttggcttctggggaggtctcaggaaacttacaatcatggcagaaggtgaagaagaagtaggtgtctcatatggtgggagcaggtgcaagacagagtgaggggggaggtgtcacacacttttaagcgaccagatctcaagggaactcagtatcatgaggagagtatcaagggggatggtgttaatccattcatgagaaatccacccctatgatcccatcaccgcgtaccaggccccacctccaatgttggggattacaactcaacatgagattt

SEQ ID NO: 32746 - DNA, 1030 bp, Homo sapiens
gtatacctatgtaacaaacctgcacgttctgcacatgtatcccagaacttaaagtgtatatatatatactttatatatatatgcatatataaagaacacctttttaatctgaccttagaagttttgcatgctattctttccttgctcagcatcagctcagatctaacttattctgtactcattgggtaacattttgatgactggttcagggctctagttaccttaataacagaacagtcactgtaaatagctgtgaggagtatttcagtcattataaatagctatccccaatgggtaggttaataggttggcattctggcttaaaaatattttcctccttgcaaaagagatattagaaattggttatatatagctacaatcataaaattcataaaatagcagcactgagctccagactccggactgagagtggccccaatcccccagctttaccatctcttgttagttacaggtgtccagtcgtggatctctcatgtactaatatcctcaattgaactttgaatttgcattctttaactcagctgagttttcttctgatctgacctgatccttcatcccatagatcacaagttaagaattggaggaaatgttgagactattttttgcagaggcccagggaaggaggtggctggttcaaggtctcacagctggtggatgacaaggcagggctagaacccagctggcttctagtccagttcagtgtttccatttctctacgctctatgggtaatttgtccttgaggtttggataagatgacttgggaagttgagcctgtatcatatgtgtattcatatgcatgaatacctcatttcatgttttggatatatattcttgcaaatttggtaataaagtgaatttcagcaaattatatatcttaccatgtttcttaaagactaaagatgcaatccttctgtaaaagcttttagccttgagtatacacttggatataatagaaaaaccaaatgcctagagtgaaaagaattttctgatgaaatattaaaataatgt

SEQ ID NO: 32747 - DNA, 1062 bp, Homo sapiens
ttcctattgtttcatcttttttgggggagggggtttctttctgggagggttacacagctttatcttctaaacattgtttttttatttctgctattgtagttttgattactcaaagagctttttggtttcctgaatgttcctttcatagaaagtatcattctgttcatgtcctgtactctaatttcttctcatagtctctctgaggatattaatcactgtgttttttttcttgtaatgttttattttctctgaaagtctgtttcatccaagttatctttccccctctatttgtctggcctttatcttttgtgcaagaggctttactcaggtatctagtgatcctctgttctctgctcatatttgagagtaggtgctaaaaagctgattggaggttctgatctgtgggtttgttgactctgggctttactgtaaaatgaatgggctggtttttttccttggggatgacccagtgtcgaatcttcaggtctttattcttgggcaggtcagttccccagaaaagcatttcagtttcttgcttggaggttcagggcaggtaggcagcattctgttagctgagtgaggaatgaagactgggcgtctcagcattcagtatgcatacactcattttatctgttttcaagatcacattcacatctcaactgtgcccaatgctccccagtccggagaccctctgttttatgttctccagggaataaagcaccagttttatgctagggtagaggacatgacctgaagatcaactgttcatttaaacaaactttctataaactctcctgttttggctttacctttaccccacccccacttccaaggttcctagtatccccaaatcctgaatgtctgcaggttttgctgggtatatctggttgcttcttggtttttccctcagctggcttaggattcaggcagtctgctatgtttatttgctttccagtttccaatactttgttattatttctcatttcctttatgaagccaacaacattaattggtaatagggaacaatgtttttctaaagaaccacaaattcatggcaaagta

SEQ ID NO: 32748 - DNA, 1043 bp, Homo sapiens
tggtgtctactgttcccttctttgtgtgcatgtgtattcaatgtttagctcccacctataagtgagaacataaggtatttggttttctgttcctgctttaatttgcttaggaaaatggcctccagctgcatccatgttgctgcaaaggacatgatttcattccttttcttttaatgactgcatagtattccatggtgtataggtaccatgttttctttattcagtccaccactgataggcatctaggttgattccatgtctttgctattgtgaatatgatggacgtataagtgcatgtgtctttttggtagaatcatttattttcctttgggtatatatacccagcagtgggattgctgggttgaatgtagttctaagttccttgaaaaatatccaaactgctccccacagtgtggctgaactaatttacattcccatccaccagcagtgtatgtgcattcccttttctctggaaccctgccaacatctgtgatttttttttaactttttaagaatagcccttctgactggtgtgagatagtatctcattgtggttttgatttgcatttctctaatgattagtgatgttgaacattttttcatatgcttgttgcctgcttgtatgtctcacttttgagaagtgtctgttcatgtcctatgggcattttttaatggggctgtttttcccttgttgatttttttaagttccttatagatgctgaatattagacctctgtgaaatgcacagtttgagaatattttctcccattctgcaggttgtctgtttaccctgttaataatttcttctattgtgcagaagcacttttttttttgagacaagagtctcactctgtctctcaggctggagtgcagtggcacggtatcggctcactgcaacctccgcctcccaagctcaagtgattctcctgcctcggcctccttaatagctgggactacaggcgcacaccaccctgcccggctaatttttgtgtttttagtagagatgaggtttcaccatgttgttcaggctggtctcgagctcc

SEQ ID NO: 32749 - DNA, 1035 bp, Homo sapiens
tggaagttggatatttggttcactgaatttccttaacccatccagtgaccagaaaatctttagtttcaactcttgttgaagtttcctaatatgtaccacttgctttcctgtcccaggaagtagatttcacttcagttttgatggttaaaggaactcttgcagttcttcagaatcatgagctatcaactgttaattcttactcattgtggatgtagacagcataaaaatgtgggctaaatatattctaattatgaactggaaggacgcggtctgaattcatgtttattaccaagcacagtgcctggcatagagtaggtaccagtaaatatctgttgaaataaattaaaattgggctttgatatggttcgttcaatgtggaaaaaaataaaacattaacttcaggcccacgtagaggctctgtttattaagcattaaaaaataattctaaactcatatatctgtaatattataactcatgttttagaatattaattcatgtcattccttctttttctttccctataccctaatatatacacacaagcctccattctccctgtttccctgttcctctcctacattctcccacctcactgaggagagttgggcttcatacttctcactagttacattcctggacgattgctctaatgggtttctggctggctttctttacctatagtgccttagtttccagtgctgatggatgtaaatgtagatctctgacagaggccgggcgcggtggctcacgcctgtaatcccagcactttgggaggcccaggtgggcggatcacgaggtcaggagatcgagatcgtcctggctaacacggtgaaaccccgtctctactaaaaatacaaaaaattagccgggtgtgcttgcaggcgcctgtagtcccagctactcggtaggctgagccaggagaatggcctgaacctgggaggcggagcttgcagtgagcggagatcgcgctactgcactccagcctaggcgacagagcgagcctccatctcaaaaaaaaaaaaaaaaaaaaaaaa

SEQ ID NO: 32750 - DNA, 1118 bp, Homo sapiens
ttttgtagtgctgagtgtagaagtctttgttaaagtttttctaaatattttaagtatattcttgatgctattgtgaatggaattttaaaaaattagtttgttcattcctagcatatagaaatggaaaatgcagtggacttttgtatatattgtttgtgctatgaccttgctaaatttgcttattggtactagtagtttgcgtgtgtgcgttttttgagattttctgtaagcagaattgtgtaatccattactaaaacaattttacttgtttctttttagtcttgatgcctttttttttcttttccttttgaaccttactgcaccagctagaacaagtacaattttgaaaagaagtggcaacagcaggcatcctttccttgttcctgatctttggaaggaaagcgttgtgttttacctttaagtaaagttggctttagattttttggtgcccaccaccatcaagttaaagaagttcaatttctcgtttgtgaatttgtgtgtgtgtgtgaataggtattgtattatatgttgtggaattctcttgaatgttttgttatggattttgtcatgtttatgggagattttggtttgtattttcttttttttttttttaattttaatttttttgagatgatttagttgcccaggctggagtgcagtggcatgatctcggctcaccgcagcctccgcctcctggattgaagcgattctcctgcctcagcctcctgagtagctgggattacaggcatgcgccaccacgcccggctaatttttgcatttttagtagagatggggtttctccatgttggtcaggctggtctcgaactccccacttcaggtgatccgcccaccttggcctcccaaagtgttgggattacaggcgtgagccactgctcccggcggtttgtattttcttttgtctggtggccttgttttctttcatagtagttactggcctttaaatatgagttgggaagtgttttctcctcctctatgtttgggtgttattcctttttaattatttgttagaatttaccagtgaaggcatttagccctggagtcttcttttgaggaaaatcttcagtggctatttaaaacttttattacaggtctattca

SEQ ID NO: 32751 - DNA, 1103 bp, Homo sapiens
gttcaccaggctagtcttgaactccaggtctacaggatttttaatgtaaccttttctctcttaacaactttcctcctcctccctactgaaaaaaaaaaaaaaaatccaagtcctcaaggcattaacattgactttttatcccacggtatgcactaacacttttgtaattattatcaacactgccgccaacagtgtggttactgaaaataagaaaaatgaggattgcaaggattgagccaattttctgtgttatagtcattcgaaatagttactctttggattgttataccaccaatttgatataaaattatggttactttattttggttttcagagatttcatgtaacattttggttttgttacactattatataaaatatttacatggtttgaaagtaaaatctataagacagattaaactcagagcagtgttttcctatttcactttgttctgtctctccctcctaattggtagcccttttattttgtttttgagacaggtgcaggctctgttgcccaggctggaccgcagtggcgcaatctcggctcactgcaacctctggcccaggctcaagccatcgtctcatcttagcctcttgagtagctgggactaaggtgcgtgccagcgtccatggctaattttttttattttttgtagagatggggttttgccatattgcccaggctggtttctaactcctgagataagtgatctgcctacgctggcctctcaaactgctgggattacaggtgtgagccaccacacctggcctggtagccctcttttttttttttttttaaaaaccttatggtttatcttttcaaatgcatatatagggccaggtgttgtggctcatgcctgtaatcccagcactttgggaggctgaggtgtgtggatcacgaggtcaggagttcgagaccagcctgaccaacatggtgagaccccgtctctactaaaaataaaaaattaaccaggcgtggtggcgggcacctgtaaatcccagctactcgggagactgaggcaggagaattgcttgaacccaggaggcagaggttgtagtgagccgagatcacgccactgtgctctagcctgggcgacaga

SEQ ID NO: 32752 - DNA, 1030 bp, Homo sapiens
ccctcccatcattgttagggttctgctacctcatttttacctccttttataaattaaaaaggtatccccctgccagtttgagatcaggcttgtattcttttttggcctgattggagttatttaaaaatatggacaggctgggcacagtggctcacgcctgtaatcccagcactttgggaggctgaggtgggcggatcacgaagtcaagagatcgagaccatcctggccaacatagtgaatgtctctactaaaaatacaaaaattagctgggcatggtgacgcacgcctgtagtcccagctactcgggaggctgaggcaggagaatcgcttgaacccaggaggcagcagtgagccgagatcacgccactgcactccagcctggcgacagagcgagactcccatctcaaaaaaaaaaaaaaaaaaaaaaaaggacagagttttttttccttttggtcatcctgtagaaaatggaaagctgtgaagtatatttgaaacaaatatggttggattgagtctttatggaaaggtcttgtacttcagtcacacagtagaatgactatagttaacaatggttttttttttttgagagggatttttgctcttgtctcccaggctggagtgcagtagtgtgatgtcggctcactgtagcttctgcctcctgggctcaaatgattctcctgcctcagcctcctgagtagatgggattacaggcatgcaccaccacgcccagctaatttttgtatatatatatatttttaagtagagacggggtttcaccatgttggccaggctggtcgtgaacccctgacctcaggtgatctgcctgcctcagcctcccaaagtgctgggattatagacatgagccaccgccccgctgatttttttttttttaatggagtctctctgtcgcccaggctggagtgcagtggcgcgatcctggatcactgcatctttcacctcctgggctcaaatgatttgtgcctcagcccgagtaactgggattacaggcatctgccaccacacctggcta

SEQ ID NO: 32753 - DNA, 1049 bp, Homo sapiens
aggtaactgggtggggggagtatgggaggtatgtgagccaaagcattggagggagaggaggatttacgtaggagggaagaagaaaagggtactgtatgtgtgtatgtgttgtcggggagtgagtatgagtatgatgagaggtggagagagggagaatacttaaatatgtaaaccttctggtaaatttggaagcatgaaaaaattgacataagtagaaatattcaagctttcattggactttattttgtcacgtttatagaaaatttcaatatacaggccaggtgcggtggctcacgcctgtaatcccagccctttgggaggccaaggtgggtggatcgcttgagccaggagttgtggtcccacctacgcagaaggctgagttaggaggattgcttgagccccaggaggttgaggctacgatgagccatgacactgcacttcatcctaagcgactgggcaacagagtgggaccctgtctccaaaaaaaagaaaaagtttcaacatacaaagtagaataaaactctcacatacatacctgttacctcaacatgatacctagtgaaaattaattatacccaaatgcaaggcttttgatacaccctttatagacctggccatacgtcttggaatcatcaaattttacagctgtgaaaagaacctagatatttagttaatagctttaagaaactgagggccaaatcacttaggagcacactattaatatatatgacattgttttactcaaaatttgtcagacttggacagttacagaattactgattgtagtggatgccatgatgtaatacccaaatccccacttaaggcttaaagaaattcattcttttagctagtgggtgtgctgctgaggctgtgagacctgtctgggaatcatccttggctgaagagagcaactcattcatggtcacatgctttcgttgtgagtagtgtgcctccaggttctggttcattaaagtacctggctccttgggcccagcataggacaaccctaaggagtcattcagctttagagtttcttttgggtcatctga

SEQ ID NO: 32754 - DNA, 1055 bp, Homo sapiens
atactcgacatctttaattttggagtttaattttggtgctataattcagagatttaaaaaaggtttgagaatgccttgctaagtgatggcaggcttagcacagtggcaggcttagcacagtgtttggcatatagctgggtcccaggaattatttacatatgtaatggaggaaggagaaatgttttattcaatgaacataggctaaacaattcactcttcatttggaaaaggtgaaaaatggggaaatttagataaattgattatgaaacggttattgttccggccctatctcagacttgttgttgttgttgttttttgagatggggcctctgtcacgcaggctagggtgcagtgatccgatcatggctcacttgcagcctcgaactcctggactctaatgatcctcccacttcagcctccttagtagctgggaccacaggcatgtgccaccatgtctggctaattttgtttatttttcgtagaggcagggtttcactatgctgcttaggctggtctcgaactcctgggcttgagtgatcctcctgccccagcctcccaaaatgctggtattgtaagtgtgagccactgcacctggcctatctcagacttttgacatcagtgagagaagtgtattctcccacttttttttttttttttgagacggagtcttgctctgtcgcccaggctggagtgcagtggcgcgatctcggctcactgcaacctccgcctcctgggttgaagtgattctcctgcctcagcctcctgaatagctgagattacaggtgtgcgccaccacgtctggctactttttgtatttttagtagagatggggtttcaccatgttggtcaggctggtatcgaactcctgacctcgtgatccacctgcctcggcctcccaaagtgctgggattataggcgtgagccaccatgcccagccatgactcaaattcagcatagttactctcataccacaagagaaatagagtgtacgtgtttatttgggttgatcagcatcggtttattgctattacattcccagaaaattttataaatga

SEQ ID NO: 32755 - DNA, 1079 bp, Homo sapiens
gggttcgagcaattctcctgcctcagcctcccgagtagctgggactacaggcgcccaccgtcaacgcccggctaattttttgtatttttagtagagacggggtttcaccgtgttagccaggatggtctctatctcctgacttcgtgatccgcccgcctttgcctcccaaagtgctgcgattacaggcatgagccaccacgcctggccaggaccatagaattctaatgatgtgatcttcaattattttgtgaaatcttattacctggataagagtcaggattgctttatcttgtttggcagttagagaacagttgttgattcacaatatttctggtcagttaaaacattttcacaggttagtcgatagtattgttcattattttctctgttcttacagactcttagtagttttgtcagttattgagttgaaatctgaactatatgtgttttcagtttctcttcagagttttatcataagtttttgctgcatgtattttgaagctctgttggtaggtttatgaaaccttttggaacttatggaatatagttaaaataactaccattttaataactttgatttttctagcctgggcaacatggcaaaaccctgcctctacaacaaatacaaaaattagctggacatggttggtgcgtgcctgtagtcacagacccttgggaggctgaggtgggaggattgcttgagcccaggaggcagaggttgcagtgatcgaggtcgtgccactgcactccagcctgggtggcagagtgagaccttgtctcaaaaaaaaaccaaaaaacaaaactttcattttaaaaatttttcatagaggtggggcctccctgtgtttcccagactggtcttgaactcttggcctcaagtatttttctcctcctaccttggcctcccaaagtgctggggttacaggagtgagccaccgcatttggcttaatataaatttcatttttaatgttgtttactaattctatcatctttcattttctgggtttgttgctcgcactggtttttcttctcatcatgggttatattttcctgcttctttcttggcctggttaatttt

SEQ ID NO: 32756 - DNA, 1049 bp, Homo sapiens
ccacccccccctccaaaaaaaaagaaaaaaagagttgtgtcccaagttattctggtagcatccttgttttagtttcctctaaaagggtgatttttgtgtccatatctatagtattttagataaggttagatgaagttatcttctatgatgacttgaatgatttttctgtttcatttgtaagatgaggttgttggattaaagcataacttttgctatgaatttgatttccagactttttttttttttttttagctttgttaaaaatttgctgaattgggctgagcacagtggctcatgcctgtaatcccagcacttcaggaggctagggctggcggatcctttgaggtcaggagtttgagatcagcctagccaacatggtgaaaccttgtctctattaaaaatacaaaaaataagccgggtgtggtggcgcatgcctgtaatcacagctacttgggaggctgaggcaggagaattgcctgaacctgggaggtggaggttgcagtgaactgagatcctgccactgtactccagcctgggctacagagcaagactcagtctcaaaaaaaaatgagttggtggttactgtttccaaacctagacctcacataaaaatccaaatttttaggcacttcctggaaaagtatgaggttttgcaacagtggaagcattgaattggaagcattccattattggctagcatcattggctagatttgagagattggcttttttctttggtggtaggagtatgtcctcctcagtttgtccttggtcacacgtgacctttgtccccccccccccctttttttttttttaacctttatctaacttgctcctgtaagaattcgggtttgtaattctcaggaatgaaggatttatccaggccccttcttgtacgctggaggttgttcagaaccatggaattcttttttttgtttgtttgtttttttgagacggagtctcgctctgtcgtccaggctggagtgcaatggtgggatctcggctcgctgcaacctccgcctcctgggttcaagggattctcccacctca

SEQ ID NO: 32757 - DNA, 1074 bp, Homo sapiens
ctgcatttgtggattcagccaaccttggatctaaaatatttgggaaaaaattgcaactatgctgaacatgtatggacatttttttttggtcaggattctctaagcattacagtataacaactacttacatagtatttatattgtttaggtgttataagtaatctgcagatgatttaaagcggcagttccctacctttttggcactagggactggtttcatggaagactatttttccacagggtcaggggatggtttcaggatgattcaagcacattacatttattgtgcactttatttctattattattacattgtaatatgtaatgaaataattatagagttcactataatgtaggattagtgggagccctgagcgtgttttccacaagggtcccatctgggggtgatgggagacagtgacagatcatcaagcattatttcttaatgagtgtgcagcctagatgccttgcttgcacaattcacaatagtgtttgtgctcctatgagagtctaatgccactgcagatctgacaggcagagctcaggtggtaatgcgagcagtggggagtggctgtgaagctttgcttgctggacccagttcacttcctgctcacttcctgctgtgcagcctggttcctaacaggccaaggaccggagcctgtccataacctggaggcttagggacccctgattagaagaatagaggaggatatgcttaggttatgtgcaaatactatgttgtgttatatcaaggacttcagtatctgcagattttggtattcaagcgagatgcttgaaccaatcacccatggatatctagggacagttatacaatggtgttgaagaactgacaaaacctggcagtttgacacagacatatgggaaaaattgaaggagtcaaaaggtcacttagttcatatcagaaatgaagtaaggaaggatgttgatttttggggaacctgaagagttgaggtagtctaggtttgaagtaatgtaaggatagcctagttaaagaattcttcagggatttttagcgatatggttgtggtaattgagctaaatattctgcaaaac

SEQ ID NO: 32758 - DNA, 1050 bp, Homo sapiens
tgcccggcgtttcagaaaggcagagaaccctttcataccgctttgtgcagcggcgttaacgttcaaaatggtttaattcgcctcggttcatctggtggtggtggtttaagtgggggtaagatgcatgcacaaggctttttttttttttttcttaaacctttgccgcgggagctgattacgtacctacggcggttaaaagtggttaaacatgatcaaaacatgcacatgtgggcacatgtggcgtgtttgcatttccccaaactggtgttacgtgggagtggtgggctaagctgatgaacccacagctggagaacccggcgcggaactttgccccaggttcctccacaaatgctttgacggtttgacggttaacagcgagccggggaaggctgttggtactcgaagtgctttttagctggtgagacttttacttaccactttttcattttgtggtttaatatactttggctttgtcgagggttattttagatgtttttgttaaaaaaaattaactcgtggtgggtaggatactttaatttttaagatagaagagatatgctaaattgtctaaggaaaatatctcaaaagtgataatttgaatgttaactgtgcgtgtgtaataattacttgcttttcgaaaaacctggactgaaacgttaatacaaaagaaagggcaactgccaaagcagtaatatgcatgctccacttaatattctatcctaaattttgaagttttgatgatccacttgtttagtcagaacctgggaaattcaggcacgttaaggtttccactttatttaaaagtagataaaggaagaagagtaatttgggacagttgtggctgaagggagaaataatattcatttgaggtttatccagcattctctatctagatcctgaagcaagacactgaatgggtgcagaagaggtggcggtggtgttttttgcaagacaggtacttaaggtcataaacatttaagtaactgagtaagtcattaagtgctactctgactggtgacagacacttaacaccttagaggaatagtcgcc

SEQ ID NO: 32759 - DNA, 1025 bp, Homo sapiens
ctcagtttgcaacaggtaagaaatttggagagagggagacaaagaatggaaataacattattgcacttctctgtgcttaatatttgctaggtatctcatctcatttaaactaggtcattttatatcattttgtcagtgcattactgtggatattttctggtacaaagacataggttaggtgtcttttcttttggaagaaaatcctagagttcatatttcaaatagatgcaatcctaaggtgatttattcttggactagatgaaatgtcaaactggaaatttaaaaagtagtaatttaagaagaaaaatataaaaagtatttcatgaggaagggcaccaggagataagaaaatgtttttcatgttgcgtaaataagatttctaataaatgcttagtaatttaaaatgatttcagggggcctagtggatatatatatgtgatatgtgcatatataaaaatacataatatatatatgtttgtatttagtttatgataaaagtcttatatcagtggcaaaaggattgggactattcaataaatggtgatgggtcagctgactgtgtatttgaaaaaaatagctgtttatagtcctacctaatgtgtacccaaaataactactagatggtttatatataaaaggacaaaaataagggtttataagaaaataagaggatattttttaaatcctctttctaaagaagtcacagagttcataattgatgatccgtataaatttcttttcttttttctttttttttctttttttttttttttttgcagagatgatgtttcaccatgttggccaggctggtctcaaactcctcggcctcaagtgatccacctacctcggcctcccaaagtgctgggattatagacataagccaccttgccccagccaatctgtataaatttaaatagattaaatagatgtatacatcaatcagcactttgagcaaagttaaaaaaaaagtgacagatggaaatattttcagtcctacataacaaatcctacagatcagtaggaaa

SEQ ID NO: 32760 - DNA, 1027 bp, Homo sapiens
ggtgatctgcctgccttggcctcccagagttctgggattccaggcatgagccaccatgcccggccagcaaactcttattttttgtatttatcttttttttttttttttttttttagacaaggactttccctgttgcacagattggagggcagtggcacaatcacagttcactgcatcctctacctcccaggccctcagcctcccaaggagctgggaccacaggcttgcaccaccacaccgcagctaattttttaaaagaaatatttcatagagatggggtctcgctatgttgcccaggctggtctggaatcctgggctcaaatgggatcctcccaccactgccaaccaaaatactggcattacagacataagccacaacacccagctgaatttatcttttttcagatatctttttaggttgttttaatggcagttaatggggagagattagatgctagtatttaatacatcatcatgaactagacatgaacacattcttcagactgagtgtaatgtagggggcgagtttcaatgtagtcacattttggctgggcacagtgactcacagctgtaatcctgtcattttgggaggcaaaggcaggtggatgacttcaggccaggagtttgagaccagcctgggcaacatggcaaaaccccatctatactaaaaatacaaaaattagctgagcatagtggcgtgctcctgtaatcccagctactcgggaggctaagatgggaggatctcttgtacctgggaggcagaggttgcagtgagccgaaatcatgccactgcactccatcctggatgagactgtctcaaaggaaaaaaaaatagtcacatttgaaccaatagtggttattggtttttggatagattgtgacttattatttatttacttttattttaatttgttttttggagacagagtcttgtgctgtcacccaggctggagagtagtggtgcgatcttggctcactgcaacctccgcctcccaggttcaaccaattctcctgcctctgcctcccg

SEQ ID NO: 32761 - DNA, 1027 bp, Homo sapiens
ctagcaaagtcatacataacaaatcctcctctccctactttgtgatggtacatctatcacgaactaaatatgtatgcagggatctactgttgtttgaaatccttttacattttggctctaacaccatgctctttattattgtggctttataatatatgttctaaatatagggtcattttctcctctttgtcttttttttcaaaatctagttaccttcttgtgtctgatttttgtttgatatgaattttaaaaatatacttgtcaagtgcctcaaaaactttgcctggaattttgaatattagaactccattgacttctatgatgaatttaggagagtttaaagtactttgctatgttatatcacttatgcatgaaaatgctggaattctcatcttttttaaagagaagtattcttactatgtttctcatgctggagtgtgttaacagatgtgatcatagcacattaaaactgctaactcctgaactgaggtgatcctctttttttttttttaatttaacttctggggtacatgtgcacaatgtgcagctttgttacatatgtatacatgtgccgtgttggtgtgctgcactcactaactcgtcatttacattaggtatatctcctaatgctatccctccccccaccccacaacagtccccagtgtgtgatggtccccttcctgcgtccaagtgttctcattgttcaattcccacctatgagtgagaacatgcagtgtttggttttttgtccttgtgatagtttcctgagaatgatggtttccagcttcatccatgtccctacaaaggacatgaactcatcctttttatggctgcatactattccatggtgtataggtgccacattttcttaatccagtctatcattgatggacatttgggttggttctaagtctttgctattgtgaatagtgccgcaataaacatatgtatgcatgtgtcttaaagcagcatgattataatcctttgggtatatacccagtaatgggatggctgggtcaaatggtat

SEQ ID NO: 32762 - DNA, 1049 bp, Homo sapiens
attgcaaatatctgctttaaaattttgttattttttggcttaacctgttgcccaaagccaataagataataactggagttgtgtatatgtttttacattctttttttcccaattctcatttttcccttactcagttaattcatattaattcatattagtgtctgttattctgttagttacagtcctaaccaagtaaacatgaagcacagtttgttttttctgagagtgttcttttctcattattaggaagagagggagatattttacccaattttatcttttttcaaaagattaaaaatataatttgttgaaaaatacctatgtagaacatacatcagacacagttcatactgtgttttgagagtatcttcttcctcattatcaggaagaaaaagattttttaccctgtttatcttttttaaaaagttactgtaaaaatactgtttattattcaaacagttatataatgttagactttttttttctaattcgccaacctttcgtagtatcctctgcatttggtcgttgctttttttcttttctttatactttctgttccttttcgtcttacttctttctgtgtacagtaatgcccatttacttgattgtcacatgcataggaaattcagcaatttggaaaaaaaaaccttgaaaataaagtagaaattgcttgtaaataaccaactttgctgtcataagaattaacgaatttacttttatgcagaagttattatctgggtttcccaaggccaagagagaaggagaagcaataagttaattgagggctgatagtattgtgaaatgaccatttaaaagaagaagacacaaaaattagtttacagttctcaagatagagcacaacctttggcttctctgtaggggcaagctacttttctttaatctagaaacttgtgtgcattctgtttaaaaggttaattgtatgccatttactctaagaacataagaggagtgctatattatagaaatacgcagaatattttgactcttaaaacattgttttattttgtgaacaatgcactttaactcat

SEQ ID NO: 32763 - DNA, 1050 bp, Homo sapiens
atattaaccttaaatgtaaatggactaaatgctccaattaaaagacacagactggcaaattggataaagagtcaagacccatcagtgtgctgtattcaggagacccatctcaagtgcagagacacacgtaggctcaaaataaagggatggaggaagatctaccaagcaaatggaaaacaaaaaaaggcaggggttgcaatcctagtctctgataaaacagactttaaaccaacaaagatagaaagagacaaagaaggccataacataatggtaaagggatcaagtcaacaagaagagctaactatcctaaatatatattcacccaatacaggagcacccagattcataaggaaagtccttagagacctacaagagatttagactcccacacaataattatgagaggctttaacaccccactgtcaacattagacagatcgatgagacagaaagttaaaaaggatatccaggaattgaactcagctctgcaccaagcagaattaatagacatctacagaactctccaccccaaattaacagaatatacattcttctcagcaccacgtcatacttattccaaaattgaccacatagttggaagtaaagcactcctcagcaaatgtaaaagaacagaaattataacaaactgtctctcagaccacagtgcaatcaaactagaactcaggattaagaaactcactcaaaactgctcaactacatggaaactaaacaacctgctcctgaatgactaatggatacataacgaaatgaaggcagaaataaagatgttgtttgaaaccagtgagaacaaaggcacaacataccagaatctctgggacacatttaaagcagtgtgtagagggaaatttatagcactaaatgcccacaagagaaagcaggaaagatctaaaattgacaccctaacatcacaattgaaagaaccagagaagcaagagcaaacacgttcaaaagctagcagaaagcaagaaataactaagatcagagcagaactgaaggagatagagacagaaaaaacccttcaaaaaatta

SEQ ID NO: 32764 - DNA, 1067 bp, Homo sapiens
attgatttcttgaaggcttgtttatttatgtacaagttatcacttaccatattgacatgagtagtttatcaaatatttacagagcaccacccttatacgagatactccaccagggtatacagaagttatcaaggcagtctctgccgtaaaaagtgttaaagtatgtgtaatttttaaaggcatcttcattgtgagtaagaaagaggggaaatacattaatagttcagcaaagggcttggtgccatgataagtataataaaactggttactatttaatgactgtttagtatgtggcaagctgtgtgctttacatacattagctcatttaatctttgttaacagtcccatcaggcagatctgatctttatcttgtacattgcaaactgagatgaaagggtttaggtaaatttattccagatcatacagttagcaagtgtgaaactcaagattgagagtcaagctgtgtcacctggagtgtgtgtccccagccacaagacactgtgggaataacaagaaagcaagggatgctgatgcagcccaggctgtgtgtctctgtatatatgtgtgaatgtggggaggttgtaaaaaagtatatcctacaaaaaataaactctgatgtgagattaaagatgagtaaaaggaagttagaaggatgagaaaggcaaaaggtaacatattatgcaaaaagaccttaagacaagaaagcatggttcagtccgggacgtagaggattctgtggctgaattgtagagcatggagatgagtgaggattggcaagagattagactatttgaaagtaagagagtttgctcattttgcagccttaaagtaggtgaggcaagcactgatgatgtgctttatataaattttctcatatagtcctattaatcaacagacctgttggattgggttttaatttgaaagcaattagtagtgtttaaaatttttccttttgaaatttattttcatggttcaaaataaaaaagtttaaaagttgtataataagaagtctttgcctttctgtcttcccatccatctacacatagttaactgctcttaactagttt

SEQ ID NO: 32765 - DNA, 1095 bp, Homo sapiens
attgtgatcagacattctctgtcccttagggttagtaagctttgttttagtgtcaaagaaaagtatggacttttatagtgacattggtttcttctagcctccgaattatagatgagttacatgccaaatcgcttcgtatcatcaaatggagaggaattctcaagctgggcttgagttttactctatgactataccaaggaaagaggaaagcagctgtgggtttatttaaattctacctgttaacttgtaagtgttagaactgacagttacatagtaactgtaatagggcttgtatgcatttctgagctattaatagaatggataaaagtgttttaataattttctaatattcattgactgagaagcttgaaagtttcaagaagtattaaaatggccaaagaatgtataaggattgtaattataaacaaatgatactgagacattagatgagaggacacatatactattgattaaaatgaaacttcatgacaaagatggggagaacacattgaaagacagaaatactgtaatgaagttaaggagtaaaattttgtggaactaagcaaatataaatacttgaatagaattaatacttgagtgtataatacaagaaatgtgttaatagctgtgactgctacagtgcaaaatattgggtacagaatttaaaatcatataatattctaaacatttagagtctttgcctgaagataaaattggaaaactgaaaatagcagttgtttaaacaagatagatgtttatttctctcatatgtaaaagatcatagatacgtggtcttttccatggggactggtggattgtgaaataattgaaattctcaatattttaataatcattaaagtatattttattgtaattttagaagtatacctgttgatgtttttcaaaactggattttccatttaaaaaggaagaagctgctaaggcagcacaatgggaggcagccaactctaggtctttattccaagcaccctctggatatcctcctgtgctgttttcattcctgttgcctgacgctggtgggcattctgggcctaatgcttcttgctagtggtgaagaccagacatatctcacct

SEQ ID NO: 32766 - DNA, 1082 bp, Homo sapiens
ccaggctggagtgcagtggcgcaatctcggctcactgcaggctccgtctcctgggctcacaccactctcctgcttcagcctcccaagtagctgggactacaggcacatgtcaccatgctcggctaatttttttatttttagtagatacagggttttgccatgttaccctaggctggtcttgaactcctggactcaagtgatcctcctacctcagccttctaaagtgctggaattacaagattgagccagcacacctagcccaatctctttccttttaatggctgcatgtataccacattttctagtctattattgttgggcatttgggttgattttatgtctttcctattatgaatagtgctgcaatgaacatacacatgcatgtatgtttataatagaatgatttacattcctttgggtatatacctgttaatgggattgctgggtcaagtggtatttctgcctttagttctttgaggaatcacggtcttagatacaatttttgaagagataattttggagaaatttccagacaaatttcctttgatccaaagtttgttctcaggagtgagcaagataagtgaaagtaatttcatagctgtaaatagtatagtataactgaagtattaaggaaattttgaaagatttcatcaaggaatgtctgatcgttttctttataatgcagttaatgttgaaatacacagtaaaataaattctcctggtaaattgcattataaaatttaccaggagaataaaaaggtgctttttaaaagtttgtattggccgggcgcggtggctcacgcctgtaatcccagtactttggggaggccgaggtgggcagatcacaaggtcaggagatcgaaaccatcctgggtaacacagtgaaaccccgtctctactaaaaatacaaaaaattagccgggcgtggtggcgggcgcctatagtcccagctacttgggaggctgaggcaggagaatggcgtgaacccgggaggtggagcttgcagtgagccgagattgcgccattgcactccagcctgggcaacagagcgagactccgtctcaaaaaaaaagaaaaaaaaa

SEQ ID NO: 32767 - DNA, 1107 bp, Homo sapiens
acttaaaaaattgaaatattgatatttatattttgagagagagagacagagagatgcaaaagcctaaatatttatggcagcgtcaaactattaacagtggtattctgcagatgggattcagagttaggatgagataaagtgaaacttttccttgtattcttatatattttctgttgctcgaaattttctttttcaaaagcctagaatttgttttcttatgtcttaataattaaacatacacatactaacacataacagtgcattagctgtttgttggcaatagttctcactgtttaagctgactgcagttggcagcattattaaacaaattgtacttttctgactcttggtaggggcatcaataaacaatactgctgaagaataggttagtttcactaatgggtcagtaattatattctagaaccaacctgctcctatagttgcctggacacttgtaagcatcaaaagcacttggagattttgtccacacaagataaatacgaaacatagtatttgcattgtagtatcttaacatgaaaatagaaaattcaggttgatcttgagatctaactggactctgccacttactaagtgtgcgactgtggacaagtttatcgggttttcagatctttcatttcctcattcataaaatcaggaagataacatgcttcttacaaggtttttgtgcatatgtattatagataacatatgtaaactgacacatagtctatactgaacatggcctatttggattgtagtgaggagaaaaagcagtatgattcattgttctttagtagagacaaataagattgactggatccgggttggcaaatactgctagtggttcagatgcctcttttaaataaaatgttgaaacatagccacacccattaatttgcatattgcatatggctgcatttatgttatgtcaccagggttgagtagtagctatagagaacttaagacccataagcctaaaatatatactgtatggttttttgtttttttggtttttttttttttttgagatgtagtctcactctgttgctcaggctggagtgcagtggcgtgatcttggctcggccaacctacgcctcgtgggttcaa

SEQ ID NO: 32768 - DNA, 1224 bp, Homo sapiens
agcacttcgggagatcgaggtaggaggattgcttgaattcagcagttcgacaccagcctgggcaatatggcgaaacccaaaccctgtgtctctaccaaaaatacaaaaaattagctgggcatggtggcaggtgcctatagtcccagctactggggaggctgaggtaggaggatggcttgagccggtgaaggggaggttccagtatgctgagatctgccagcacactccagcctggtgacagagtgaaatcctgtctcaaaaaataaaagcagaaaaaataaaagcaaaaaaaaaatgacagaaatactgcatgtttgtaggaattgagatgtaagaaatgagtctagtaaactgttaattccacataacagcctgcattaaatctgatcattgtattatgctatactaacctacatcaataatcatatcccagaattttgtacttagtataacagtttttgcattcttactaattccgtgggttttttatatctcattgatgagagtgagcttgtcagtgggaaacactagagaaataaagaggagaaacctgatcagaggcatccctggagtatatttaatcaagatgattgccttgggcagctggcaggcatggtgctccagtgagcagtgataaaagtgtatggttatgattattctgatacttttatacttcacttaacttgttcttcccctaattttacagtctgtgggattctgaaaaaccttctgttgggggaatactccagttcttgaaccatcctcaaagtttttcaccacctagaaattaattttcttatagtagtgaagcataatatttatttaatagtaaatatgctactgtataataactaccacagtttcatattataaaagtacattgtcatgacttagcctacactgtgttattggtgtggtttactgtgtccttcaggtttgtgataagcaaatgctcacaacatgattatggtctgtacaaatttagccaaaattgaaatgggtgtaatattaaaaaaattaagtatcgaactttgttgtgcaaaattgatgattctttgaaaattattgtttacgaatcacataattttaaggttggtaggtctagtaaattgtaaactgtctatacctttgctacacggtcatattaagtaaacaaacatctttcctcagttgtcaagaatatcattcaggcttggcgcagtggctcatacctataatcccagc

SEQ ID NO: 32769 - DNA, 1048 bp, Homo sapiens
ttaagtgtatagtttagtggtattaaataggtccatattgttttgcagccatcaccgctgtatgtatccaggactctttttcatcttgcaaactggaaactctatacccgttaaataaaaacccttcagtgcccccaaccccagcttcaggcaactaccattgtactttctgttcctatgaatttaattactcttaagtatcttatgtaattggaatcatacagtatttggtgttttttttttttatttttttgcgactcgctaatttcacttagcataatgaaagcaagtttcattcataacatctgtcagaattatcttttttaaggctgaataatactccattgtttgtgtataccacattgtgtttatccatttgtcagtttgagttgcttccttgattgaagtactgtgaataatgttactatgaacatgggtgtataaatatgtcttcaagacctcattttcagttctttggactacatacccagaagtaaaattgctggattgtatggtaagtctattcttaattttctgaggaaacaccatatttttttacactgtggctataccattttacatccccaccaacagtatataagggttctgatttctctacttgttactttctggattttttttttttttaatggagtcttaccctgccacccaggctggagtgcagatggtgtgatcttggctcactgtgacctctgcctcctgggttcaagtgattctcctgcctcagcctcctgagtagctggaactaccggcatgcgccgccatgtctggctaatttttatatttttagtagaaatggggtgtcaccatgttggccaggctggcctggaactcctgacctcagctgatccacctgccttggcctccaaagtgctgggattacatgcataagccacagcacccagcctactttctggatttttttattatagccatcctaatggatgatgagtgttatcttactgtggttttgatttgcatttacctaattactaatgatattgagcatcttttcacgtgcttactg

SEQ ID NO: 32770 - DNA, 1035 bp, Homo sapiens
taggtgtgtagcaggctacaccatctacatttgtgtaagtacattctacaatgtttgcacattgtaaagaaaattttctgagaaaatgcatcattagataatttcttcattgcacattgtggagtgtttattcatcagttgatggagaaaagagaaatacagtcaagcaacatatgactggacacaaatgttaataataatatatgatttcatgtatatgaaaatgtttaaaataagcaaatccaaatagtagtgattgtcagggagtaggggtggggaggataatgagtgatttaatggatatgggatgtctctttggtatgatgaaagtgttctgaaattagacagtggtaatggttatgcaaattggtgaatatagtaaacctactatattgtatagtttgaaagggtgaattttatagcacgtgaattgtatatctcaactttaaaaaaatgataacagtggttctatcagttagggttgaatttggcattagataacagaaaaccagactgcacttgctttataaaacagagctttatttttccttcataataagcagagttgcagtgttgctggtattgattcactggcgtggtggtatcaggacagatgtctctatgattaatttttggcctgtcactcatgtttgcatatggctgttgtggctccaagcattggaagcaagaggacagggaagcaacattgactgtaccaggaactccaaaacagtcttcacatcttaatggttggacaatgccaaatggtcactcttttctggaagttgactggggacaagatagtggtaagggaattagattttggccagaaagtttctgccacagtgagctttcctgtctaaatccttattttaactgttgtcacttaatattcacactttggaaggacatctactgttggttacaattatgaaaccaacttgaatactttttagttgaacatttcagtagtcttaattatgtttaaataggtttcacaatttactgtttttagtttagtttccggctcccccc

SEQ ID NO: 32771 - DNA, 1576 bp, Homo sapiens
gtttaaggtctgtgtctagactgatgttttttgcttgtggatgtcaaattgttctagcactttttttttttttttttttttggagacagggtctcactctgttgcccagtctggagtacagtgtcgtgatcttggctcactgcaacctccaccttccgggttcaagcgattctcccacctcaatctcccgatgattctcccacctcaacctcccaagtagctgggactgcaggcacatgccacgacgtccagctaatttttgtattttttagtagagacagggtttcaccatgttgaccaggctggtctcgaactttggacctcaagtgatccacctgcctcagcctcccaaagtgctggaattacaggcgcgagccaatgcaccccgcctgtttgggtccagcactgttttttgaaaagcctatcttttcttcattgtattacctttgcttctttgtcaaagatcagttgactgtatttgtgtgggtgtatttctggactcccttctcttctgttgatctatttgtcgtattgttttgccaacactacatcgttttgattactgtagatttatagtaaatcttgaagttgctacggttagttttccgactttgttctgttatactacttcagtatcatattggctactttagacctttggcctcttcagtaaaccagaatcgctttgttagtattcacaaaacaatttgctaggattttggttgggattatgttgaatctataaatcaagttgagaagaactgacatcttgataatactgagttttcctatccacaagcatgtaatatttctccttttacttagttctttaatttctttcatcagagttttatacatttcctcatatatatcttgtacatgttttgctagatttataccttagcattttatgttttggggtgctaacataaatggtattgagttttaaatgtcaaattgtttgttcattcctggcatataggaaagcgattggcttttgtatattaactttgctacaatcactttttagttcaaagagttttttggtcagctcttgtgtggattttctgcaagacaatttcgtctcctgggaacagagactgttttgacttttttcttcccattctgtatgccttttatttccttttcatatcttactgcattagctaagacttccattacattgtcgaaaaggtgagggcatccttgccttgttgcttatcttagtaggaaagtttctagtttctcaccagtacaacattatctgtagtttaaaaaaaaaaatcacgttgaaggctgggcactgtggctcgtgccagtaatcctagcactttgggaggccgaggctggtggatcacctgagtccaggagtttgagaccagcctggccaacatggcaaaaccccagctctacaaaacatacaaaaattagctgggtgtgttggtgtgcacctgtggtcctagctacttgggaggctgaggcaggagaatcacttgaacccaggaggaaaaggtggcagtgaacctagatcatgccactgtactccagcctgggagacagagccagactccatctc

SEQ ID NO: 32772 - DNA, 1463 bp, Homo sapiens
attatagaagattaaaaaaaacaagtcacctggttccaacaagttcatcaaatacatctagactttttgatctgttcagttggttactttcaaaattgggttcatggattagagctgtttttcaaactagatttattatgttactgttctttaccttatgatctttaagctctgttcttgttgcctaacctttgtaaagccagttctcccaacaagatgatgttggcctaacggttcgaggcgattgctaatgcctgtggctctaataagatggaattcaattctgaactccaggcaaacctgccatgagggtttttccttttgtcctctttgtaactaacttgtggcttggatccctgacattgactgtcatattttctccctgatgtgggaccagagacaacaaggatacatccatttccacactgagagacaattaaagcctaaattcaggatagttgatgctttcagagaaagagtttgaggaaaagggaaaaatgtgaaaatcgattatgtgaattggagttactgtgacacccaactaatttggagttgaggcaccaggtaggggaaaaacactcagagcataaagtgcctgtgccaggaattatcttccaagcccagctgccaaaacaacctgctgtaatcttaaggccagttttgcctagtagctgctaaaaccacctgccttactctgtggctagttttacctactgctgtcactcaccaatcagagcttaccaatacttgagaactctcactagcaccaatgagctttctattaaaacaatatacataacatttatctttcctacttaaaccccaatcttctttattcttcagacatactaaagaccacctcagtctttgtgtttgttccaagttgcacttctggttttatatattcccagctgaaatattttgcttagagatttgtctctatactttgattttgatactcggcatactagtccccccaaccctttgcagtcatggatctttttactgcctttttcgttttgccttttccagaatgtcatatagttggaatcatacaatatataatcttttcaaattggcttctttcacttaataatatgcatttaaagttcttccatgtcttttcaagacttagagctcatttcttttagcacagtttatctgtctattcacctaccgaaggacgtcttggttgcttccaagttttgtcagtcagttgtgtgtaaagttgctataaacgtgtgtggacatatgtttcaactcatttgagtaaattctaagaagtacagttgctggatcttatgaaaagaatatgtttagttttgtaagaaactgccagatgtgaggtgtctgtttaaggtctggctcatcattattgggttcattttcttggtgagggcttttgtttgtttgtttgtttgtttgtttgtttgtttttggagaggaagtctcattctgtcgcc

SEQ ID NO: 32773 - DNA, 2040 bp, Homo sapiens
agaccctgtctttaaaaaaagaaaagaaaagaaaatgcagttgactaattctagagatagtaataatatttgatggtgtggataaacagaccagaaattcttaagtatttgaataaagcagtggtctcagcaaagacattttcttcctataaaattaagtaggctattgagacattaaaggaagtcattctttcttttttatttcaatagttttgggagtacaggtgatttttcgttacatggataaattctttggtggtgatttctgagattttactgtacctgtcacccaagcagtgtacactgtgcccaatatgtaggcttttaaccctcacacccttccaaaccttcctccactgcccaaatccccaaagttcattatatcattcttacgcctttatgtcctcatagcttagctcccacttcgaagtgagagcataaccatatttggttttccattccttagttacttcacttagaacaatggcctctacctccatccaagtagctgtgaaagacattatttcattcctttttgtggctgaggagtattttatggtgtatatatactatattttctttatttcatccactcattggttgatgggcacttaggttggattcatatctttgcaattgtgaattgtgctgctatatagatgcatgtggatgtgtctttttcatataatgacttttcctttgcttagatacccagcaagatacccatacaaacggaatcatttgatatgtaacctttttagcctggcttctttacctttacccagcagtgggattgttggatcaaatggtagttctacttttgtttaagtaatctccataccgttttccgtagtggttgtagtagtttacattcctaccagcagtgtaaaaatgttgcctttttaccacatccatgctcctctgtttgttggttttttgactttttaattatgactattcttgcaggagtaaggtggtatctcattgtggttttaatttgcatttccctgatgattagtgatgttgagcattttttcatgcttgttagctgtatatcttcttttgagaaatgtctcttcatgtcttttgcccactttttgatgggattgtttttttcttgctgatttgagttccttgtagattcaggatactagtcctttgtcagacacacagtttgtgaatattttctcccattctgtaggttgcctgtttgctgattattttgctgtgcagaagctttttagtttaattaggtcccatttatttttatttttgttgcatttgcttttgaggtcttagtcatgaattctttgcctaagccaatgtctagaagagtttttctgatattgtagaatttttgtggtttcaggtcttagattttctttctttcttttttttttcccaagacgtaatcttgctctgtctatatagttataatgtgtatttcataagaaaacagtaaaatatggctgtggacatctgacttctgctaaatgcacctgatgtttatttattgaaacatttgtggtgcagtcccatttctataaatgtatcttctaatccctatattaacacaagatacacttcctgggaatgtaatcaggctgaagatgttttaatctctttatattctgttcctcttagttggataattccagatttcaaaatgcctgggttgtgtctaattccagggagctgaagtaaacggagttttccagtgagaaaaagtacattgcattatagcagaagatggtagtcagtatttgtgagagaatgctttattttctactttaggctattgacattagaaataattggaattgttaaaaatatgatgtctggtgccctcccaagattttctgaatcaaaatcaactgtgaccacacattagaatcatctagggagttaaaaaaaatgctggtggctggatctcatccccagagaacctgatttaattatttagagggtaaagatagtgattcttaaactgttttagaatcacctggaagatcccaaactgagtgtgattcagttggtcgg

SEQ ID NO: 32774 - DNA, 1025 bp, Homo sapiens
gtttcgccatgttggccaggctggtctcaaactcctgacctcaggtgatccacctgcctcagcctcccagagtgctgggattacaggcatgagccaccgtgcccggcctcatatgtgttttttaatgcacatgtgaagccatttctgttggatatatatctaagatcgaaatctcttggtcataaggtatgttgttagtagaaaaggccaaattgttttccagagtggttttactgaacttttcttccaacagcagcatgtgagaattcccttttatattctcctgagtgcacattattgccaatcttttaaaattgtagccatttttgatggctttaatttgcactatctctggctactaatgagtttgagcatctcagtgctgaccattttgatgtcctattctgtgaagtgattgttctcatcacttatctatttttatttttaattaatgcatattttgattcataggagctttttatatattcttaatataaggcatttgtcagtttaagtaggttacttatgtcttctcccattctgtagtttgcctgtggtgcctttttatatggtatcttttggtgcagaaaagttctctgtaggctgggtgcggtggctcacacctgtaatcccagcacttttggaggccgaggcagttggatcatgaggtcaggagatcgagaccatcctggctaatgtgatgaaattctgtctctactaaaatacaaaaaattagctgggtgtggtggcgtgcgcctgtaatcccagttactcaggaggctgaggcaggggaatcgcttgaattgggtaggcagaggttgcagtgagccgagatcatgccactgcattccagcctggcgacagagcaagagtccatctcaaaaacaaacaaacaaaaaaagttatctgaataggtacatacgtcaggtttttttccgttaaacagtgcttttttgtgttctgttttaaaattttttttcttccttggaggtaatggagttattcacatcatctataaattttat

SEQ ID NO: 32775 - DNA, 1030 bp, Homo sapiens
ttccttgacagatacgttgaggtataatttacataacataaaattctcccattttaagtgtacaattcagtgatgtttagttaatttggaaaactatgtagccaacactacctaatttcagaatacttctatcaccccccaaagaagaaaatctgtgcccatttgtagtcatttctcattttctaatcttagggtactactaatctattttctgtctctatagatatgcttttttgggacatttcataaaattggaatcatttatatgctcttatgtttggcttttatttagcaatgtttttgaggataatccatgttaaggcatgtttcaatactttcttgtattttgaagagttcttcattttattaatttgtttacttcatggacatttgagtttcaaacatttggctgttgtgaataatgctgtgaacattcatttacaagtcttggtgtagacatatgtttcattcctctttggcagatacctaggattggaattgctcggtcatgtagtaaatttatgtttaatattttaagaaaccgctaaattgttttccagaatggttgtactgttttgccccctccctgcctgccttttttttatttgaggtagagccctgctctgtcacccaggatggagtgcagtggcgtgatcttggctcaccgcaacctccgtctcccaggttcaagtgattctcttgcatcagcctcccgagtagctgggattacaggccccccccaccacacttggccaatttttttgtattcgtagtagaaatggggttttgccatgttggccaggctggtctcaaactccggacctcatgtgatccacccaccttggcctcccaaagtgctgggattacaggcatgagccaccacgcctggccacctctatttatctgaatatttaagataactatttgattagaattcagtatcacatgacattagctgttaccatagaagaagaatcatagatagcatcacaggattctattccagctagtaaaaaataataaaatacaa

SEQ ID NO: 32776 - DNA, 1052 bp, Homo sapiens
atagagtgactcatttgcttagggtaagatttttggtaaaggttcactaagaaatttagaagcttccttagttgatttaaaatacgggaaaaaatatcactagatttacacagaaatgttgaggaacatctagatttgcaattataatactttaagtattagactacttccatttggaacctttctagttcactttaacaagacaatttgaattgtcagccaggagcatttcattttctaaaataagaagaaatgatactttggtatagaagacctattcatgattttttacataggtttaatgtttttttttgaacagacattcacagtctcttttcagccttatagagctctctggtattactgttctgtcccaatgtatcatcccctcctgcctttattttcttaactagctgagaaccttgtttacctctcaaaatatgttcatctgctttgcatttttgtcttttcattgcatttgtctaaaacccaaccacatcacttcatctttctgacttctgtgtacctggctctgagctactgagcacagctggagaaaataacaaacttgcagactggagccactaagtattcatgctctccaatcttttttttttttttttttattgatcattcttgggtgtttctcacagagggggatttggcagggtcataggacaatagtggagggagggtcagcagataaacaagtgaacaaaggtctctggttttcctatgcagaggaccctgcggccttcctcagtgtttgtgtccctgggtacttgagattagggagtggtgatgactcttaacgagcatgctgccttcaagcatctgtttaacaaagcgcatcttgcaccacccttaatccatttaaccctgagtggacacagcacatgtttcagagagcacagggttgggggtagggtcactgatcaacaggatcacaaggcagaaaaatttttcttagtacagaacaaaatgaaaagtctcccgtgtctacctctttctacacagacatggcaaccatccgatttctcaatcctttcccc

SEQ ID NO: 32777 - DNA, 1077 bp, Homo sapiens
gatggctaagaaatctattgtccattgtctgggagagttcctggtgcctgaatcacactgtatcaaattctaattgcgtgtttctgtctatgtaaacttgggcaacttctttaacctttctaagtctcagttttctcatctgtaaaatgggaataataataaaagtattccactgttgtgggctgcacaacagtgcaaatacaaaagtaaaaggagttgcccttctccctgtcagtgtgcgttaaaaagttagcctttggccaggcacggtagctcatgcctgtaatcccagcactttgggacgctgaggtgggtggatcatttgagctcagaagtttgagaccagcctgggcaacatagcgaaaccctgtctctacaaaaaaatacaaaaattagccaggcatggtggctcgcatctgtagtcccagctactctggaggctgaggtgggaggattgcttcagcccaggaggcagaggttgcagtgacctaagatgatgccgctgcactccagcctgggtgacagagtgagactgtctcaaaaaaaaaaaaaaaaaaaagttaggttttaaccactagactatattgtgttgtgcatagatccaaagatcatttatcttaaaagacatatcgtaatctaagtaaatgctgaggttactttctgtaagcaaagaattttagttaattggttctcatcagcaggtagggctagcaatagattaaaactttattaatgaggccgagcgtggtggctcaagcctgtaatcccagcagtttgggaggccgaggtgggtggctcacgaggtcaggagtttgagatcagtgtggccaagatggtgaaaccccgtctttactgaaaatacaaaaattagcctggcatggtggtgggcacctgtaatcccagctacttgagaggctgaggcaggcgaatcacttgaaactgggaggtagaggttgcagtgagctgagattgcgccgctgcactctagcctgggtgacagagcaagactctgtctcaaaaacaaaaaatttattaatgagaatggtcagatgataaggtactctggttaattgagag

SEQ ID NO: 32778 - DNA, 1033 bp, Homo sapiens
tggtgtatgcctgtaatcccagctacttttggtggctgaggcatgagaatcacttgaacccaggaggcggaggttccagtgagctgagatcatgccagtgcactctagcctgggcaacaaaatgagaccctgcgtcaaaaaaggaaaaaaaaaatgcagaggcaaggctgggcacagtggctcatgcctgtaatcccaccacttcaggaggccaaggcaggaggattgcttgggctcatgagtttgagaccagactggacatcatagcaagaccctgtctctacagaaaatgcaaaaattagctgggcatgatgttggccacctgtagtcctatctactcaggaggctgaggtgggaggatggcttgaacccaggaggtcaaggttgtaaggttgtagtgagccgaggtcacaccactgcactccagcctgggcaacaagagcggaagtccatctccaaaaaaaaaagggagtaaggagggagagatagggtaggaaggaaggaagaagggaagttagctgccccaccatggaaactggaattggagagtgcaataataattgaggggagtttggttcctaggttagtgtcaagagttctgaccagaaactgcaggcctggtggagaggacgagttcactgtgtttagattccacatgtaagtgagatcatgaggtatttgcctggcttatttcacttaacataatgtccaggtttttccatgttgtcacgaatggcaggatatccttcagttaagattcagcaaatattttgtgagtacttattatatgtgtggcagtggtatacaaaattgataaatatgtaggttcttctcttaaaaagcttctattctgttgagagagattaaaaacaaaacaaaaaacacccctaaagcaacaaaacaaaccaatagggttaatgaaatgtgggtgggaggaggtgggaagcataaaaaatacaaaagtaaaaggagatgcccttctccctgtcagtgtgccccctgctgccccacgtaacaatagatcctttttatg

SEQ ID NO: 32779 - DNA, 1051 bp, Homo sapiens
cttagcaggaaagcagggaagataatcttgttccatcaagggggagaggtggagctattctgagagggtgtcatggagataagatccgttgacagaataggagtgacaagtcacagtggacgcaatggggtttgcccatttaggagagtgggaatattcaggagccccatgtatggagactgtgatacacagtgagcaagagattgataatatgtagtggggccctggggagaggttattgaacatgaagtcataagacatcatgccttaattttgaatatgaggacaatattttttctttatatgatagttaaaattagacataactagcaactcaacactctgtgtggcatttcctgcatctcacctctcccctcccactacagcataatccctcctcagtctggttctctttcttttggccaggttctacctcccttgcttccctaagcaggtctttccccggagtcagtcatcctgttggtcctgcaataagtggcttccaaaaaatggaataaataatcaaattcttctactctgacacccatcttctatttctttctgaaaatgaacttggattagttgaattgcttttcacaattcaattcagtttcaagggctctacagcctcttcacaatttcttgcaaatttatttccatctacttgtttataaaaggtatttgtttcagagacattgttctcctttctccatcacactcacatcttggccaccccttagagccactaattagctagagctattattttcttgtttgcattttaaaaatacaaatagagctcccatattattcagaatgcaaagttgctatgatgcatatttgaagtaattatctatattaaaagcaggggtttaatttatttcatctttaggggtgaaaggatgtcacatttataattatatttatattctgacataatataattataattctgtaattatattttgatatacattgatttttaggacagtatacaagatattcttaatacaaatgcagcaaaaggatatttataatttaatggcaatat

SEQ ID NO: 32780 - DNA, 1029 bp, Homo sapiens
tctcctttcgtgggtctgaaacatctcagggttccatgagtggcaactggcttctctctctaagagctctttgtctggcctgacacggaataaaagtacctagcatcaccaattctcccacctctcttcctccctctcttcctctctactttcttccttctcaccttccctccctctctccctcacccactgttcctttcttcctccttactttttgaaaaaaatgtgctttccgcccccacccccatggccatatttacattcctctgttattaaatgttagggaatttttacattgcagaaatttaccttaaacccctcctctttcctgattccaggccatccccaccaaaatgtctagctctgaaattacacgctatatattatcttgtgtcagatgatagtttacacatataattctatcatatttgtttaaatataaattaatggtatatcttcttttgcaatctcattggttttgactatttgatgttcagggaattatctgtctggcagaactgaaattagtgtggttgatgtgttgcagcccaggaagttactactcaaatgctccctgtggtagagacagtaggtgctcacccaatagctatgtgctcctacatctcccagctcctggggccatatggctagttgtggccaacgcactgtgagtgacatgtgttcctttcagattgaagcagttaagaactgttgtgcctccttcaagcctttcttctcttgccccagcaactttgaagagtgtagctacaaggaggctgctcttcccacagtggactttatgtgggcaggaagtaaacttttgttgtgtcaagccattgagatgtttaggtttgtttgttgcagcagcagacattaactactctgactaatagagttcctgaactctagtctctgcaacacagtaggcatgcaagagatatttgttaaatacatgattggatgaacaaatgaatctgttccaggcaggaggaggaccaggtccttttctatatatggagccataataac

SEQ ID NO: 32781 - DNA, 1052 bp, Homo sapiens
aataatgctaaaaataacaatagtactaacattctgaagtaaaatttactaggtggagtgctgttgctcttcaaggaacagcagtagttgaggattgtcaagtaccctgaagcacaagggacaataaatgtgacaagaacagctcctgggtttgggggattattcaacaacgattagattggttagagacagtgcacttttgtatgtatatccttgcttaagagtagagaaaataaaatgtaagatttttgaatatgtaacatggggtgttagagtgaatgcgtcttcactgatgcagggagtgtttggccggggtccatctcagaaaggaattcaagagggcaaacatgtggcatgtgtactgctggttcccagtcagtcctatgacaggcattgccacttgatcatgataatcttccattcctgagtccttctcagcatagtcagttgggattggcctgagttggcatttaagatcaaacaatttgttgtccctggctccaaaaaggaacacttttgtgtgcatttagtacctgatattcaaaaactccctcctcaggaagcttcctttggtctcctgacatggccaggtcatggcaccaaagctactagcacctttcactacaccacagagattttagtgaaatagccacatatatatataaattttttaaactactttttgcaatgtgtatgccctggaactcagacatgaatctatgcacactagcttagaggacaatagaagtatccctcatccctactcaaacttgttctttttcacttttcttctcacgagatgggacttcccaggacgttgctcattccttatgttttccaagtccacaaaacccacatgatacagtggatatttctgtgggagttggacctacacatgatctttaatagaggcctggcctgggtgtccatgttttgattcagatgcattggctttaagtaatagtaaatcccaactgaaattgacttaagcaataaagaaacttaccacacataaggccgggcgcagtggctcatgcctgtaatcccagcac

SEQ ID NO: 32782 - DNA, 1071 bp, Homo sapiens
caaacacatatatgagtaaagggaatagtgtgatgaacccatgtgctcatcactgggcttcaaatattatcagctcaactcaaggtcaatcttgtttcatctattaccacctccaactcacccagacttcctttgacctttgggtggtcctgacacctggagaggccttgaagttctcgtaggaaggtgatggaggaaacacactgcagggagcaaaaggggtctggtggtggagtagggtagctgggggagggggcaggctgggggtgttgtcgtacaaaggaagctgctcaatgaggaagctcaggagagctggagagctgatgctaccagatcagcccacaatcttgatgggatgggagttgatgagtaattgctccaggcttcctgtgcttctgtggggcacctctgagttttattctgcacagtttctcagagtcccttgtgggattgagtgctagttctcactagtatgcagttactattattaatgcatagttcatcggccttcctcttttctgtttcatttttctcactcccttacttctttctcttatgagcacctctgaggtaaattaatctgcacccaagtccttgtttctagctccacttttgggggaatgcaaatgtaaacagtaaatgtgtttggacttgtgtgcacacactggtgatgattatcaatgagaatgtctctgttcttgaatgttcatcattacgttatatgtttccaaatgggtttttctatctactttggagggtttgactaacgtattactttggtgtttctatgctgtgttcaccccttcccattttcaaatatattttaaaattctttagtaagttgtattaggtctcaatagaaacagaactagtaggatatatggatagatagatacttatgggtatttattagccagtttccctaataaatgacaggggatttattaagggaattagctgatgtgatcacggcataggctgtctgcaaactggagaatgaaggaagctggtagagtggctcagtctaaatccgaaagccggagaacctgggactgttggtgcaggtcctgg

SEQ ID NO: 32783 - DNA, 1020 bp, Homo sapiens
agactcaggttttcggcatctcagggagtctgcagcagtgatccagttcctttacagggtctatggattctctctccaactagtatttgaatgccattgtgcttaaccagaacacgtatgttattattagaagcaccaatgaaatctattattaaataaaaacacacctattattaaattagccaagcattacactattggaatgctgtttgtgtagagtaagttagaaaaaaaaaatagacaactagggttattttaggaagaatggtcactactttgattgttttcaactactgactactctaactttggccctatattcagatttgattaagacattcctttctaaccttgcatgaatcctcatcttggattcagatgcctccctggaccctcccatgggctctgggtggatgtcaaaagctcgagcaacttccaataggtcttgaaagggtacttggattgtgtttacagcagtttagttttttaaacattgttagccatggacagtgtgtttggcataataatagtaattgggagtacaaaaatgagcaagctgtggtctcttatcctaggattcagtcagatggtagaaaagcatgttccaacgaagtcccttatgctatgatgtggtcagaattgtgacgcagtcctttgcattatcctgctgtgcacattttgatggggctcccaaaccctgaaccattgcactttcagcaactttgaagccgctgcttacccttctctgatcctcatttcatgccccccagtcctgcaagaaaagcaccaggcactgatcacagactcccaggccagcagcagcaggtgtgagaggcttaggggaaggagaagaagggtagcctctctctgtaaaggtgaactcctgtctcctctaggatgcaaagggaatctcgattcagactctcagacacctggaatccctgctgagagtccagcgggagcagaaggcccggaagttttctgaatttctgagtctgaggggaaagcttgtcaaggaag

SEQ ID NO: 32784 - DNA, 1045 bp, Homo sapiens
ggtgcgatctcggctcactgcaacctccgactccctggttcaagggattttcctgccttagcttcctgagtagctgggattacaggcacgtgccaccccacccagtagagacggggtttcaccatgtttgccaggatggtctcgaattcctgatccacccacctcggcctcccaaggtgctgagattacaggcgtgagccaccgcgccaggccgcagactttttgatgtaagcatttaatgccatgaactttcctcttagcactgctcttgctgtatcccagaggttttgataggttgtgtcactattatcgttcagtcaaagaacttttaagtttccatcttgatttcgttgttgacccaacgattattcaggaacaggttatttaatttccatgtatttgcatggttttgagggtttcttttggagttgatttccaattttattccactgtgatctgagagagtgcttgatataatttcgattttcttaagtttactgagacttgttttgtggcctatcatctggtctatcttggagaatgttccatgtgctgatgaatagaatatatattctgcagttgttgggtagaatgttctgtaaatatctgttaagtctatttgttctaggttatagtttaagtctattgtttctttgttgactttctgtcttgatgacctgtctagtactgtcagtgcagtcttgaaatcccccactattattgtgttgctgtctatctcatttcttcggtctagtagcaattgtattataaatttggaaactccagtgttaggtgcatatatatttagaattatgatattttcctgttagactagtccttttatcattatgtaatgtccctgtttgtcttttttaactgctgttgctttaaagtttgttttgtctgctataagaatagctactcctgctcgcttttggtatccatttgcatggaatgttttttttccgcccctttaccttaagtttgtgtgagtcctaatgtgagtttaggtgagtcttctgaagacagcagaaacttggttggt

SEQ ID NO: 32785 - DNA, 1028 bp, Homo sapiens
gtgagccactgcgcccagcctagtcctacgattttttaaaggccttcttccttctgaagctgatgacttctttgactttctattgcactttttaaagtgcactttctattgcactttttaaagtctgaatcatgggccgggtgcagtggctcatacctgtaaccccagctctttgggaggctgaggcgggtggatcacgaggtcaggagtttgagaccagtgtggccaacatagtgaaaccctgtctctactaaaaatacaaaaaattagccaggtgtggtggagtgtgcctgtaatcccggctactctggaggctgaggcaggagaattgcatgaacccgggaggtggaggttgcagtaagccgagatcgcgccattgtatttcagcctgggcgacagtgcgagacactgtctcaaaaaaaaaaaaaaaaaaaaaaaaaaaaagaaagaagactgaatcatgtaatctcgaaagacttgattaaatagggtaaagtgtacctcttgttgccttagtcagattctcacttctgcaagaactgaaattctatgttttattttaaaaaataataaaagtgatagaagatgatgataagaagtttgaatagtacagagaggtagaaagtgaaaaataaaagtcctgtaatctctattttcacttcccagaggcagccattgctaatagcttcttgtctatctttccagaaacagtctatgcttatgaaataatatacataagtgaatcatacatatgaattataaatgagcatattttattcattataaaactaattataacaaatatgagtctttcatatgtatgtgtgtgtatgggtgtatatatatgttgactctccatatctgtggatctgcatccacagattcaacaaactgcggatcaaaaatatttgaaaaaaaaaggatagtttcttctgtactgaacatgtacagagtttttttcttgtcattattcctaaataattaagtataacagctatttttatagcatttacattgtattaggtatt

SEQ ID NO: 32786 - DNA, 1073 bp, Homo sapiens
tctgtctgatcagacctggggcacacccaaagaactctcctagcttgggatccggtcaggaagaaaccaggacggtccctttaggagggtgggcagggctatctgcccggggggtgcggccgcccctgcacagcaggctatcgattgtaccggaggcagggtgtggggaaaccggggcaagtccagcctctcagcaaggccaggaagccattcacttggatcctggattttactaacggattaaacgtggcattcccgccttcccccatccgttacagacctaaaaatagctcgtccgagaggggccgggagaggctccacctcttcttgaggtggggcggggcggctgtagtaggagctggaggcaccagagaccccaagccacgagctgaccgacgcaccgaggagctctctgtccgcggtcccgcaggttggcggcactggagtgggccgggcaggctctgcctccgccgcagagagcgcccggactgcgtggggctggggaagcatcccgggaacggcgggcggtgagcattccgggaaccatctctgggctgtctggggcggtggagcaagtctggaggcgggacgtggggcgagtatgggagccgccacctcgagacgtcttcccgccgtccccggctccaggagaccccacggtgagcgggccgcgcgggaaaactatgccaggaattcgtcccgggagcggggcgggtgggtagcttggctgcagtccgagggatcagcgattcgggaggttaaacattagcgggggcgaactccctgccggggtgcagcggggcgcgggaggagccggctgcgtgcgtccgcgctgcccagggcgcgcccttctggcccggcgcggccctgcagcccggccccctcggcctgctccgaactgcggcgcccagggagggaaggacccgtgcgcgggggacgaatgacgggatgccccaagactcggcttcactgggaagacggccttgggtttttactttttgaaaaaagaaaagtgatttgggagggcttgatgatctgagtgccgtaggtaaaggaggattcttttagtaatg

SEQ ID NO: 32787 - DNA, 1034 bp, Homo sapiens
tataaatgtatcgtattgcttgtatctttctcaaacttgcttctttgtttaacatgctttgaagtctgtgttgatacatgtaatctaatctgttcatttgtgaatagtattccattatataagtatatcacaactgcatattaatttcattgtgtctgaatgaattatactttgatttcaaagttaaaggaatagcttggattcacatcgatttcacaaatttcatgaattacattgacagctaaaacttacatcctgaatgtaactgttacaagtctgttccctgccacttggctctttcttattctaaactgttggaatggaggtacaaaataggctgtcttctctgtggcaggtgtgggtacaaattggaaccacttttgggaagctgtttatcaggtttttctattttatctcagggatatcatttatgcatataatacacatatttctttttcggcttaaaacaacaataatttgttattttattaatattgggagcataaggaactagtctctagtcaacagttagaaagtaactgaagtgtgccagcaaccatgtgtgggaccttagaaagcagatacacccttatttgagcctgcaaaggaaggagactgcagtccaccatctttttaaaaaatttccctagataactttttaaaatcgtatatattgaaggtgtacatgatattttggagacctgtgtatatgtctttgtatttgcagtatttaaggaaattaaatatagcttatttttctgcttcaatctaaggtcattttgagtgccccccttataattcatctacaatcaggagtatatatcatgtgagaaatattgaagtctataaattaaaacaggtacgtaaaaagcgcattacagcagacttgaaaacattttaaagtaattctgtgccaaaatgtattttggtcatattggtatactactttcaagaagagcaattctgtatttttaaaatgtggatcttgagtttttaggaggttcacagatgaaccttttttttttctttttttg

SEQ ID NO: 32788 - DNA, 1002 bp, Homo sapiens
ggaaatcacttatttatcctggaaaaaggattcattccaggatgatgaaaggtgactgctcctgtagagacagggacagtgtgcacagtgcatgacacagagagcaaaactgtagacgctggtcatgttttcctctatttcaggaagaagtcttaaagagagtttaagggatggtggaagatatttcttcctatttctagagcatctcccatctcagcactctgtcttctgcagatttgaatatttcaggagactcttaagaacttcctttgtgctcacattcagaaaatattccccaagagaaaggaacaacgtacctgctctttgacctcaatgttatgttccccttctagaataagagtgacggcttgcataatttgctttccatgagtactcattattttatctatatgctgtaaaacaatgggaaatccataattatcaaagaaacaaagaccacaggacgaatacaaggcttctaaaagttaaaacaatatgattcacaactgcttcatgcaaaacactatagcatatagaactagatgccaaagaacagtgtttattatattttgaagctgcagtttgccttcaaatatgtcatacacacacacacacacacacacacacatgtatatacacattacacatacatacatacatacataaagttgacctgacagaatatgaaagcacaatcattgggggtcctcaaacccaaatatattaaagaaaaaggaagcaaaggccaagtacggtacgctcacgcctgtaatcccagcactttggggggccgaggtgggccaatcacctgagggcaggagttcgagaccagcctggccaacacggcaaaaccccgtctctactacaaatacaaaaaattagctgggcatggtggtacacgcctgtaatcccagctacttgggagactgagaaagaagaatcacttgaacccgggaagtggaggttgcaatgaccggagactgtgccactgcactccagcct

SEQ ID NO: 32789 - DNA, 1035 bp, Homo sapiens
tacaggtgtgcacccagctaatttttgtatgtttagtagagatggggtttcaccaggttggccaggctggtcttgaactcctggcctcaagtgatctgctggccctggctgcccaaagtgcagggattacaggcgtgagccaccaggctcagcttgtttttgttttaaagcatttttactttgtgcctaggcgagttttcttttgatttatcttcctttgattttgcagcatttcttgagcgtgtagcttgatgtctttcatcagtttgggtacattcttagctattatgtcttcaaatattgtttctgcctcattttctcttttcaatttgcccaggagtccaattccattagtatttatcattgactaccctatgtctttcatgtttattctttatgtttcttccttttgtcttttgatactttattctggatattttctttcggttattgtattttttagttttagaatttctagtgtctttgctttggtttccagctttctgctgaaattatctgttttgtgtctctgaatatattaaatttacttattttaaaatctgtgtctgattttgggaacaagatagaggtggtgtttgcataatattgtgaatgtcctaaatgctactgaattgctcactttaaaatggttaattttatgttatgtgaacttcacctcaatttttagaagtcagcatgtctgataatttgactctctggttctcagtggattactttttatagcctgctgtttttgtaggtttccttttatgctgtttttactcctggtgtgcctggttgttttttactgagtgctgagctttgtataggaacagttgtagaaataagttgagatctactgtggtgttattttaccctagaggtaatcatgattgcttctggtagacatctaggtgtactagtaatctgggatcatcttaatccagctttagagattgtgatggtttgaaatatacctcagtcccaaagaaaactagtgtatttctagttcatcattattcctagggtgtagtg

SEQ ID NO: 32790 - DNA, 1050 bp, Homo sapiens
tatgtctaaaactgagttctttttatagaaatggcaattttataacattaaataattaactccctaattttaaaaaactattaaaacttgggtgtttattgtgattaaaagaaatgaatcttatgctggtaactaatgtttagttgtatgagttgtttctgatctttactaacattatgtcattataaacattgagtccttattttagtggttttgctgacacaacactatatatacgtttgcatatgtgagttcaggctatctaaaagggagcagtattcatcaggcagggtctggaagtcccctcagtgtgtgctggcagtattggaaggatcagatgagttagtataaattccatggagtccgagagaattaatcagagatactagggggctctagtatgaggacagaggcagttggtgctctgaccttgtttatgtgccagcttggggcaggcagtagtagagctgctggtattgaccatagtttcagagaagacattgtttgacaaactcctctaccattagaatgctaaatttttaggttggctttgtttttttttgtgttttttttttgtttgtttttttagacagagtctcactctgtttcccaggctgatgtggtgtgcagtggtgtgatctaggctcactgcaacctctgcctcccgggttgaagcgattctcctgcctcagcctcccaagtagctgggactacaggcatgcaccaccacgcccggctaattgtttgtattttagtagagatggggtttcactatcttggctaggctggtcttgaactcctgacttcgtgatccacccgcctcagcctcccaaagtgctgagattataggtgtgagccactgcgcccggcctaggttggctttgttaacaaggttgctttcctcatcaatagtatatttataaaatctctctaaatggaggggtattttggaaatactttctatatgcattggttttgaccttgctcttagatatagggcatgtggaaatctgaagctctttaaatcattgacttattggtgtgaaaaag

SEQ ID NO: 32791 - DNA, 1030 bp, Homo sapiens
tgtgaagaccacccacactccccttggctgatccacatgttctctcatacggttttggcagctctgtgttctcctcacaattaaaaaggaaacagaggtatggtttgggtctcactctacacgcttggaggctgaaaaccttttttgcttctgttcttttctcttgttcagggatgacctggaccgagccattgaggaatttacactgtcctgtgctggctactgtgtagcttcttatgtccttgggattggtgacagacatagtgacaacatcatggtcaaaaaaactggccaggtgagctgctcctcaggatctgccaagggccttagtaatgctatttcttatgtatagcataatctcttgtgcaactcagccagattcttttgtgattcttagtgtcatatctttgtctttacttcaatttctcactacctctcgtttcatatatagtctactacatgtattcatttgtttgcttgcttgatggtaagcatttatttgtttaaaaaattactaaaggctgtgtgtggtggctcacgcctgtaatcccagcactttgggatcccgagccggccggattacctgaggtcaggagtttgagaccagcctggtcaacatggcgaaaccccgtctctactaaaaatataaaaattagccaggcatggtggcaggcgcctgtaatcccagctacttgggagactgaggcaggagaatcacttgaacctgggaggcggaggttgcagtgagccgagatcgcctcactgtgctccagcctgggcaacaagagtgaaactccatctcaaaaaaaaattattgaaaaaatttttgtagttaaagtggcctgttcttcaatataagaaatagtatttgggatacatttgtacctaacagaaggagcggataatgtactggatgtattaaatttaaagattaccaatgctattcatatcctttgcccactttttgatggggttgtttgtttttttcttgtaaatttgtttgagttcattgtagattctggacattagc

SEQ ID NO: 32792 - DNA, 1098 bp, Homo sapiens
tgggaatccacaatagtatccatgcacacggccttctagattcctaccagtaattttggagcttttcagtgcaccatatggacatgtaattacctaccttttccttttaagctttcagttagcttgttggttcccccaactgttatttacccccaagacagctacaatgttaaacagatgcctctgagtatttttgagaaactccccaggaaaaaggcagttcatgctaggtgaggtctgagtcaggtcaaataaacatagtattgtaagtgggatcttcctggaaactaccagagaggccaaagaatgacagttctgtgggaatcaggctttgaaggagctccaacttcatttttctttcctctagtggctgtcagacatgcattcaccatgattgtgggctatttgttgtcaaggctaccacataactgggaagggggttgggactaggccatggtaaaacaaaacagattcacgttggggtgtgtgtgtgtgtatgtgtgtgtgtacgtgtgtgtgtgttttaaataaacacttattggattgctgcaagcctttgttttattttcagaactctaaaatagttgatttcaacaatttttgtcagtattcttgttgcttttatggagaagtagatattcagagtttgatatcatttggctatagaagtttgaaatccaaattgactgctttcctcagaagccttgaggatattattcatttgtcttctagtctcggtttttaaaaagtctgttctcggtctggttatcggttctttgtaagtaatgtcttttttacaccttagtgcatcaaaaagtttctctttgcctttgtctgcagtacaatctgtgcgtgtgtatttcttttatttcttttttttatcaccattttcattgtgccttttcaaagaagtcacatcttttagtttctgaaaactttgaacatttccttcagtattgcagttctcccactctcattgtctttttctgcagctctagtagatttatattaaactttcctgttctctcctttatgtctcttaaccttccatattttctatcttttcatatcttatcattataacagttttactcaagt

SEQ ID NO: 32793 - DNA, 1051 bp, Homo sapiens
taactataaacaagcataatatatttaatagaaaaatagctgctttagtttttttctgaaccgtttataacatttatatggttttggtgccttctcctgtttcttgataccagcactcttgatttttatgatttgagatttgacaaagtaattcagttatccaagacccttatgtgtccctccatgcctgcttgatttcttcatttcttccttcctttcttttttttttttttgtgtgtgttttctacctgcttgatttttaactgaaattaataatgtattgctattttccagtaaagtgtacttattgtcttaatatatttgggctcaatgcagacctatttatttcatctagaaagttgtgggtggtactgtcattactagtgttattgagtgaaggtaaaggtatactataatgacagcaattttattcaatttctttattaagtaggtaatttccagaaatacacgaaccttacttcaccaagttcatataagagtaaaatcaggaatgagaactaaagttattcctttgttttctaaggaaattgtattaatagatttctcatttctgactctgtactcagacattttttttccctcccaatctggacttcatagtgctgaaactaatgcttgtcagaaaaaaaaactaccttttttctttctttctctctttctccttccttccttttcttttctttttcttcttttcttcttttttcttttctttgctgagcttctcaaaggcaataagctctataatgttgtgctcttaattttagttttatttctgaatatggttttcttattcatatatttttttccactcttttttttactttcttgtgttgttctagaaccttttcttatttttaacttgtcttttctcattcattcagtcttagtttttaaacctctcagggaataacaaaataagtattccttcctttttcaaatatgtacatcactttttaagtaagaaaaaaattggaatagatgctaatcagggcattagtcaattgtttaataccagtcagatttcatagat

SEQ ID NO: 32794 - DNA, 1047 bp, Homo sapiens
tcattttgcttttaaaattcatgtttctgttacaaagcatagcaatgccagatcttatgtagtctaagtacaaatgtagtcatttacacttaaaattctacaaatatgagagccaaaattcattttctttaatttttttaaacagattattgaaaaggcagctgagattgcaagcagtgatagtgctaatgtgtcagtaagtatcaagagttttaaatggccctttcttatggagttgtgcacattattaggtatctttgcctcatagtaatgaactcacagaagaccgtaactcatatgcaagaacagtctgtgagtgtgggtaagtatgcacatgatagtgttttgttaaatggcagcccaatttgtgggtgatctgggttcagtgggcaagcccttttctgatacaagtacaggtttagcaggtaatctataagggattctgtggcacctcatagattaacaatgctgtcatagtgaatattatttagtttaatgaggagactgtatttctctcaggtaacaaagcagatttagtaataggcacacacatcatcatgcaagtgacccaaatttcttccatcttagtgctctgccatatttaacatgtattttctatttcatggtttaatattactgcttcagcttcctactttactatattccagccagcaggaacaggaaaaacaatagtagtggtcacaccccattcttattcaggatatcattagtatgtatcatttctgcttacatgtcattggccagatcttactgaccatgcctaagtacacacgcatctgagaggtgcagtctttagccacgccatcagtcatgcgcttggctaagagtaagagattctagtactaaaggaagaagtggagaatggatattgagggtcaaatagtagtctctgccacatatactattcccatttgtttctatgcagatactacaaataggttactttgttgacttgggttgctatatttatatctatatctacatctatatatctatatctatatctacatttatatatctatatct

SEQ ID NO: 32795 - DNA, 1165 bp, Homo sapiens
acgtgttttcttggattattaaagatttctcattttggctgggcgtgatggctcacacctgtaattccaacactttaagaggcttaggtaggtggatcacctgaggtcaggagtttgagaccagcctgtcctacacggcaaaaccccgtctccactaaaaggacaaaaattagctgggtgtggtggcgggtgcctgtaattccagctactcaggaggctgaggcaggagagtctcttgaacctgggaggtggaggttgcagtgagccgagatcacaccaccactccagcctgggtgacagagtgggactccatctcaaaaaaaaaaaaaaaaatcattttcacaaggctttttagtccatattctattttattcatatactatttattatgaaatgttaattgagttttaaggttcttcttaaacgtaataaagatagtgagcatttttctatgtatatcttgttctcattttagaagattattttggaaatcatccagaactttctagaactaacattattgaaacaaaggacatgtgcatgtttacaccttaaagttattcttagcatatttatgcaatggtatctttttcaacagcattatcctgtagcgtgggtaaatacgatggtttttgactttaaaggacaattgagaactggagacataatattacacagctggtcttcatttcctggtaagatttacattcttatccttagtgttaaagcataactaacttttggcatgtggactaggtaatatttatgaatcaccgttctttcaatttaataaataaaattatcattttgtattatttattctaaaatagatttacacaaattattttaatattatcataaaattacttgtttctgagtagatttctttacaaattttgttttggtttaaaatcggcctatattttattttattatttattatttttttttattttgtcgagacaaggtctcgctatactgccaaggctggtctcaaaactcctggcctcaagtgatcctcccaaagtgctaggattacaggcatgagccactgttactgacctgtattttaaacggttattttaacaagttagtattttaaacatacttccaacaaataatgtaccattattttgctagtaacaagttaactctagtattaaca

SEQ ID NO: 32796 - DNA, 1066 bp, Homo sapiens
tgggattacaggcatgagccactgctcccagcagattatgaatcttttagttaacctatgaggtagggagggagtgggagtaggggggatgctaggtcttgtttgaagatagtctgttattgaggattatgtttcctacagagttaagaacagaacttcatgaagcagagaggagtgtcagtagtgttgaaagctctttagacaggttagttgaaaactgaagaaacttttttggatttgacagttaggaattcattgatgatcccagcaggggccattttaggagactgtttatggctgaaaatcaggttgcagtggagtgaagagtaaagaggaggtgataaaatctaaatatttcagctatttcatttattaaacccatatgtaatatagctgcagtcatcacttccttaagcactggagttatagttagggtaaccatatatcctggttcaaatctcctatagatcaattaatgcccaattatttttatttttgtttttttgaaacggagtcttgctctgtcacaggctggagtacagtggcaccatcttggctaactgcaacctctgcctcccattttcaagctattcccctgcctcagcctctcaagtagctgggactacaggcgtgtgccacctcgcccagctaatttttgtatttttaatagagatggggtttcaccatgttgaccaggctggtctcgaactgctgacctcaggtgatctgcccgcctcaacctcccaaagtgctgggtgggattataggcatgggtcaccatgctgggcctttttttttttttttttttttaaaagacagagtctcatgctctgtcacccaggctggagtgctgtggtgtgatctcggctcactgcaacgtccgcctcccggtttcaagtgattctcctgcctcagtctcccaagtagctgggattacaggcacccaccactatggtcggctaatttttgtatttttagtagagacggggttttaccatgttagccaggctagtctcgaactcctgacctcaggtgatctgcctgcctcggcctcccaaagtgctgg

SEQ ID NO: 32797 - DNA, 1308 bp, Homo sapiens
cgatctaggctcactgcaagctctgtctcccgggttcacgccattctcctgcctcagcctcccgagtagctggggtaattacaggcgcccatcaccggtccggctaatttttttgtatttttattagagacagggtttcactgcattagccaggatggtctcgatctcctgacctcatgatccacctgcttcggcctcccaaagtgctgggattacaggcgtgagccactgtgcctggctgagatggttcacttttaaacatcatctcccacttcctaattctgatcatccttttcttgggggaaaactttaaattcccgagtaaattcccttgtcttcatatatatcttcacttgtggtttcaggaacttgatgggaaacctgcttctcctactccggttattgtggcctcccacacagccaacaaagaagaaaaggtaggtcagacatcatactcaaacctccctctaccccatcttcctccccatcaatatctggaggatacgtaggcctctgtggtttaagtgacatcagtttcagagcaggggctttgaaatgggaagatgctctttttgactattaagaaaatcttagttctcactttgaatcatgaacccacggataactttcctttaacagtactgtaaaacttaattaccctcttccttttgtctgcagagtttactcgaactagaagtagatttggataatttggaattagaagatattgacacaacagatatcaatctggatgaagatattttggatgattgactgtaatgctttccatttacctgactaaacagatcattattatatataggtattgattgctaccctgaccacagtgctttggactatgagaaacttcttagatttttatatgtaaatgctgtggaccactgggagcacaatgcccacatcatcttaagaagagtttatgtgcagcatttaaatcactgtgttttccttgttaactaaaacagacatgggctttgatttttttcatactattagaccatatctcataaaaccttttgaattaatgaaggtacttgtttcctttctcaataatgaaaataggcttctagttttagaaggctgagccgaaactacaccttgcctagggatcagccccactgtcttttctttgtataactaaatctgcattttcaaatgttgtcaatcacatttttcttagagctgaatatccaggctgtaattctctaaaccctttttcttgacctcattgcatcattccacaggtcttgccccgattttgtctagcagctacccatttctggagtc

SEQ ID NO: 32798 - DNA, 1048 bp, Homo sapiens
ctggttctagagcacgcatcctcagtgggtgtaaacattgacttgggggcttactctttatgaataaagcatagctatacatatgtatatgcattatatatgtatatctgtggtattaaaatttcattgggggaggtgattagaaaaatgtccagaaagacttctagggagggtgggtgaaaatgaaaaaaataaaaaaggtgataaacactgttctagagcaagagggaataggctactggtcctctgtgtagcacattcagtgtttactgacagctctcctttcctgtctccctttggtctttccattgctaggctaaatagcatagccacataatagctggccaccctcccaaataatgccacataaaattgttaagtgaatacttatcatcttgatataagaaggtaaatgttgtaagaaaccaagtatgtgcagtttgtcatatccactcagaaatccaaatcagttgtctatgattttgttgtgttgcagattttctggtctgactctggagagctagtctgtattgctactgaggaatcattttttatccttaagtatctgtcagaaaaagtcttggctgcacaggaaacacatgagggagttactgaagatggcattgaagatgcctttgaggtaattgcatcagcacaactttcgctttcagctttgtttttaaatgatttatattcttacaacagactttactgattttaacatttcgttataaattaggtgtagggagacagcatttaaggatttctggtgaaatgtgaaaaattaaaatcgtaactcatagatcaaaatttaaaataaatatgtttaaaagaaatttgtactttgattttaagaattctttagacttactttgatatctttcagtaaagaaattatagttgttttggtcctaagactatttagtcagtgatttaaataagctcccaaatggtaaatcatttattgtgcagatgtcctagattttgtgaaatacttaatatttcattgtcatgttatgaagggtctaagtttagatcagtattcttt

SEQ ID NO: 32799 - DNA, 1024 bp, Homo sapiens
tgtttaatcattcacctattgtggacatttgggtcattttcagtttctaaagtggtttgtaagccctagtaattcatgtcatacacagtataaaaccctttcatcatttgtccaactgtaaggagttctctgatctcttaggaaaacagtacatcagataatcttcaaatatttattttatatttttgcataattactgaaaaatatttgaagatatttccaacatttggtagaactatgatttagtatataacatgttatgtttgccttcccttttttctcccaggtatgcaataagagagagcaacagcattgtaaagatatttaagaactttaaggaaaaaaaatcatttaaaccagattttggagcagaaagtgagtgtgatctacatatgatacatttttaaattctttgtaatggctcaaaaatgcctaagcaaaactctttttatgttccctttaggtatctacggcggcttcttattgggagtcagatctgtaaatggcttagccttctatgactgggacaatacagaactcatacgaagaattgaaattcagcccaaacatgtgagtttcccctccattgttgtttttggaatatttatttttgtgatgagttctgggtccctaaggccaagaagtgtcttttgtaccctgctctccctcttcgattatcaaaagccatttaaaatataaaacagcacttagaatttaaataacttcttatacttttgaaatacacattgtctacggcctcattaggatacaacaatcctgattttctgagcaattggaggtaagtggcagtgccattttgacaggaaaaaagcatgctttgagaacaagaagtcagagaattcttgacttggaaatgccttcttccacatagttcagaaaaccttttcatacattttgatgatagctgcttgaacttgaggtgaccatctccagtgacaaagtgtttacctttagaactgcccgctgctttgacagttttcactgtcaggagattatctttgga

SEQ ID NO: 32800 - DNA, 1025 bp, Homo sapiens
actgttggtccagtgcatgaggcactacctgatacactgtcaggctcctggtagatagtaagtctttgttgaatgattaatctgtctttgattctccctgttttttccctgtgtttatatcaccaacagcatttaccactcctatattgagagcaaattcttgagagagccaaaaaggtttttggaagtaaaaaggtttttagatgtacttgaatttcaaataaggagatgctatatattctttgaggtggtacatgcagtggtttaaaaaacatagtattttaggatttgaagccaacttgctgattaaattatataggcaagccttttaaccatgctgagcctctttatttatctgaagtgaagatgatattattgccttgcctacatcacaggattgtcaaaaagataaaataaaattagataaaattgtgtatgaaacctataaagtaccatataagtattagtcattagttatactttcctaatctacgttgagtatttgtatgtattgtgtgtgtagcttttcttactctttatttgcatcagtcatagcccctaacatggcgttgaaccttggctatttcttctgcagctgctttatttttactgctcagcagatccctggatttgttggctcctcatgagcttttgtggatttttctgccgtgttatagatcgcatgttgtgtctactctcagtttctgtatcatagtcagctggtagtgattctacaggttagagttgaagtgcctactcattcagcctttgtctaaagaatctttgaactctggcttgaaaagtcagagtaggacagttcttatgaaccggtccctattacttttttagtgcacatggttaatcaatcagtaagattatattgtgtttcttagttatttcatttttgctctctgatacaaaaaaggattagaaaatgatagtttgactttcagacttttaagaacaggcatcaaagaaggagaacaaagaggtaccatgatctctgctctttctaggagggtctc

SEQ ID NO: 32801 - DNA, 1033 bp, Homo sapiens
gaaaattgtgagacatgctggcttatatgaaaaccctcaccatggttcctgcctggtacataatagactcttcatacctgttgactccatagagatttaaaaagaagttaaaatttgtaatagtaatttatggggcagaattcagaaatgaagtaaaaagccttgattttgggaactagcaaggaatgttaagatgatgatttgaaagtggaaaattggagctgggagaccgaggtgggtggatcacaaggtcaggagaggagttcgagaccagcctggccaatatggtgaaaccctgtctctaaaaatacaaaaattagctggacatggtggcaggcacctgtagtccccagctactcgggaggctgaggcagaatcccttgaacctgggaggtggaggttgcagtgagccgagatcacgccactgccctccagtctgggcgacagagcaagactctgtctcaaaaaaaaaaacaagaaagtagaaaattggagagaggaagggactgatgacagtgaaaacatttttgaggagattgaagagaagagccagagaactctgatcttttaaagtaagaggtaaaggttgttgctgaaaatgaaggaggcgtgggtagaacaagacttgaagtagtcaatgacccaaatttgataaaaatccccaaaaaagatgagtaaaagcattgtgaggtgttttgtctcaggaagttgtctctgctagatcttctttttatattcaaaagtaaccttaaatttctgtcccattcatgatcatcatagaagatcacagcaataaagatttgacagtaactcaacttgccaaatgagcttttaggttgtgtttaagacctgttgaaggggaaatatattttaaatcagtcttttctcagcatgcctcctagagagaattaagcccactgccctaaggatcattgtatatattgaattaacttttctcctataatggcattttttggagaatggagaaaatagttattcaaataattatctgttctgtaattcaaaggaagaa

SEQ ID NO: 32802 - DNA, 1048 bp, Homo sapiens
gggaggcatgtcactgtcccattgtaagaagagcatgtggacagcgcatgctgttgtgcgtgggttggaaaatacatcctgccacaggtctccaacatgtctgactactcctctgagaaccacctggaatgacacagaagctttctgttttatttattaaattttttgataggtaacatatttacatgattcaaaagttaagaaaaataaatatgaatatattcaatgaaaatattccctctcatctcatagcttctacctttgcctccccatagacaatcactgctatattttttatatgctttcagagtttatagatattttgatatttcactctttttatacaaaacaatatttcatactctctgttctacattttgctttttttttcacttaaaataattctggagatgacttatcaatacaaaaaggtctctctctctctctctctctctctctctctctcctgttacaaatgaatagtattctattgtgggctttacttgagatcactaaattagttttctatgggtaggcactgagcagtttccaattttttaccgttacagacaacactgcagtgaataacatatgccatctttcatgggagataattaggaagccttcctcaagagctcaagccagcatggtcatcctcttcccacagtgccttatacctcattccatcatggcacttaccatgtctcctttcatcagaccatggctcctagagattatggactgtggctactgtaacttatttccatactgcctagcacagggccctctgtgtccacactttgccgaagacgtctgtgccaaggagggaagaaggagggagggaggcaaatgagtacaggtgtctcaggggcctgtgtttcgcctcctcttattgcatctgtaactgcatttcttagtggcaggtaccacttaaggcctgtgtggtttcttcctcaatctgtcactgaaactggaatctggttctaccctgtttggcctggcttcgtgtacagggtgtatcccagaagactccagcctgaagcctagt

SEQ ID NO: 32803 - DNA, 1050 bp, Homo sapiens
tttgacctgggagctatggagtctaattttgcaaacttctcacccagcagagtaccaggccaaaaaggcatgaatcagtaatgaacaaataaatgaacataaacccaagaggcagatttttcatggtatatgtgcacgtgtgtgtgtgtgtgtgtgtgtgtgtgtatgtttaaaaggaatacgaaggtaaggaaagatgactaatgtatttaagcatttgctgagggccaaatattttcatgtatgtcgcagcttagtggtgaacaccatagtcttgtagtcagataaaattgctcgtgtgactttcccatgtatcaccaaagtgctctaaacctgtttttgcatctgtaaaatgagaatcactgtagctaattcatagggctgttaggagcattaagcaagataagcatatgaagcactgacctcagtatacaacatgcagtatggtaagtgcccggtcaataatggctgccttattattatatttattaatcttcccaatgatctccacagtggtaaggaaactgaaggccctaggcacagaagggtggcatggattctgaactgagtcccatctggaagcaaaggcactctgcagacactaaccagacagcttgtgtgaaatgaaatcaactttatgtgcatttcattcgttacttaaagcacttgactaagtgaaattttaaaaagaaaaaaacctgcaaaattataatttgtgtgcctttcaagttcaggtattttatcatctcgataaatcttccatacatctatgttaaaccactttgagctgtcaaagctcttaaataaagtggctcgtcctcaccagtgtctgtctttgctcgtttatcatggttccccagtaaagatggacagatcccattttgcggggcaggcctcaggatggcagctcctgccccattggtttagctgtgcagttctgcatgatggtatttaacaaaccacagtggactcatgattccttcatcattgtgtctcccacatacacatagacccatgtgccactctaggaattaggaatagaaaggcaat

SEQ ID NO: 32804 - DNA, 1021 bp, Homo sapiens
tgtgcgtcctgcagctctttgtagttagctttgagatgctgagccatttcactccacagtgtagcaaaacaattccacttgcagaaggtttgacaatgttatgcatttgcaataggaaatcacacctccaggagttcgtgccctcagtgaatacatgcttccagagttaaacgtagtgagccctttctaagtcttgcttttaccgtaataaaaattcaaaaattgagaaagtgatatccattaccttactttcatcatgttagaggaaaagcctctattaaggccattttgctttaagccacaggtgaaccccagaatttgcctcagttcacctagttaatcaacacaggggcaccaattgctatgtgtctgctctgtgccggtgagctttatcatcctcatcctttttcaaaggagaacactgaagttcagaaagaggaggcaatcgccaacagccatttgttgagtgctggggccagggtctgacccggctctgtgaggtgccccgggcagagttctctcctcctatgatcctgtggggaagtaaccccagagagttggcctgccttttgcttccaaggatgtctttgactctggtccctcacacaccaatcaagtctgagtttggggacctgccaccatgtccacaaccgacattaactcagaatcctttccatgcacagaatccaccttgggtcaccttccctgctcagagactccctagagccaaactagtcccaaacccagggattcatggtggacttcagcccaggacacaggctataggcatcacacagtcccttcccaactatccctgcgagactccactgcagcttctcctatggcccactctggagtcagagattgtcccaggctggccatgaataggcctttcaagcccagagaagctgagcttcccttttctgcagtcacacccctgtctgagatacagaacattacccctacctagagaacaggctagtgctatagcagataagccaaccctatcactgaatggaag

SEQ ID NO: 32805 - DNA, 1032 bp, Homo sapiens
gtaacagagttagggctaaagtttgtgggtttctatcatctgtcagaggaatgttgttttaattgggaaagtgttttatttgagatgtcattcccctgacagagcagaatgactcatggctctctaaatggtagcaatttctagcactatagctggatttaggcccccattctgttacttaaactatagaatacaaaactattcagacctctccagcaccaccaaaaaccctttactttgtttcctgatgcaggtttgagtatcttttcaattttgacaacacctttgagatccatgatgacatagaagtactaaagcggatgggaatgtcgtttggcctggagtcaggcaaatgctctctggaggatctgaaacttgcgaaatccctggtgccaaaggctttagaaggttatatcacaggtatgttaactgatgctttcatgtgttgtccctgattaaatgttgaatccaaacttgttaaaacctttcttatagaaaattgcaaaattttagaacatctgtgcttgtgtcgacaaactgaaacctttaacactttaggaccattttttcaaaaattagattaaatagtttgtttcataacattatgaacttacatctatacaccacacattatatactattacatctaaattggctcactcagcactgaatttggctcttcagagagatcttgtaattcccagtacctagcttagagcctagttagagtaagctagtaaaagctcaatgagggagttttaaaaaatcttctcttagtgccctgtggatacttcaagggaaactttgggcaatttacaaaagaaagtaggtacatcctggccgggcgctgcagctcacacctgtaatcccagcactttgggaagccaagacgggtggatcacctgaggtcgggagttcgagaccagcctggccaacatggtgaaaccctgtctctactaaaaaaatacaaaaaattagccgggcgtgatggcacatatctgtaatcccagctactcaggaggctgaggcagg

SEQ ID NO: 32806 - DNA, 1050 bp, Homo sapiens
tggagtgcagtggcgctatcttggctgtctgcaacctccacctcctcggttcaagattctcatgcctcagcctcccaagtagctgggattacaggtgtgtaccaccatgcccggctaatttttgtatttttagtagagacagggtttcgccatgttggccaggctggtttcgaactcctgacctcaggtgatctgccctgcttggcttcccaaaatgctgggattacaggcatgagccaccgtgcccggccacattttgttttaagaaaatcagttgcacaattacaaggtagggaaactttatttgataataccagttcagtcatgttaaaagcaaaataaacaaaggacctgctgtttaaattgatttcaaactcaggatgagttatgatcttggttggaaaaataataagggttgtaattaaactgtattgcaggaagtttggcatccagattaggaaaggtaatactttcaatctttgctgatcaaacagtttttatcatttgtgcacctgttttgtgccaaggactaaactagatgctgggatacaaagctgagagacgtagcccatttataatagaattgcaagtcagtaataacaggttttatgagaagccagaagaggaatatccagaatttagaccacaggggatgggacagcttttaacaagaaggagatgcatagagcagaggctttggaggtggagctgtcggcttcactactatgggaccttgtatttaatctcaatctcaatttcttaatgtacaaaatagggtcactaataatctatttcacactgttgtctgtcctaagcatcgatgaggaaaaaatatacacacatacatacacacacataaaatgtatatatatgtgtatacttttttcctcattgatgcttaggacaacagtgtgtatgtgtgcatatatatgtgtgtgtatatatatatacactttatatgcgtatgtatatatgtacatacgtatatgtatgtatatgtaggaaacctctgaaacactctggggacataataattgctcagaaaatggt

SEQ ID NO: 32807 - DNA, 1032 bp, Homo sapiens
tttatttatttatttatttttaagatggagtctcgctctgtcacccaggctggagtgcaagtggtgcgatcttagctcatggcaacctccgcctcccgggttcaagtgattctcctgcctcagcctcctaagtagctgggattacaaatgcgtgccaccatacctggctaatttttgtatttttagtagagacggggtttcaccatgttgatcaggctggtctcaaactcctggcctcgtgatcctcctgcctcggcctcccaaagtgctgggattacaagcgtgagccaccgcgcctggcaacagtagcttttaaaattataaaacaagtgcatgcatcttcataaaatgtttttttaaataataaaatgtataaaacaaatgcttcctccatgctactcatcagtgctaaccactattaaatttgtagtttctcttggcagactttttatgaatatataaaaatatatgaaaaatatatgtatatgtagtttttcaggtaaatgtaatcgtgttctcttataataggacatttttccatggcaatacgtgcttgtatttttagggactatataatattccatcatacacatgtaccaaaagatgtttaaacacttaaattgtttgtaggtctttgcttttctccacaatgctccaatcccaggacatgtagaattgttcttatctgcctagtttattagagtatatttccaccagaggaattgctagtcagagggtatgcccattgtcaatcatgatgtcacagaagccagacattagcttgccacttaggcaacagagggtatttgttgaaatggaaaaaagctttaaaatgtgtagaattataggccgagcatggtggctcacgcctatgatcccagcactttgggaggccgaggcaggcaggtcatgaagtcaggagatcgagaccgtcctggctaacacagtgaaaccccgtctctactaaaaatacaaaaaattagccgggtgtggtggtgggcacctgtagtcccagctacttgggaggctgag

SEQ ID NO: 32808 - DNA, 1050 bp, Homo sapiens
tttactaaaacttaccatctggccaggtgtggtggctcatgcctgtaatcccagcacttagggatgccaaggcacatggatcgcttgaggtcaggagttcaagaccagcctggccaacatggcaaaaccccatctctactaaaaatacaaaaaaattagccaggtgtgctggtgggcacctgtagtcccagctactcgggaggctgaggcaggagaattgcttgaacccaggaggtggaggttgcagtgagctgagatcgcaccactgcactctagcctgggtgacagagtgagactgtcttaaaaaaaaaaaaaaaatgttgctgggcgtggtggttcacgcctgtaatcccagcactttgggaggccaagtgggtggatcacgagatcaggagtttgagaccagcctggccaacatagtgaaaccccatctctacaaaaattagctaggtgtggtggcaggcccctgtaattccagctactcgggaggctgaggcaggagaattgctcgaacccaggagatggaggttgcaatgagctgagatcgcaccactatactccagcctgggtgacagagcaagactccatctctaaggaaaaaataaagaagttgaaaacatcatccaacatgtaatcaatataaacattattagtcagatattttatagtttttttgtgctaagttttcaaaatctgatgcatattttatacctagagcacatctcagtttagatgctacattttcagcaattgaagtgaaatatagccctaccaaaatgataaagttgtgtttaatgggaaaatacttcatttactttagttttaaaatatgttaattaaaattaaattaatttaaaatctaggtctaaccacatttcaagtgctcagtagccacctgtgtctagtgagtgctgtattagagagcatggaaatagagttgtggggtagggtgggcagcagcatggagctgcgtcaggaacctattgcagtaattgaagccaagatgttggccgggaccagagtgttagcagaggagtaggtgagaagtgg

SEQ ID NO: 32809 - DNA, 1050 bp, Homo sapiens
taccagatggtttttcttcagtgtttctgttccactgttggctttcctcagtcccatcatgcctccatcacagagggggagtctctattcatatccttgccccttcactagtggttgactgatgctgcttgttactcagtgctaggcttatggtggtgtcataggtggttttctattgtcctggttcagccttagctttaggcagtccctgttcatttgaaccccaggggtggtacttaatctgccctttcctgagcagtagcaaacctctgcttggcatcagaatcctgggccaatgaggattctctcctgctctcccagaaacaagatgtttgcttctacctctcccccagcagcaatagggtatgtgagaggtgggaggtttacttgaacccaggaggtcgaggctgcagtgagccatgatagtggcaccacactccagcctgggtgacagagcaagaccctgtctcaaaacaacaacaacaacccaaaaaactgtcaaggtcatcaggaacaaaacatagccaatagccaagaaactgtcacataccagaggagactaaggaaacatgatgactaaatgcaatacaaataaaaaaataaatattggcactgtaagaaaaaatagggcagcagaatgggtaattcacaggagaagaaatgcaaatggctaataaaaatatgagtatgaattcaacttcactagtaattaaactcaaatgtaaatgacaaaaactgatttttgccagtgacattagcaaaggattgtttttgttaatactagcatttggcaaggttgtagagaatatgggaactcagaataatacagcctctctggaggataatttgcgcagtatcatatcaaaaggcttaaaattgtacaaattatttgacttagccatgtctgtgccgttgatttatcttaataaagtaaaggaagatctgtgggaagatttagtcaaagggtgcctatcacggcattgttaataataatgaaaaattgaaagtagcatgataattaacagtatattgtgatattcttgtatggtg

SEQ ID NO: 32810 - DNA, 1030 bp, Homo sapiens
tatttctttgactaatatatgtcttactggaagaatgcttatatcagaaatctggcccactggcttggtgcagtggctcacacctgtaatcccagcactttgggaggccgaggcagaaggatcacttgagcccaggagtttgagaccagcctgggtaacatagtgagactctgtctttacaaaaacttagccgggcatggtgatgtgtacctgtagtcccagctattcaggaggccagtgtaggaggattgcttgagcctggaaggttgaggctgcagtgagccataatcatgccactgtactccagcctgggtgacagaatgagaccttgtctcaaaagaaaaaaaagtattctgacccaccagtacaagaacttacacaggaaccagcagtatctttcaatatgtctctttgaacaatatcttgtggtatatagagatacatgctgaaatgtctacggatgaaattatatgatgtctggaattggcttcaaaataatccactaggagaaggagggtaaagtgggtggtattatagataaaacaatattgtcttaagttgattatttgtttaagttaggtaatatttctgtggggtttcattattcctttcctttctcttttgtgtgtatttgaaatttttcattataaactgtaggaaaaagatctattacaatacaaatagctatgagagaaacatcagcttccttaaagggtttatgtctaaggtgggagacgtactctagagcagaggtccccaattcccaggctgtgagctcatggcctgttaggaaccaggctgcatagcagaaggtgagcggccagcaagtgagcattagattctcataggagggcgaaccctattgtgaactgcacatgggagggatctgggttgtgcagtcctttagagaatttaatgcctgattatctgaggtggaacagtttcatcctgaaaccatccatctctctccacccccatccatggaaaaattgtcttccacgaaactggtccctggtaccaaaaaaggttg

SEQ ID NO: 32811 - DNA, 1076 bp, Homo sapiens
ggagatagtagcattcttgcaaattggcaccaagttacttctcaacagctgcaaattgctatctccagaaggtttcccaccctgccctcctcttttggatattgtaataaatttgttttggtacttgctggagggttacttggcctttttgagcaaatcactgttttctttggcttattttttttttttttttttggttactcagggaaatgtatgtgctcagatattgtctgaaagtagcttgctaccttccatgagatggttcctgaagaaacattagattttagatgttttggagaagttattcaagtttttccctctacttgaggtgatcatttctgaatatacctcctttcaagttgtatgtcactctttatttatttatttgtcactgtttattaatgagtttgtttccagttatggtaaagaattgtgccttaaagagtacaacatataggggaattatttgtaaattgctttactgttccaatgttatatgtattaaagtctaattgctttactgttcctatattattatgtaggaatctttgactgggaattaaacaaaaagggaatttgttataaagatgcagggatatctcaaggaatttaagagtgggaattttatgggccctcagaaagatccaggcccagaaactagaaatccagcaggaattgaagcagtatttggttttcatttctcatctctctcagcttgttactgtgtacctgcttcatttctccctctgtctgtctgtccaaatcatctttctcagttccccagccaggatggtggaacatggccccactcagcatttccatctatatgttaggggaccagcctgttcagagagaggtgtgaagaaagggaaggaggcaggccaggcatggtggctcacgcctgtaatcccagcactttgggaggccaaggtgggcagatcacctgaggtcaggagttcgagaccagcctggccaacatggtgaaaccccgtctctactaaaaatacaaaaagtagccaggcgcggtgacagacgcctgtaattccagctactcgggaggctgaggcaggagaatc

SEQ ID NO: 32812 - DNA, 1081 bp, Homo sapiens
agttgctcaagcctgttatcccagcactttgggaggcctagggaggtggatcatttgaggtcaggagttcaagaccagcctggtcaatgtggcaaaaccccatctctaataaaaatacaaaaattgctgggcgcgatggctcacgcctctaatcccagcactttgggaggctgaggcaggtggatcgcgaggtcaggagatcgagaccatcctggctaacatggtgaaaccccgtctctactaaaaatacaaaaaatcagccgggtgcagtggcacgcgcctgtagtcccagctactcgggaggctgaggcaggagaatcacttgaacccaggaggtggaggttgcagtgagctgagatcatgccgctgtactccagcctgggcgtcggtcagagtgagactccgtctcaaaacaacaacaacaaaaattagcagggctgtagtggtgcgcgcctgtaatttcagctactcagcaggctgagacaggagaattgcttgagcttgggaggtgaaagttggttgcagtgagccgagatcgcgccactgcactccagtctgagcgacggagagaccctgtctccaaaaaaaaaaaaactttatataaacgtaatcatactgaatgtgttagtttttaaattctgttacatttataaggtttatccatgttgttgcatgttactgcaattaattaattttaatagctatttaactatagctatttaactatactctgcccagatctcttcatattagaatacccattctccacctgcttaggctcacagctgcatcccttattgggaattgcccttggccctgaatactgtcttgcccaaggttatgcttcctcccagaggtgtccctgtggccagtaactgtgtgttgcttggatataagatccaacctaacttgtctctatttgggacaactccaaagggctctggagctccatgttgtatcagctgaggccccatttgcaatatcattggttcaatttcttccctaagtccaatcctgctgccttcacttgttataggtatatctccccagagcacttcccaggaaactttctgcatgatag

SEQ ID NO: 32813 - DNA, 1050 bp, Homo sapiens
gagttactgctatttggtgttggcatatagtccttttttatctcataaatgtgtctttttcaattttaacaataaaaattaattagataataaaatcatgttaattattttaaccagtagttttgagacccaaagacccatactattgacttgatctaatgctgtttttactaaatcttcttttccttaataggtagaaaatctttatcctcaaattggctgggtagaaattgatcctgatgttctttggattcaatttgttgccgtaataaaagaagcagtcaaaggtaattggatttataaaaataacaataatctttatggttttttttttgtaatagttttcctcaggcttctgtagttgtggttttcctaagttatacatatatatagtattttattgggattacagtttcccagtatttttcaacggaaatttgtaattcacagtgagctcctttgtcagggaaaggtaacatctgctgtgtcctctggtttgtctcttttcgactgtaatataaatgctcgccatttcctcattccaggttatagctagtgctgttttgatttcctgtttggcacaaaataccagaggattataaacagaagttacagtgtatagcttctactctcatgggtttacaactgagttatttctattgtaaaatgagtttttatttgtttttttctggccatttgacataaagtgctttcctggccaaagctatggtctaagtcttagttctttaagaatgttagaaacattcttaaacattgacaacatctcaaaacattgaaatggccaccttgcttgagaacatggcaaagattacttgtaaattctgaaagatcttttacttcatttttctggctgaactgcttcttctcatctttttggtttgaaatatttcagtctatgcaaaagttgcaagaatagtacaataaactcttgtatatctttctcatagattcaaacatattttgtaatatttaccattttctgcaaactgtttttttctttctgaaccataggaaaggagtattttctcc

SEQ ID NO: 32814 - DNA, 1076 bp, Homo sapiens
aatttaatttagttctgatctgatcttaattatttcccttctcctactgggtttgggtttggtttgttcttgtttctctagttccttgaagtgtgaccttagatggtctgtttgtgctctttcagactttttgatgtaggcatttagggctatgaactttcctcttagcaccgcctttgctgtatcccagaggttttgataagtcatgtcactattgtcgttcagtttgaagaatttttaaatttccatcttgatttcatttttgacccaatgcttattcaggagcaggttttttaatttccatgtatttgcatggttttgaagcttccttttggagtttatttccagttttattccactgtagtctgagagagtgcttgatataattcaattttcttaaatttattgaggcttgttttgtggcctatcatatggtctatcttggataaatttctatgcactgatgaatagaatgaatattctgcatttgttgggtagaaggttctgtaaatatctgttaagtccatttattccagggtataatttaaatccattgtttctttgttgactttcctgtcttgataacctgtctagtgctgtcagtggagtattgaggtcccccactgttactgtgtttctgtctgtctcatttcttagatctagtagtaattgttttataagtttgggagctccagtgttaagtgcatatatatttaggattgtgatattttcctgttggacaaggccttttatcattatataatgtcccgctttgtcttttttaattgctgttgctttaaagtttgttttgtctgatataagagtagctactcctgcttgcttttggtgtccatttgcatggaatgtctttttccacccctttaccttaagtttatgtaagtccttgagtgttaggtgagttttttgaaggcagcagatggttggtgaattcttatccattctgcaattctgcatcttttaagtggagcatttaggccatttgcattcaatgttagtattgagatgtgaggtaccattccatttattgtgctgtttgttgcctatataccttggtt

SEQ ID NO: 32815 - DNA, 1020 bp, Homo sapiens
acttcaatctatttaagcctttgtctcctaactgaaacattatttctaaatatttctattcaataagttttttcttttttgagcaacttaagtgaattttgaagattgctccttccagtctcgttccttttcacattttcctgcattacctaataattacctcagcgttagaatttgaatgtattaattgatttaaacatcatgtagactaaagtcttaaacatctaagactcagttgtagttgcagaaaaaaattaaagtcacctctactgaaccttggtttcaatttaagatttttcttgcttttcaaaggggtaactaataaagattgaagggtttttttcccgattggtggaggaatgaagaactattgatgcaagtttttttattgtttctttctatgatcaggtacctgctttcattttagactgctacttccaaactaagctagattcttggttttaatgagaggaggcagagagagggaggcagatggaagaagaaaaacagttaaataagacatacccagtcactgcatttttggactataccgtatctttctagcacaaggaaatagataaactgtaaggtcttttttactcactttttatttatgtgttctatttgtgttagtcataactgtttatagtggttgtctaatttttacttttattatatgagatagagctgtgcagatcttcactcaagttagttctgtcacgcttcttcccattatttagagcacagttttttaaagcaactgtacaatttctcagccttatgagcttgctgtatttcttggtatcatgttgcttccaaattttgtttttactgtagaagacaattaatttattgtagagaagtggctgtgaaagtcgttctctgtctttaaaaatcaattgcagaagttcatttgtcatttttctagagataaattatagtactcaaactggcagtgctcagtatatacattttgtaagctttgtcagtgaaaccatcagttttgcaggagcttccttt

SEQ ID NO: 32816 - DNA, 1009 bp, Homo sapiens
cagtgagccacgattatgccattgcactccagcctgggcaacagagcaagaccttgtctctgaaacatatatatatatatatatatatatatatatatatatatatatatatatatatatatatatatatataatattacaagtaaacctatatgtttattaatccattgtttattaaaaataactttcacctaatagacatctgtagaacatttcatccaacagctgtagaatatacattcttttcctcaacaaatggaacattctcaaggataaaccaaatgttaagccacaaaacaagtctcacaaaattcaaaagattaaaattcaatcaagtatattttctgaccataatgaaataaaaccagaaatcaataacaagaggaactttggaaactatacaaataaatggaaattaaacattatgtttctgaatggcccttgggtcaatgaagaaattaagagaaaattttaaattttcctgaagcaaatgaaaatggaaacacaacataccaaaacctgtaggatacggcaaaagtagtactaggagggaagattatagcaataaatccctgcatccaaaaagtacagacacttcaaataaacaacctaacagtgtgtcttgaagaattagttccagcagtcacactactgggtatctatctaaaggaaaagaaattgtataaaaaagatacctgatttgtatgtatattgcagcactagtcacaatagccaagatgtagaatcaacctaagggtccatcaacagatgattggataaagaaaatgtggtgtatatatacacaatggaatattgttcagacattttaaaaaagaatgaaaccatgtcttttgcagcaacatggatggaactgaggccattatcttaagcaaacaactcagaacagataccacatgttctcatttataagtgggagctaaataatgtgtacatagggatatagagtgtgaaataatagagacttggaagggtgggggatgggcaggga

SEQ ID NO: 32817 - DNA, 1033 bp, Homo sapiens
ttaaagacacagttcatctttttgtagaacaaaaaagtttaattgacttttgacagtcaattctaaaatatactcttgtttttttttttttttttaattttggagacagagtctcactctgtcaccgaggctggagtgaagtggcatgatctcggctcactgcaacctccacctcccagattcaagcgattcttctgcctcagcctcccatgtagctgggattacaggtacctgccacctcgcccagccaatttttatattttttagtagagacggagttttgccttgttggccaggctggtcttgaacttctgacctcaggtgatccacctgcctcagcctcccaaagtgctgggattacagacatgagccaccgtgcctggcctaaaatgtacttttcttactcatacactcattgagttactaaaaatttttgaactccctcaatctctcctatttcttacgtctcgctttcttttaaggagtagacttttatagtagagttgcgttgttttatctatagaaaatgaattgattattttgcctttttcaactttttatttcatgtttcacaaatttgccctttgtattaaaatgctgttgctttgccaacacagcattctcttgttcgaactaattgcagaataagttaagaactgggctctggagctgtctcccctaacaccctgagtttgaatcggtttttcaatattaataaccttaggcaagatacttaacctttccttccatacctctgtttcctcattggtaaaattagaataaaatagtacctgcctcagagtgtcctcaaaaagataaactgagttaatattgcgtaaactacttctaataatgcctagctattattaatgcctaataatgcttagatgtttttattaattattatttaaattatcctatcacatactgaagagctgtgattatagtctagaaaatcaccactagatgactctttttctctttaggaaaaaatataaggctcagagccaagagtttaatttttgaaaggtca

SEQ ID NO: 32818 - DNA, 1040 bp, Homo sapiens
tgctggtctcgaactcctgacctcgtgatctgcccaccttggcctcccttaagtcctgggattacaggcgtgagccaccgtgcccggccaagattctgttgagcttcttactctccttgctgtactggttctatttaggttcaaacttaatgactcttgctccaggaggggcaactgtccttgttttctctagtgtagtccttctcgctgcttagctcttcctcactggaacttggcagcagtcagtctgcattccactggtttttgtgtgtgtgtgtgtgtctttttttttccccccctaagaaaacgggctctgcaactttttgggaacctgtacacacaaaacttacctgtcagtaatccctggctcccccaccacaattcagtacttaaacttcaccagtcttccagccatatgcagctaactttagagacactgtgcaggaatagcccagacacaggaagttggtagaggccataagttggatgaaagaaaggaaatggggataagggagtaggaagaactaaagagagtcattggcagtagacaggaaatcagagaatagaggagagaaaggattgagatcacaagggaggaaaaacagatgggcaggatatgaaggatgttataacatggaagaactatagaaaagcaaatgggtgcatggaagagaaatgacatctcattttgaaatgtatcttgccattcattttatgttgatttacaatttacagggccaggaaaattctctgtgttggactgctttagacaaaaatgaaggcgaaatgataacttctaagggtaagtatgaagtatgtgttttgatatgttactactttgacaggataattgttataccttttatttattattactaattttgggtggaacagatttctgtgatagcatataagcatcaacttggatatgcatttatcaaatcattaggtggaaaaacaggctattcataattgtcagtcactatctttctgacttttttccccagataatttagaagatgagactgaagatgatgacc

SEQ ID NO: 32819 - DNA, 1052 bp, Homo sapiens
agcatttctaatggagggtcctgccttgcggctcttttggcttcaatatcctcttggcggttcctttctatttcccgttcctttctgatgaccccggcagtgtaagactgccacctctttaggtttctgtacagccaataataatttcctaatggcttcctgatgtttgataggtgttccctccaaagttaggaattccctttctctccatattgctgcatgggcatggaggactaggtaagcatatttagagtctgtatatatatttaccctttttccttctcctaattctagtgcccaagtgagggctattagttttgccagctgagcactagttcctggaatgaggggattattttcaagtattccattatcactgaccactgcataccctgcttttcaaagtcctttttctatgaaggactttttgtatacgaattcattgtatgtatatgaatacgaatgaattgtatacgaattgtatgcgaattcagtatacaaattgaggtcaggatccgtcaagggaacctctgaaaggtcccctcgagcggcttaggtttgagcaattacttgttgacagttatgttctatcttttcttcattgtctggaagaaatgtggctgggttaagagttgcacaagtgcacagtcgcaacactggcccttcaagtaatagagcctgatatttaagtaaatggttgtctgagagccacaagtctcctttagcagtgagtataccattcacatcatgaggtgtccacacagtaagatctcttccctgtattattttaactgcttcagatactaagactgcaactgcagccactacctataaacaatgaagccaaccctttgccactacatcagttttcttactcaggtatgccacggttgcaagctcgtccctcggacctgtgtaaggactcctagagctattcctgtttttttgtgatatataaagaaaagtcttgccctattggcaagcttaacactggggcttgggttagggccttctttagggcctggaaagccacttctgcttcaggtgtccat

SEQ ID NO: 32820 - DNA, 1025 bp, Homo sapiens
tctataacttaaagtataattaaaaacatatatatataaaacataacatgtatataagttgtaaagcataataatagaatgaacatccattaatctagtctaacctttatgtcacccctctatccctggaggcaaccactattcccaattttgtgtttttcattcctttgttttttaaaataaaagaggctttttaaaaaaaaacaaactttttttaaaaaaaaaatatgtatagaaggaatgtacctcaacacagtaaagaccatgtatgataaccccaaagataacatcatactcagtggtgaaaagttcaaagcttttcctctaagattaagacaaagatgcccactcttgccacttatattcaatatagtaccaggaatcctagccatagcaattcgagaagagagataaataaaaggcatccaaattggaaaagaagtcatcaatttttttctatttgcagacgacatgattttatatactgaaaccctaagactccaataaaagactattagaacaaataaatgaattcaataaagttgcaggatataaaggcaacatacaaaagtaagtagcatttctatacactaataacagagtacttgcagataaattaagaagacaatctcatttacagtagctacaaaaataaaatataatacttgggaataaatacaaggcaaaagacctatacaatgaaaactataaaacattgatgaaaagaaattgaagaagacatgaacaaatggaaagatatcctgtttatgtattggaagaattaatattattaaaatgttcatagtgcccaaagtgatctacagattcaatgtagtttctatcagaattccaatagcttattctttctttccttttttttttgttttgttttgtttaaaaattctggctgggcacagtggctcacacccataatcccagcactttgggaaactgaggcaggtggatcacttgaggtcaggagtttgagaccagcctggccaacatagtgaaacctagtctctact

SEQ ID NO: 32821 - DNA, 1028 bp, Homo sapiens
ataaaaataaccaggaaatttttttgacttttcagtgagtatataagtatatggattatcacaaaataaatatactcatgaaactgccaccacatcaagaaatagaatattatttgagctctataaccccactacccttcatcccagtaatcactattctcaccctctgtctcaaagttaactacatcctagcctgaaaatttttcagcaaaaccaatttataacttctttactaggtattaaactttatatagatggtgttgtaagagatatacctctcaataatccatgggtcaatgaaaactttcaatggaaattgaaaagtactttgaactgaatgataataaaaatggcatatcatatcctgtgcagctaaagccattcttaaaagggatttaaatttttatttgcatatattcgaagaaaataaaggttcaaaattaacgagttaagtatctatcccaaagagttagaaaaggaactaaaaaagtagggagagaaataaaaaagtagaagaaaggaaataataaagcaaagagcaggtggctagaatttgtgggacagattaactgagagaaaaaagttaaacagagtagttcctatctgcataggaattgtgttcgctgaataccagcctgcacatgaataattcagaattctatgaggccaagctaggaataactgctggggaaagaataaacatgcagaggctataagaacaatttccagagctcacacgggattgagattcattcagattacaggattgagagttattcagtccaccagccagattaagaggcctcattgcataatatggagcattcagtaaagaccttaaaagggccacaccttagaagtaggactaaattagtcctaggctaaaaactactctatatccatactagaagggcagtaaaacaagctttaagatgattacactgatcttcaagtaaccttactgcctgccagatcaaagcctaacactctttaaagcaagacaacaaaatctaaaacttgacaatgta

SEQ ID NO: 32822 - DNA, 1058 bp, Homo sapiens
tgatttttgatatagttttttaacattaaaagtgttttagtatctcctcatgtatatttttcactatgatttatgcttataatttgtctagatgagaagtgcagtctgctcattgggttaaattctacaactttaaatattcagataaatttattgaagttaaaaggattgatttttttaaaagttcaatggtcggtagtaaattgaaagaatatactttaagctgaatgtgagttgaattctttgataggtataagtaatacagaaatttaaagtttaaagctagtcagaaagcctttagtaggcccaattaaagattttcattactcccaatttctcctcatgaatatattttcaccctctgcttttaaaaaaatgtatttaatctcttaaaaaatttaaatgactttgttaggactgacgaaatatgcaagatgacatgcaaatacatgaagcattttatatgaaaaaaatccatacaactataaattatttctatttagaaactactttttggtaccctaggtacacatgcatattagatacttgactttggacaaataacttctttgaaccttagaaagtgcctagacttatactaacagtctttataaaagcccagaggtatgcatatttatttcctagataattttttatacttagaaatcttttaaacatcattttatgtcttatgactagcattattaaagaagtgattatttagcattattattattagccttattaaagaagaattattactgttattattattatttttgagacagagtctcactctgttgcccaggctggagtgcagtgatgcggtatcagctcactgcagcctctacctcctgggttcaagtgattctcctgcctcagtctcccaagtagctgggattacaggcgtgcaccgccatgcctggctactttttgtatttttagtagagatgaagtttcatcatattggccaggctggtctcctggccttaagtgatctgcctgtctgggcttcccaaagtgctgggattgcaggcatgagccatcacacctggcca

SEQ ID NO: 32823 - DNA, 1035 bp, Homo sapiens
gcctgtaatcccagcactttgggaggccgaggcgggcagatcacgaggtcagaagatcgagatcatcctggctaacacggtgaaaccctgtctctactaaaaatacaaaaaattagccaagcgtggtggttggcgcctgtagtcccagctactcgggaggctgaggcaggagaatggcgtgaacccgggaggcggagcttgcagtgagccgagatggcgccactgcactccagcctgggagacagagtgagactctgtctcacaaaaaaaaaaaatttttttgaatagttgatattacatagtatgttttattctaaatatgtttcatgttttaaccaaatttatattgcatatgaatatctctctactatattcataattatagaattaaacatgtggacatgaaccaaaagagcatattatggagtgcactgaaacagaaagctgaatcccttcagatttcccttgaatacagtggcctaaagaatcctgttattgagatgttagaaggaattgctgttgtcttacaactgactgctctgtgtactgttcattgttctcatcaaaacatgaactggtaaaacaaacttcttgtttcttggggttgggtttcctgtaatgaacttggatttactgtttactcattattcacttgactcatgtaaccttagaacacaaacttttcactgaagtagttaataaatttattttctattgagtcaaatgctaggtacggtgctaagcactgtatatatcttagttaatatttacaatagtcctgtaaggtaaaggctattatgcctattttaaaaattagaaactgacactcagagaaactgaggctcttttttgtctgaagccaaaactgactttcctggggacacatgattagaaagtaccagaacacatttgtgtacaactcaaaacccagtgtttggctgttgaagacagggtctcgctttgtctcccaggctggtgcacagtggcatgatcatggctcactacagccttgatctctatccggggctcaagtga

SEQ ID NO: 32824 - DNA, 1126 bp, Homo sapiens
gcagagttaccacaaccttcaatttgtgacaaatgcagtatctgcaacgtgcaataaaactgggtatgcctgtgttctaaactattatgtttccattgtgaagagaatgttttacactcttgttagtgaagtttattctttaaaagtcaatcgtcaaggatttagcaaatgaattagcacttcggatatacttgtttatttaatatcttttttgtttatttcaaagaattcagtaattggatcataacgagacttctgcggattgcagcaactccctcctgtcatttgttacacaagaaaatctgtgaagtcatctgttcattattatttctttttaaaagcaagagtcctgctatttttggggtactcacaaaagaattattacaactttttgaagacttggtttacctccatagaagaaatgtgatgggtcatgctgtggaatggccagtggtcatgagccgatttttaagtcaattagatgaacacatgggatatttacaatcagctcctttgcagttgatgagtatgcaaaatttagaatttattgaagtcactttattaatggttcttactcgtattattgcaattgtgttttttagaaggcaagaactcttactttggcagataggttgtgttctgctagagtatggtagtccaaaaattaaatccctagcaattagctttttaacagaactttttcagcttggaggactaccagcacaaccagctagcacttttttcagctcatttttggaattattaaaacaccttgtagaaatggatactgaccaattgaaactctatgaagagccattatcaaagctgataaagacactatttccctttgaagcagaagcttatagaaatattgaacctgtctatttaaatatgctgctggaaaaactctgtgtcatgtttgaagacggtgtgctcatgcggcttaagtctgatttgctaaaagcagctttgtgccatttactgcagtatttccttaaatttgtgccagctgggtatgaatctgctttacaagtcaggaaggtctatgtgagaaatatttgtaaagctcttttggatgtgcttggaattgaggtagatgcagaggtaagtaatttttcaggttact

SEQ ID NO: 32825 - DNA, 1128 bp, Homo sapiens
gaggctgaggcaggagaatcacttgaagctgcgaggcggaggttgcagtgagccgagatcacaccactgcgctccagcctgggcgacagagcgagactccgtctcaaaagaaaaaaaaaagaaaaagggccgggtgcggtggctcacgcctgtaatctcagcactttgggaggctgaggcgggcggattacctgaggtcaggagttcgagccagcctggccaacatggtgaaaccccgtctctactaaaaatacaaaaattagctgggtgtggtggcacacgcctgtaatcctagctacttgggaggctgaggcaggagaattgcttgagcccgggtggcggaggttgcagtgagccaagatcgtgccactaactgcacttcaccctggccgacagagcgagactctgtatcagaaaaagaaaaaaattcactctttttcttttaccactatttgagataataagtggggaaaatgtatgaacattttacagtgctatatagaaataaattgtgacatatatgaaatatatgctattatttataagtaactgtcttactacaccctaagttgttttgtcagaagtgatggactttgctaatcactcacacataacccactgtgaatcctctaggtagagttaatcattccctgctttgggtgtacatgatacttgcttttgattatttatttatttatttatttatttatttatttatttatttattgagactgagtctcgctctgtcgcccaggctggagtacagtggcgcgatctcgactcactgcaatctccgcctcccagattcaagcgattctcctgcctcagcctcctgagcagctgggactacaggcgcccgccaccacacccagctgatttttgtgttttcagcagagatggggtttcaccatgttagccgggatggtttagatctactgacctcatgatccgcctgccttagcctcccaaaatgctcgtattacaggcgtgagccaccatgcccggccgcttttgattatttaagtgcattcctctcctctccccagcaactattctgagttctttgaagcagaggatcttgttttacttgccttttgaatttattaaattatttgcgtctgtacccat

SEQ ID NO: 32826 - DNA, 1046 bp, Homo sapiens
tgccctcacttggcccccttacaaaattctgacacaagaagcaggggacacttagaatcagaaaactcaaaatatgtaagaaggagaagaaatgcattttcctcttaatcaatgacagctttattggatcaccttgagaaagaaaagcatccattcagattgtgattgcttagaataaagctataccatctcagtacagaactcaatcccttatgacagtaagaatacagtaactgcttttgataactacagaaaagatcaccttgaggaaagtctggacactgtaagcttacaggtaaatcaggttttccaatagtgaccatgtatgatatcattttaattttaaaacatgtagtcaaagtagctttaatttaacctaagttttaaataaatgtaatcgagttcaatatcaaggtaagcaattctgaatgagaacaccacaaacttcatgacttgcttaaattttaaatttaaaaagaaatttttaagagacagagtttcactctgtttcccaggctggagtatggtggtacaatcatgactcactgtagccttaacctcctaggcttcagcagtcctccccactcaagcctcatgagaaactaggcacatcccaccatgcctggctaatttttatttatttttttgtagacaaggtcttgctatgttgcccaggctggtcttgaactcctggcctcaagctatcctcccgccttagcctcccaaagtgctgcaattagaagtgtgttccaccatgcccggcctgacttgtttaatagcatggtattggttcttaatacaagaagaagtaaaagtagaacagtggataccactgaggaaaacactggcttgaagacactaatgaaatattcatgtgaaaggcaaatattaaaaacagtaaatttattttagactgagagattataaggtttatgtatttgtaaaagtaataatgctttctcaaacatttactttttaaaaagtacttggcggtttaacttgagaaatatgaaaacttgtgaaatgaaaagagaaaggtaattaaa

SEQ ID NO: 32827 - DNA, 1035 bp, Homo sapiens
ccctggtgaagatgaggccacggggactgcgggatcagacatgggagggtggacccatagaaacgatcgcgggaacacagccagggagggctgagaaccgggaccagctttgtgagtgaagggcaaggagacagatgacagttaagatgaggaggggaaggagagagccagtgacttgcaggccagacagcaggccccaccaaagcaggagaagggcatgttggacacccaccccacttccagactgaccttcggaggctgagaagcagccggttcccaatgggcccgggaaagggcgctcaccatcagacacaccacaactttttgactcagttaactgagtaaatttaattccataaatttacagctgaagtgaggttcccaacttctggaacaatggtatgtctctcccttccaaacatcttctgagctctttctctcccttttttaaaaatgcatatttaagctattatatgtattttaacattaaattacatatgttttaatattgccatctgcttcagattctttctggagttaactagggggtacagattaagagtatataaataggctgggcgcggtggcttacacctgtaatcccagcactttcagaggccgagacaggcaaatcacctgaggtcaggagtttgagaccagcctggccaacatggcgaaatgaaatctctactaaaaatacaaaaattggccaggcatctgtagtcccagctactcaggaggctgaggcaggagaattgcttgaacccgggaggtggagcttgcagtgagccaagatcacaccattgtactccagcctgggcgacagagcgagagactccatgtcaaaaataaataaatagataaataataaattaacagaggagttggtggggcctgttggaagagcaatattacaactgtggatattcacccaacaagggcaattctgttaccgtggttctgtttagttcttcctagcatattgtcacacagaaacaaataattagcaagtatttctgaaacattcttaagatg

SEQ ID NO: 32828 - DNA, 1048 bp, Homo sapiens
tacacatatatacagacataaacagtgatcataattccaaaacttggttttatttttaagaagaaatatatggccatttatttaataatggaagattttataagtctgttgaatgttttataaagtaattttaaaaattgtgtttctgaaacatttaaaccattatgtaattcttgaaattatattgatcattttctctgtgacatttgtaaatatatttgaccaaataattccaacttaattatacttgcagattacagttaagcatctcttttccattgttcttccctttgatcatttaaatgttaagtttgatttttatttgattttaatgtgatttttggcttctgtcaattgagttcttaatcactgtgtttgaaatcactggcagtttctcaaaggagaaaaatataatgggaaaattaagtcctaaatagtttctatgcaagggaattattgtattgaaggaatttcattggaattttcttctattaaagaattaccttaccatcatttgttaccacagttcttttcctttatcttcttctttactttttttaatcttctctgcaaaagtttttgtgactaatttcttttttttttttttttgagacggagtcttgctctgtcacctaggctggagtgcagtggtgcgatttcggctcactgcaacttccacctcccgggttcggtccattctcctgcctcagcctcctgagtagttgggactacaggaacccgccaccatgcctggctaattttttgtatttttagtggagatggggtttcaccgtgttggccagaatggtctcgatctcctgacctcatgatctgcctgcctcggcctcccaaagtgctgggattacaggcgtgagccaccacgcccagcctttgtgactaatttctaagtagaaaaagttcgccaatttttttaataacctggaaagcattttattagtaagtggtaagaagtcactggacccaaagaggaaatattttaatacaatttaaagccatcttaagtatgaataagcattattcacctatc

SEQ ID NO: 32829 - DNA, 1056 bp, Homo sapiens
ccttagagcaaaaagagaactccaaaaggattgcactgggtgtcttatggctaggcctggaggtaatgggtgcatcactttcatctacattccattgaccaggacccagactcatggccccaacttaactgcaagagaggctgggaaatgtcgactccatgtgtgacctgagaagaaacaaggtttgggagcatctcctcagcctctgccacagtcaggtcatggaaaaacacagcaaggtggaagtctggtgacctgagttctgccattgtctttctgggtggccttaggcaagtcatcataaccgctgtcagccatttcttcctccccgtaaggatcttaataatacttgccctgtacttgtgagtttacatttttatataaaagtatgtgctagtaataggagtcatggcctgcactattattttaagattataaggatcgcagtcatttattcaatgaatattttctgagtactcatagtagccaaagcattggacaaactgtagacccacagaccaactgttctctgtagcttacattctgatagtgagacagatgataaataatctgtgaagaaataagagggctgtgtgatctaagtgaccaggggtgctcaggataggcttctctgaaacagtgactcttgagctgacctagatgatgaggtggagtgagacccgtgtatatcagggagaaggctgtgccaggcagaggaccaggctgtgcaaaggcccttaggtgggaaccagctcggagggctccttgaacagaaaagtggcatgacagccaagttgttgcttgaaggagaaagatgagagataaggggatatatcatgcagtgtcttaacctctctgtgcctcagtttcttcatctgtaaactataaagttgggccaataataatatcaacttcatagggttgctgtaagggattaaatgaaatgatacgtatatagtgcatagaaaaatacctggcacctgatgttcactaagtgtgtgaactataattaaggtgaagattttattctaagtgcagtgggaaagttttgggtgg

SEQ ID NO: 32830 - DNA, 1028 bp, Homo sapiens
ctctatcatatcaatgcaagaatgggaaatgtctgattttaacttttgctttaagaaaggtgaatcctagttgttaccaccaaacttccagtccttcgtgttggactttctgatgcgaaagtacagcctgcagattggaaatttagatgtgtccttacattatagtactttaaaatttttatagcaatttcttagacagctgcattgttccaacacactgtattggctatttaaatgtaaattaagttaaacatttagtttcttagtcatactagccacattcaagtgctcaatagccacatgtggatagtggctgccttactggacaatatgtaatatagtatttctgtcatcacaatttttcttgtggacagtgctgtgctattaatagaaaaattttatgcttaattttactcacgtaaaatgttgaggacagaggtgctctgtgctgcttagttgtacttctgctttgcaaatagggaagctgctactggttctttgtagttgttggagctgtaactggaactcaagactcttgactcagctttatcaccaagagttgatggccttaacaggtcttaggttttttacttttactgtatgtgttctcaaaaatgtatgcttagagactaaattagagaatttgggtgttaagaaatagttgaatattttgtaatccatgatggggttgagagtttcttagtttactgtaggagttgattctggggactataacctaaaaggcatctgcataaaatcccctaattctcaaatacggggacgtgggtatgagttaaatgtgatttgacagctaaggtatatataatcctttggaaagtagtgactggtcttctaagcaggcttggaagaacaatagggttggggtgaggcataagtcaccctaatttatttaagaaccagaaccaataactcccacctgtattaagccctgcagcaagaaatgaaactccaaaagttgacatcccaccacctggacccctctattacagtggttcttctgcagtttg

SEQ ID NO: 32831 - DNA, 1079 bp, Homo sapiens
cgggagtgctgctgaccttcgccatgagctgcacggcgcacgtgttcagctgcctgtcgctgcgtctgcgcgccgccttcttctacctggactacgcgtccatcagctactacggcttcggcagcacggtggcctactactactacctgttgccaggcctcagcttgctggatgccagagtcatgactccatacttgcagcagcgcctgggctggcacgtggactgcacgcgccttatcgccgcctaccgcgccctggtgctgcctgtggccttcgtgctggcggtggcttgcactgtggcctgctgcaagagccgtaccgactggtgtacctacccgttcgcgctgcgcaccttcgtcttcgtcatgccgctcagcatggcctgccccattatgctcgagagctggctcttcgacctgcgtggggagaaccccacactcttcgtgcacttctaccgccgctacttctggctggtggtggccgccttcttcaacgtgagcaagatccccgagcgcatccagccgggtcttttcgacattatcggccacagccaccagctcttccacatcttcaccttcctcagcatctacgaccaggtgtactacgtagaagagggcctgcgccagttcctccaggcgccgcctgccgcacccactttctcgggtactgtgggctacatgctgctgctggtggtctgcctggggctggtaatcaggaagttcctaaacagctccgaattctgcagtaaaaagtgagcctccgccttggaggagactactggttcgcccatctgtttggagtttctgttgttgctattgttggtttgttttcaaatttcattgtgttttcttctttgctcaaggaaggtgctgcaaaaccatagggaaaaagttcactgctacaaagggatcccaacccactggaggctttgaagtagggaggttggcaggggtggtcaagcgggagggagatagtcacttgttcttgcccctggaaaaaattcaggtgatgtctttgacatccagggatttctcaaaggcagtgagtaaaatcccaaataaagccccaaagagtttgct

SEQ ID NO: 32832 - DNA, 1029 bp, Homo sapiens
catcaaggcagttcctggacatattgcagtagctgaacagatggcaggcaagaaaagtgcttaaagagtcactggagcacaatttcaagtgatgtctcacatccgttgacagttggagagtgatagaggcaaacagatcatggggatatattactactcagaaaggaaggatttggctcaaagataacctaggaaaaagatatagtaggacttgttcagaaaagagcaatggatacagaggggtgactgcaccttagacattcaaaaggacaagcaatgaccttcaggacatatcctgggtcaggaatgtagcaagagtcactttgtcacatcttaagagaatcatgtttgtcacggggcactacattcaataccatattgacagtaagaatacatgatattagaaagggatgggtacagccaagcacttcctggctcagaagtatgactgaggacacataagaaggctgagcctgctggtgagaagatggtgagagcagctgtggagctggagaattgagagacacaggaaatgaagtgagggctgatagctaagcagaagcactatctccatccctttacaggccctacagaggcctaggaaggagcagtagagttcaaactcaaccttagttaggtgtgtatatggaattaggtgaactggttgggaacttagacttgggaatcagaggcctactcagcaacctttcttcctccctgctgctaacagaactcctacactgtttaggtattcacctgttacacacatggttctctcatttaatagtaaatccctattggtgagacctggtcccttgccagagagtgattgtgattaggcatgtactccagttctggccaatgagacttgggggatgtctcttgagggcttctgggaaaggttttctctctcctagaggagatagccctttagtctctggaggctcttgtgtctctgtgtagtggctggaacaagatgctgcagccatcttgagaccacaaaggcatcagtctgttgatctaatgaaa

SEQ ID NO: 32833 - DNA, 1037 bp, Homo sapiens
caaatagtgatgtatgtactcaggtggttaggtttcagacagactcacagtgctttggaagcagcaagaaattagcaagcaagtgcagttgtaagtcagtttaattaaggaaaaggtgttttaagtgggaaagtaatcataaaaggacatcgaagcatcatccttatgctttctgtagtcaaaataattagagaagggcagaaaatataaatatgtttaataaaagtttgaataatttcatagatcacatatttacagttatttaagggacatgagttgtttgtgggcatactatttagtttttaaaaatagtttttggccaggcacggtgtctcaaacctgtaatcccagcactttgggaggcctagacaggaaggtgacttgagcccaggtgttcaggccaggctgtgcaacgtagggaaatcccatttctactaaaatttttttttaaattatctgggcatggtggcacatggctgtggtcctagctactttggagactgaggtgaggagattgtttgagcccaggaggtcgaggctgcagtgagccatgagtgcaccattgcactctagcctgggtggcagagtgagagccccatctccaaaaacaacaacaaaaagagtttttaatagaaaaatataaatcacataaaatatgtaatgtgaaaatagatgtttttttttcatttattgaggacatttggggtctgtaaaataaggaaacaatttttgaagaacagtaatataaaccattggaaaatgttgagtgtctctgtgtggtacatttttcatcacagaaaattggccatgggatttaaaaaatgtattgtcttctccccagaatttttttatttgatgccaggcatggtggctcacgcctctaatctcagcactttgggaggctgaggcgggcagatcacctgaggtcaggagttcgagaccagtctgaccaacatggcgaaaccccatctctactaaaaatacaaaaattagtcgggcatggtgatgggtgcctgtaatcccaactacttgagagg

SEQ ID NO: 32834 - DNA, 1070 bp, Homo sapiens
tagctggaaaaagatccctgataacttttctatgtaccacccttagtttttggaaataggtaaaggaagaaaaagtgacagactgagaatgaataggcagagagatggaaaaaacagtagagagaagcaccaggaggggtagattcatacagctggatggtgaattttgcactgatttgttttgctaacttaaaacttgttggattacataaatttctattaaaaaagaaaacactgcattcgtattaatttaggcattatttttcttgatgacaaaaatctgaataaaaaaactagttccttttaataaaggacattaaatatcagtagataatagctttacttgtagtttatttagagatactttcaagggataaatacttttctcatctttttgaaagttataatttggcaattgttttctgacaggaacatttggttacatacagtagatgtatggttagatacagtaaatgatgtttttgccaattttctaactctctgggaacagaagtggagaatgttgaatcccattcccctgttacacacatttcttcacctggtgaactcatttgtcctcagttttagggcgaattcctcacaatttttttcataaacttccaatttaaaataactttctctgttaaaacctttcatcctcttcgtgttgttgaacttattcttagttttactgcagtttccattttaaattgtttgtggaattatttgccactgtctcccctcacaactgtattgtaagacccatgaagacagggattgatttttccaaaaatgtttattgagtgacttccttccaaaaatatttattgagtgcctactgtgtatcaactaggatttggggatctattaggtttacattctcttcaattccagcatttacttcgtttaccattatgtctccaacatgtagcacagtgcctgataaacagtgaatgtcagtatctgttgaaagaataaagatgaaagccctttgaggagtatttgcagggctcaaatgtggtgtggagtcaggggttaaatctgtagttgaggaacatgaacttctcctg

SEQ ID NO: 32835 - DNA, 1036 bp, Homo sapiens
atatatatgtatgtatatatttgttatttatgtatatagacattcctatcattgtcagaaaaagattaaaaagggacttacagtgggacacatatctactgaataatctttgaagtttgtggggaaaattaggtaataaaaaaagcaagatttgcaaagcagttctgcaaagagaggttgtagtaataaagagcctgtggcaaggtcctgccttggtagaggaggatgaaagtaggccttgtattttctagtaacttacataaagagagaaaaaccacatttatgggatttttgtttgctaggagataaaagtcaactggttgtttaggaaactcagcttttttttgtagtaagcagagagagaaattagtctctaatctcaataagaagacaaggtacaacatcatgaaactgacttcagtacctcccttgcagcaattactgtgacctagattgcttttagaaagaatacagtgaaaatgtgagtcactggagatgtagactaaactattgctaattcagttgtgtgtgacaccactgtttattaaaccattatttgtttatggtgttatgttgtgaatctttttagacagcactttccaaaaataattaggaaaaaaaatcaacttcactctataaatgcttgtgttctccatattatgtaaagggaaaaataatttttgctattatgccaggaatttactttgtagataagagttagcatcggggcagttgaaccactagtatgaaagctcattgctttgatcacaagcataatataattgtttagttctatttttaaatctatgttcagtttgaaaattcatgaaatttattaatagtgtctaatatatgatgaattctttctttaaaaaatataggagtgtattttccagttgattatatttcttgatgcattcccataagaaaggaaaaagaatacattttgtcattatattattgtttcctttgtaagtcatgttccctgtcttcccctgaaggtgtggtacccacagcccctgaacagcctgcaggt

SEQ ID NO: 32836 - DNA, 1089 bp, Homo sapiens
gaagctttttttcttttgctgtttgcaataaatcttgctgctgctcactgtttgggtccacactgcttttatgagctgtaacactcaccgcgaaggtctgcagcttcactcctgagccagcgagaccacgaacccaccagaaggaagaaactccgaatacatcggaacataagaaggaacaaactccagatgcgccaccttaagagctgtaacactcaccgcgagggtccgcggcttcgttcttgaagtcagtgagaccaagaacccaccaattctggacacaatactacatgtattctccagtgatttgctttttctgttgtgctataattttgagatacatctctgtccacgtgcacagctataatttgttttcactacaggatattattgtatcatgtgaatgtaccagaatttatttattcagtctaccattgatggacattaggcaagttttcattcttttaaatatgaatagtgttatcaagaacattcttgtctatatcctgtgtgcatgtgcaagagtcacttccaggtacataactaggagtgtctaaatttctagaaagctgtagtcattttccttaacaacagggattaccatcattaaggaatatgactaaccccttgaactccttttactggcccagaattgggtctgactttttggtatgccccagaataaataaataaataaataaatatttattatttataattattatatatttgtattattttatatttaaatattaatatatttaaaatataaatgtaaaaatatataatatatattaaatatatatttaaaacatttttacataatatatattatataaaagtaaatatatatgttttaaaatatatttatatgtattttttaagcttggagacacatagggcaccgtacaacaaactccagctccagaggtgagtggagatggtccaagactggttaaactttcacccgtcttggcaagacaatcatttcagctgggaatctgcatactggctcgtaccatggcagttttcattgagtcagctcagtgtccatattgatgactcactaatacgttgtttgaatgcttt

SEQ ID NO: 32837 - DNA, 1050 bp, Homo sapiens
atatctaggaatacagctaactgcggaggtgaaagatttctacagtgagaattacaaaacactgctgaaagaaatcagagataacataaaaacatggagaaacattccatgcccatggataggaagaatcaataccattaaaatggctctactgcccaaagcaatgtacagattcaatggtattcctatcaaactaccaatgtcatttttcacagaattagaaagatatgattctgaaattcatatggaacaaaaggagtgcaaatagccaaagcgatcctaaacaaaaagaagaaagccagaggcgtcacactatctgacttcaaactgtattataaagccacagtaactaaaacaacatggttctagtacaaaaacagacatatggaacaacagaatagaaataaagctgcacacttacaaccatctgatttttaacaaagtcaacaataccaagcaatggggaaagacttcctgttcaataaaaggtgcagggataactggctagccatatgcagaagactgtaactgtacaccgtcctttcatcatatacaaaaatcaactcaaaatggattaaagacttaaatgtaagacctaaaactataaaatccctagaagaaaacctaggacataccattctggatgtaggccttggcaaacattttgtgattaagtctccaaaagcaattgcaactaaaacaaaaatagacaagtggcacctaattaaactaaagagcttttacagagtaaaagaaactatcaacagagtaaatagacaacctacagaataggagaaaatatacaaactgcacatctgacaaaggtcgaatattcagaatctgtaaggaatttaaacaaatcaacaagtgaaaaacaaccccattaaaaaatgggcaaaggttatgaatagacattttttaaaagaagacataaacatggtcaacaggcataagaaaacagggtcagcatcagtaatcatcagagaaatgcatatcaaaaccacaatgatatactatctcatagcagtcagaatggctattattaaaatg

SEQ ID NO: 32838 - DNA, 1051 bp, Homo sapiens
taattctttcaacatttcatggttttcagtgtacaagccttgcactttttaattaaatttatttctaggtgttttattatttttggtactattataaatgtaattgatttcctgcattgttcattgccagggtatagaaatacaattgatctttgtataatggtcttgtatcctgctgcattgatgaacttgtttatgcttcctttttaatgaattccttagaaactttgatatgactttaaaaatgtcacattatttctatttcagatggctttatttcttttttctaacctaatcactctgggtagaacatccagtacaatgttgaaaagaaatagtaacagtacatactcttgtcttgttttggtcttaagggaaagcatttagtctttctctgttgagtatgacattagctgtggagtgcttcacaagtttcttacgagatcaagaaagttctatatttctagattgttgagtatttattgtttttatcaataaagagtagtggattcttttgaatattttttctgtcatctattgagattacatagtttttgtcctttattttattaccatgatatattcattgattgaggttttttttgtttgataaaccattttattactacaataaatcccacttggtcatggtgtattgtggtatattgtggattcagttttcaagtattttgttgagaatttttgtgtcagtattcttcatggttattagtgtagttttgttgtgttgtctttacctaattttgatataagggtcatactgaaataaaataagttttagaagagtttgcgaagggttgatattcattccttattaagtatttggtagaatgcacaagtaaatcatctgtacctgggtttttttttttgtgggaagtttttttggttactaatttagcctcttattacagttctattcaggtttcctgtttcttcttgagtcagttttggtagtgtctgtcttctaggaatttgtccatttcatctactgtatctaattggcatatggtagtttgtagtattcccctataat

SEQ ID NO: 32839 - DNA, 1032 bp, Homo sapiens
tataaaggtttttgtacattttttaatactcattgtcaatttgagaaaaaggacatatgagtttttgcatttattaatgaaacttcctttgaaaaactgctttgaattatgatctctgattcattgtccattttactaccaaatattaactaaggccttattaatttttatataaattatatcttgtcctattaaatctagttacaatttatttcatgcataagagctaatgttattttgcaaatgccatatattcaaaaaagctcaaagataattttctttactattatgttcaaataatattcaatatgcatattatctttaaaaagttaaatgtttttttaatcttcaagaaatcatgctacacttaacttctcctagaagctaatctataccataatattttcatattcacaagatattaaattaccaattttcaaattattgttagtaaagaacaaaatgattctctcccaaagaaagacacattttaaatactccttcactctaaaactctggtattataacttttgaaagttaatatttctacatgaaatgtttagctcttacactctatccttcctagaaaatggtaattgagattactcagatattaattaaatacaatatcatatatatattcacagagtataaacctaaataatgatctattagattcaaatatttgaaataaaaacttgatttttttgtatatttgatttttgtttttaaacgaaatgtgttcagatggtattttgagcactcattcagttaaatgatggtacatttgaagcaggatatttccctgaccccttcacaggactcgagacaggggtgccttgtttactcagcctgccattctcaactcctcctgggagggagtgcacaggcaaacaaggcaggaactggagtgtacaagcactggaactggctggccgctttggcatgggcaggaacaaactgtgcaggccctgtggtagcatccaggtggggttgcctgcgattcctgaagccccagaagatgtgttaaca

SEQ ID NO: 32840 - DNA, 1101 bp, Homo sapiens
cattactagcttcaaatgcttcaatgacagctattagcagaaaaatactaacatgtacaagaaaggatttgtattagtttatttcaccacagtagtatttcattacacataatccctaaaactcagcagcttgcaataagtgtttatactcatgcttatgggtgtgtaggtcaactgtgtttcagtggatgtatttaagcactgacttaggcgcatgttaacctcaatctgctccaggtagatttgttctatggctgtagcagcagcagctacctgagtcatgcttttctagtggcttgtcactgaagatcataagccaggccaaagcacttagccaagtttaaggacactactcatgtcatatctgctaacacccgttgttcaaacaagtaacatggccaagcctaattatgaaggaacaggaagtatactggccctacagaaggagagggaatgaaatgaatatttgatgaacagtattatgctatcagcttcatattagatgtttatttctagtattttacaaactatccacttgtactcaaataaaatgagtcaagtatttttagattccccacatttatttagctgaaaaggacactcctctgttaatacaactatatgtgtacatagttttgtgaatttcagctacattcagtccccacctgccctcctagaggagttgccttagtctgagcaaagtccattcaaccctatatgatggccctgggctttcctcaggcagaattgtaaaattaggaaacttctacttcggagctcatttgttcatacactcttcatcttttattcacaccccactagttatccactctcaacctcaacccttggcgtggggcatttcatcaagttacttattggtatttgcctttactccaaactgctaatcttttctaggtgcttagcatttcatgtttggcaactcacagtgggtagtaataagccttttcatcatatttaatctttcagtctgtgtaaactgtgcttctcctaaagcagaagtctaataggagttttgttcattaacttcctgatggcttctagaaatgtcatcaaagaaacatttcatatttatatcctttt

SEQ ID NO: 32841 - DNA, 1002 bp, Homo sapiens
catggaaagaattgagaaatagtcacttgaagaattttccatagagttgacaatggaaactttgacacctcaaagcagaaattatcagtatgagggaccactaaggaacatgaaatccaccagggtgtcactgggcatggaaacttgaagtaataaaagagataaaagcctgttccacagcaggggcaggagtcattctaaaacagagaataactcaagaggcatttcataggtgtactatgtggaactaattcatggatttgatatcaattgaggatgaaaaaaattttggagataaacttgatgtgttattattctgatattacattggccaagttaagaatcttggaggaaaaacacttgatttgtgtcctcttgaccattatgatagtctgctttttaaaaagtaaggtatcaaatactaatacacatctaggtcagggatcagcaaaatataatcaatgagctgtagttgattatataaaatatatatgggaagttaatgacttgaattaaggtcatgttggattttagttatgtataggaaaagaatggagagttttcagcaaacagacagtaattgaatctctaagaaggttatcttaatggtgagtaagagagagcctagtagaccttttatccaatataggtgataagagagtctgtctccttcaaggactcttggtagggggaaaaaatatggccacatgaaactgacataccaagtcagctctgtctatgagcttgaaatctgaattcctgccactgttgtgtttcaggaatctcaaaatatagaaactgatcctgagtagtgataaattttatatggtcaactatagcccacagattttttttcctgccctctcaactagattttcattagtattcaataaatatgtttttaaaaagcagacaatcctaatggtcaagagtatagacactggagccagatgcccaggtttgaaacccatcttcacaacacttatctatgtgactttaaca

SEQ ID NO: 32842 - DNA, 1124 bp, Homo sapiens
tagcttttaaaatacctctaaaatacaaggcttttaatgcagtttgttatgcacgttttatttatttatttgtgtatatattttgagacagagtcttgctctgtcacccaggctagagtacagtggccacgatcagtggctgagtgcaaccttgacctcctgggctccagcagtccttccacctgagcctcctgagtagctgggactacaggcgcacaccatcacgctctgctaatttttgtattttttgtagagacagaatctcaccatgttgcccaggctagtctcaaactactggactcaggcaaaccacctgccttggcctcccaaagtgcttgggttacaggcatgagccacagcacccagccctgttaatgcatattttaaaagctacttaataaaagataaaaacctactttatttgatggctttattctttttattttgtaaattatagctttaggattcaatttggaaagtggttggggctctggaagagctggaccaagctatagtatgccagtgcatgctgcagtacagatgacaactgaacaggtgtgcttctcttttattttgtaatctaaaagtgaattttaaatgttgcaggtttgtatttaaaagaacaggatgaatatgtacgtgtgggtatttgtggtcttcaaatatattaagttataatgaaacatgttatagaataaatagaatatatatatgttaacattttatataaaaagtactgataaggaataaatccatacgtgaacatttgtacccaacatacaaaacacacacgttcctgtttatgcacggcatatttttgtatctgaaatgttttaaatgttcaagtagtaattttaagaaaaaaattgaagctgagacttaactcctttcagtaattttgcaaatgcagtgctaaagatttaactccaaattcttcacattgtctaatttgtaatttaggatgagttatgctgaatttctttgaaaaaaaagtatataaagtaattaatgcagatcaatttaaaaataacattaaaacttttttgatgtttgtatctaccagtgttagtccttttatctactaattgtagttaccatatttaccctgcttattgttagaagga

SEQ ID NO: 32843 - DNA, 1074 bp, Homo sapiens
ttgattcctaagtatattatcctaatcctgtttgctacagttggtataaaaaggcatgaaatatgtattcaatacctcttatgtaaccaaaaccatttttaattagcttttaaggactgagagagcatcatgttcaactggcatgcagtctgcctgcattgccaatgaagtcctcaactgtttaatattttgaactaatattatttataatctatgaatttaatcttttttgaaagactttaataatttgagtctctgagaggatactttcaatttccatgggggacttatttgttggggatcttaaataagattccttttgatctaccggaatatacatgtacagagtacattggatcatgttggaaagaaggcaagtgaaaaggtcagagatgaagtagcaaagttatggaatatcgtggaaaggatactagttgtgaaatggaaagagacaagttatagtaccccaaaagcaaaacaagcaggagatgcaagagatgccccaaaaggacaaagcaacaattttctgttgccacctttataccggaagactctgttgtagaagaaaagaaggctttggtgcaccttatgtgggaggaggaggggcagggcatgctgatgctgagcgtacaggcagacaagagcgtagcctgctgttgcctccatcactatgaaatgacttattttacctgaaggacccatggtttatgttcctctaattcctttcactctccctaagccctctgagagagatgaagatagatgattttattgctactaaattgaagggagcactatttctttttgtcttttgttagcaaaaaattgcaaaaagaattgtacattcttgctaaaaataaataaataaataaaaaattaaaaaaacaagggacctaacaaaactcagcagtgttactgtatttttaaaaaatatttttatagactcattttcaggttattaaatgtaagagaaacagatacccctcttttttaaagtaggtaaatcattgatgatttatattaccaatttttagaagtaattttctagtaagcttgtggcatcagaaaatacta

SEQ ID NO: 32844 - DNA, 1049 bp, Homo sapiens
caagagtgagcattccatgaaacagaaagtaggagccatgagttggtgccggaaactggtacatcatatttaccatattctattggtcaagcagttgataatgtgaattttaaataggaaattttatgactcatggaaagactttatttggatttcatttaatgtatcaaatgggtaccccagggtggctattgccttgaggaaggtgctttatttccactaatgtataaaggaaggtgccaggcccatgaggtacaactaatgcttattatcaattttattttattcttccccttcaggtgagtggagtgagtgtcaaggacagaggactgaggtcccagcttgaggtgcttggagggacagagaagaatcagggtgaggaagctgtcaggctcctcttttcccttttggccctgtgactttattagcttaactaatacttcatagtgtttgctatgtaccaggcactttacatatattaactcaattatattcccatcggggactgtgttacaggtagaatcttaattaaagctactgctactgattcttaataatggcattacttgaagagattattattaataggcccttgccccatttgattacactgtgtgatatacagttgtcccttggtgtccggaaaggattggttccaggaccctggaagatacaaaaatttgacgacgctcaagtcctttatagacaatgtcatcatatttgcataaagcctatacacatcctctcttatactttaaatcatctctagatttacttataatacctgataaaatgtaaatgcaatgtaaatagttgttatactgtatcattgtattgttttttatttgtattcatttttacaaattgttgtactatcattatttattttgaatattttcaggccaatgttggttgaatcccaggatgtgaaacaggtgaagatgaagggcccattatataccttgtcgctatttaaagatgtctcaaactcttggaattttgatgtttttgaacatgtaacttaatggatcctccttcatattattgta

SEQ ID NO: 32845 - DNA, 1040 bp, Homo sapiens
caagtgatctgcctgcctcggcctcctaaagtgctgggattacaggcttgagccaccatgcccagccctacatgatttctttctttctttctttctttcttttttagatggagtctcgctctgtcgcccaggctggagtgcagtggcgcgatctaggctcactgcaagctccgcctaccgggttcacgccattctcctgcctcagcctcccgagtagctgggactacaggcacccgccaccaagcccggctacttttttgtattttttttagtagagacggggtttcaacatgttagccaggatggtctctatctcctgacctcgtgatctgcccgcctcggcctcccaaagtgctggaattacaggtgtgagccaccacgcctggccccagccctacatgatttctaaactgtgtttatgaatatatacacacatacgtatggtatatgatcagtataactgtgattattaaaaatatgaaataggagctaggcttgcctaatatctgaggaaaactagacgaaaaagaccctgaaacaaaagcaaaacaaaaaaattcctttatacattgtgttttgaatgattggagtagctcagaactgcctgtgaacaagggcaaaagtggaagttagccttggatttagagaaagttgctgtgatctctctgcccatccccccaaccacaaccactctccaatccaaagcagagtgcatcttcatttcactttgggtagtcaatgaaaatgacagctgaaaaaaatgtgtaagtagtaggctggcctgctctgatgctatccctggaagtattttggccaagtgactaagagaggttaagaatttgtcagtgactattgtctttaaggataagcaatctgccaagagttctctgaatttcttgtagagttttgtttaaagttggaattaggtaaatgtcatacactttgttacacagcctcaaaaggcagtgtatttcagtggattaagtagaagcttgaaaaatgatggtgactcacttggagttacttttcattatgtctgt

SEQ ID NO: 32846 - DNA, 1026 bp, Homo sapiens
ttcacatcccttatgatcaggaagttctgtcagctgctatattaaagtcctcctgctataacttactcagtcttctctgtacttatatgaatttgattaagtatcttcttttccagagtttccataatcatagattactctcacatctttcttccaccaacagtagaaaatattttggtggaaatgttatgatactacattgcctctaacttaaatatgttcacttttaaaaccatcatgactgttatattcaaactcaaatacttttcttagaacaaatgaacctaactccaccattaacgtggttagttcagtaagctttatacattttgaaagtaatgtttgaattataaaagcagaataagcccattatttttcagctttcaaaaaattatataaagatgagaaaaaatactatatggcactaaaatgtgtatttaatgatttgatcacagagtagtaatggctctttgttctagatttttacagctcctctctacccaggaactccatctataacttaagtatgcacaacagccatgagtccaaaagttttgacataccataatgggcgaatatagaaaaagtaatttcatatccttagtgggttaaaaggcagtatcaataatacaaatatctatgttaatgtgctctaaaactgggcttttacttgagttgttgccattctaaacccaagcaacttttgaataagatgaactttttataattataatgtaaattatgtttgttatcattagaaatattaccaattatatgaccaccagagtgagagactgtgtttttttattgtgcttgagcctaagttgacattttttagttgcaaagactacacttttcattttcttctcttgcagttatcatatcctctgttgcagaagagtctgcccagcagccaaaaagggaaataacacaaaaaagatttgtgccttatctcaccaaccatatgaggccttttaacttttaaaattttttttactctgctctgttacactaagctataaacta

SEQ ID NO: 32847 - DNA, 1050 bp, Homo sapiens
tttggttatatgtctgttgcaaaatcccttctctcggtttatgacttgttttttcaccatctttaggtatcctttgaagaaaattgagttttaatgtagttaaattttaccagttttgtctttatggtttgagccttttatatcatgtttaagaaatcttctataccataaaattggtatatattctcattattttcttttcaaaggttttaaagtttacttttcattttgaagtctgtaattcatctgaaacttaatttttgtgtatggtttaagataattataaatattatgtattcagcatggttattaaatagttactgtgctcttatttcatttaaaatcaagcttgcaagtagaagtctcaggcaacagattaaaccagcagtgactataaagctacaccttaatcaaaatggagatcacaacaccaaagttctgcagacagacccagccaccctgctccatttggttcaacaactggaacaagcattggaagagatgaagacaaatcactgtaggagagttgttcgcaacatcaagtagtaccagttttaaggttttaattcatttgaatcacttatgaattgatgatatacagcaattacttttcaaaattaattttttattaattcatgatgataaatacatagtattcctcagtatctattccaagatactgaggtcataatcagaagctaagctgggtgcagtggctcatgccagttatcccagcactttgggaggccgaggtgggcaaatcatgaggtcaggagattgagaccttcctggctaacatggtgaaaccccatctctactaaaaatataaaaaattagccaggtgtggtggcacgcatctatcagagtcccagctactcaggaggctgaggcaggagaatcgcttgaacctgggaggtggaggttgcagtgagctgagattgtgccactgcactccagcctgggtgacagagtgagactccatctcaaaaataataataataataataaagtaaaaataaaaataaaaaagtaatcagaagctaaagtaaa

SEQ ID NO: 32848 - DNA, 1024 bp, Homo sapiens
tttacgggctaataggtggaaagaaatgtgtcttgagtctcagataagactttagactttggatttttgagttgatggtggaatgagttaagactttggatactactgggaagagatgattgtattgtactacgcaagaggaacatgtgatgtggcgggagaaaggggaccactcgtacactgctggtgggaatataaattagtatggctactaaggaaaacagtattgaggttcctcaaaaaagtaaaaatgaaaccaccatatgatccagcaatcccattgctggatatgtgtccaaaagaaaggaaaatcagtatattgaagagatatctgcactcccatgtttactgcagcactattcacaatagccaagatatggaatcaacctaagtgtctatcaatggatgactggataaagaaaatgtggcatatatacacaatggaatactattcagccataaaaaaaaaccctgttatttgcagcaacatggatggaactagaggacatgatactaagtgacataagccaaacccagaaagacaaatatcccatgttctcactcgtatgtgggaactaagaaaactgatctcatggaggtagagagcaaactggtggttaccagatgctgggaagggtggaagggagcagtgaagggaggctggctactggctacaaaaacagttagaaggaataagttctagtttttgatagtatggtaaggcaactatagttaacaataaagttatgtatttcaaatagctagatgagaagctttgaattattcccaacacacacacaaaaatgatcattgcttggggtgataaatatcccaattatcctgatttgatccttacatattgtatgcatgtatcaaaatataacatgtaccccataaatatgtacaactattatatatcaataaaaaattgtaaaatgcaatgaaagcagtacagggaaatttatagcactgaatatatatatgttagaaaagaaaaaagagctaaaatcaataatctaagctt

SEQ ID NO: 32849 - DNA, 1049 bp, Homo sapiens
tcctgctgacaccttggttttggccctgtgagacctgtgtcaaacttctaacctatagataatatatttttgttgttttagggcattaagcttttgttgatttgttatcaaataaataggaaactaatacaggtatatttgggttatctttaaatgtatagacttgatgatttggaatcactgagctttcttatcaatcctttgaattgttccaagtagtagatttatattaatatcccatattttattgccgtagcacttagtttgaagatgacaggtcaagattccaaggtacagtttgtgatcatggaccaaactggagcttagtgctctgtagcaaattaacctttatggccttggacttgtgatgaaatggtaaagcacatattagaatgcctgaggttcccatcctggtccttttattagctatgtaactttatgtaaaacacttatctttatgtttgttttctcaaaggcaaaacacaaacattaacataattatgtattagggttgttgtgaagattaaaagagataatgcaagtagagtaatttacatggtgtttcgcacatacaatacctcttaaccaatttttacctagtaaaactagccgataggcatacttacttatcacatggtagaagactggctaggaggctattctctaaccaaccttatgcttttgtcccaacagatgatcagctgcatgcttacaaaaggctagtggcagtggtcattgaacctgtttgttttacttagggtaattatgtaatttagttaaatattcagcagtccataaactgtgagtgtaaaagacttctggttttatttgaaagctaggttgaatgcattagaaatactttaaaaaaaaagctagttgctcccctcaacccatccccagtcaaaaagtggttaaattgggtatgggtaaaaaaactaaaagactggacaaatgtagaaagcaaggatgaaagcagaatccagtttttcccccactaaaatacttgaaactaaaaatggtagaaaatgcttcatgtaccatggcaattt

SEQ ID NO: 32850 - DNA, 1023 bp, Homo sapiens
aggcacataggtattcaataaagggtatactattaatattgccactttaattgtcttactgtggaatttatcagttttataatcatagaaatttattaattcatagctctttttggagttccagtgttttttaagtttttaaaggaactagcagtttttgtttgtttgtttgtttgtttgtttttggagacggagtctcgcacttttggcccaggctggagtgcagtggcatgatcttggttcacaggaactagcagtttttttaaatacagcagctttttcaattaatagtggcttagacaccactgtgaatgcttgaaagcacttttgtgagtttttttccactacatgaatatgttagataaaaacttataaaacttttagggacaaaagacagttaaattcattgcctatcccacacggggtaacaaccttggaagacatatcagaaataaagcaattatctggatggatagtctggatgaacatgacacataaaaaaggtgctgatagttcttctgaaacaatccctttaatgtcctagtcatttaaaacacacattcaggagaagcccgaaatagaaagctttaatgaaaattactaagttttgtccattaccttgaatttggttactatagtatctaaattacattctgtaacaaatgcatatgtacatgtgttagaatcttgtgtgtggaatttggtgagacttattagactcaactattagaagactaaaggacctctgatatatctgcaattattgtttttaattataattacatagatctatttacatggactttgaggacagatagttatgcaattcaatcatgactgatttctcatacaaatcaacctttgagtcacatcaccttttgaaaacgcctactaaaaacaaaacagttaatgtagctgaacaggaactgactgtggctcaaagctgtgccaaggctctaaggctcattttattgaggtagggagatcagcctgtattatccatgtgagctcaatgtgatcaca

SEQ ID NO: 32851 - DNA, 1033 bp, Homo sapiens
taggtctcagtaaaactggggagctggttataaggcagactatggactctggggttccactctggagatggagagtccataagcccaggaatcccttttcagaaacaatcactgagtcagtctgattcattttaagtggtgtatatgctaccttttgagaaaaaatgggttagggaataggaattaacctgtcttaaaatatactatgcataatgaaagtttttttttctttgactagttgtcaggcactggttgtgaatatggttgtacatacacagggatgtacaaatatgggagataaaggatttggggctattttggtagttggacataacctagaaattgtaaaactataataaaaacctggtatcagtttcttgacctgttaaggccaaaagacggggcaaatgaaaatttggtggttgagttgtgatgatttgagattttacaataatacacattcacactttacatgtaaagaactattagggtaaccaattatagaaggcagtgaccaaaattctgaaactcttaattaatctgtaagtaggtgaaggggcagtgtgtatgtgtgtgttcagagaggaggttgtgggtagagaaggtggtaaagggtgagtgtatcactaaaatagtatataatgaaactattcattggctttctacccacaatttcattagaaaaatacttagggaaatacatacatgcgtactttgctttgtacttagttctaggaatttagcatatggaaatgaagctatacaaatttgtataccagaatgtccatcatgctgcattacttatgacatccaaacttggaaaatatctacaaagttcagctttttaaggggtatggtttgaataaatgattttaagtccataggacaaaatagtcattgaagaatgacataagaatgtttaccaatgaatgttaataatataaggatataaacatgtcacatgacagtgcacatacatacagtattaatatacatgtattttacatatgtatttctgaaggcaatatattaa

SEQ ID NO: 32852 - DNA, 1043 bp, Homo sapiens
aacctgtgtctcctttgtatccctctgttggtggggaaaggtgtctttctttctgccctccccccccaaaataattctgttcacttttgttttgtttccttgtgtactccagcattggttatagtcatgggaaaggaaggtgtccacggaggcacacttaacaagaaagcatatgaactcgctttatacctgaggaggtctgatgtgtaagcagcctctccccatctacctagcaactgtcttcatcaacaaccctaattatggtcacaatgctaccaaactgtagatggtagctaatttttctttacctattttctaatgtcatgattcctgtttgcccaatggatcatttgtatgttaaccactgtatgtaaccaacccttatctggcaacataattgcagcacaataatgatttgcatgataccttgaaattggggggagggggcatgccaagttgggcatcactttgtcttagcaattaatgggatattgattactaaaataagttaatattaagcaaggtgccggttgtacaatctctgatcagtgtcttttcagcactttgagcatttacttggctcatttagtcttccttttgtagcgcatggttgggaggaaaaagtgcatgcatcattccttcactcttctctttttcccgccccccctcccttcgcacataggcatttggtttgcttccatctttttttatgcagtgcctgtttttttttaaccaattaaaatcccttttgttgatgagctattgagagctgcagtagtttgcttttagtattgttgttgcacttgagcagagacaaacctttattcatagtgtctacaggacatatgaagagtgcaatggcaaaacaagagcaaaaagcacttcctcccatgaccttacagtaaccatactgattgaatccccagggacattccatcattgcaatagctcagatttttcttcctttttctttgcacaccagctctactctttagtaaaattgtaaaaggctgccattatggacattaggtatcccaacataa

SEQ ID NO: 32853 - DNA, 1102 bp, Homo sapiens
cagggcacagcagcagcagcagcagtgactgtgaagggtggatggagtagctccaccaagacacccttcctccaggagggagtgtgctacttcagctccagactgagggggcaggctccgctacaactatgagaggtagatagaggtttctgacaaagtactgttttcccaggagggattgtacagctttggccccagagggaagggtgtaatagctgcttgcagctcagcttggggatgtgaggccaccaggtgaaggtggtttggtgccttagtctcagggatgaaggcatgccgtagctacttgtacccagagcaagtcacactccaacatttgttcatttgctccaagataacatagtgcggtagccctgagggccactaggggtagggcccaatgtcagctccttctctgggtgggaagcacagctgtggggactccaggtggctccctcagctggtcttagtgcttgtgagaactgcaggggaccccaatggtgaagactttccatgtccaaggtgttgatgggggctgctgggatcctcctgcttacctttttgccatggggagaggtttctcctggttctctgctgatgcagcctgacgtatgtggtggtggagtccctttgtttccttctattctctatgtggctaccctcagtttcagtgctcacttggttttttgtcactccttcgatgttctctggtgctattctttagttatttttgttaaaatgtagttgtttgttgattattttggctgtctttgtggtggggatgagtgtcagaggatttcactctattttatcccattttaactatttttaaggggaagcctaatttttaaaaaattgtggttaaaaaaaaaaacaaaaaaacacaagaccgggcatggtggctcaagcctgtaatcccagcactttgggaggctgaggcaggtggatcacaaggtcaggagtgcaagaccagcctggccaacatagtgaaaccccgtctatactaaaaatacaaaaaattagccaggcatggtgatggacacctgtaatcccagctacttaggaggctgaggcaggaaaatcacttgaacccaggaggtagagg

SEQ ID NO: 32854 - DNA, 1043 bp, Homo sapiens
atattcccttcagcaatgtatcagagtgacggtatccctatgtggttactttttataatgtactatatatgattaaaaataataggccgggagtggtggctcatgcctgtcatcccagcactttgggaggccgagatgggtggatcacgagatcaggagatcgagaccatactggccaaaatgatgaaaccccgtctctaccaaaaatacaaaaattaggtgggcgtggtggtgcgtgcctgtaatcccagctactcgggaggctgaggcaggagaatcgcttgaatccaggaggcagaggttgtagtgagctgagatcgcaccactgcactccagcctggcgacagagcaagactccatctcaaaataataataataataataataataataataatttaaaaagtgtattctctagtttttggtgccagttctgtgtttgtttctttgttcaagttgttaattatgttgtttacatctagattcttatcagttttttactttttgatagaggtttatggacttgtaaatttcttccaatatttctgtatatttttctttaaatattttgaggctctgttaagtatattcaaatttagagatatctgtctgatagattgtttctttttcattatgtaacatccatccgaatctctaatagtgctttttcacttacagtctattatatttgatattacggttacatataatctttagtatatatatatatatatagatatatgcacacacacagatatgtatatactcaaatacatagttggccctccatatctgtgtgcatctgtgaattcaaccctccaaagattgaaaatattcagaacaaaattccataaagtttcaaaaggcaaaacttgaacttgccatgcctagtactgtgttgaatttacatgaatgaaatgatatgtaggcattgtgttagatgttgtaagttatctaaagatgatttaaagtatatgggagaatgccatatactttattatatattcaatatatatatattgaatatatatcaggttatattc

SEQ ID NO: 32855 - DNA, 1050 bp, Homo sapiens
ccaacgagaagcacagcaagaacatcacccagcgcggcaacgtcgccaagacctcggtaaggaaagagcgggcgcccctctgcgttccgcagccggagctgagtccgggtccctggggccgcgtcgcgttttctcccggatccggccgaccgtgggctggtgccgtggaggggtaggggcccgagtctgcgaaccgccagactgtgggggctcgggaacggaaggggagacctgtgaggtgagggggccggcgaccggcgtgcaggcgtgggagcctggggtccgagtggtttctctgcatctgaaatggtggattttcgcttttgcagagaaatgcccccgaagagaaggcgtctgtaggaccctggttattggctctcttcatttttgttgtctgtggttctggtaagtggcttgggggctcccatcaggtagagtcttgggttgaaaggatttgggatgacgtggtgaccggtcagtagtgagtcctacctgcgtagttctcaacccacctgccgaggactccacataattctgtttcgtctgaaccaaattacttgttccacatatgcacagagggtggtgctccagaaacttctcccagcttaatttgtactcacaggagatcaaaaaggaggtcaggtcttggtaatgatccagttggaataaatgttaagaccggacaaaacctaacgaaatgagaatttagaatgttttgtaactccattatcagtctttgcaaagaaaattataaatatgtactatagatgttagaacttgatttaacatataccagaatctaatgtcttaatgtcaaaattgagtatattttataaaataaagcttgtgcaaagaattgattcactatagaggaaattacctgattggcattttaatgtgtgagtcaaatgtttttaggttaataaaagaaacgtttgatacatggtttaaaaaaaaagtgtcggggtagcctgctgtcccctaagagtaacagacacttgcctttgcaaatagattacaaaaaaaaggtctttcctctcttcatttatc

SEQ ID NO: 32856 - DNA, 1051 bp, Homo sapiens
ttctcttccactgatttatcagttttaccagtatatccatataccacaaccaaactgtcttaattacaattggcttactttttttttttttgtgacagagtctcaccctgtcagcgggctggagtgcggtggcacgatcttggctcattgcaacctcccactcctgggttcaagcaattctcatgcctcagcctcccgagtagctaggattacaggcatgtaccaccacacccaactaatttttgtatttttagtaaagatggggtttcaccatgttagccaggatggtcttgatctcctgacctcatgatctgcccgcctcaacctcccaaagtgctgggtacattttaatatctggtagtgtcagaactccagataacttcccctgccctgctcttcttttacacaagtttccaaaatattcttgtgtgttcatttttcaacaccaaccttacagccagtttatttagttaaaaaaaaaaaatcagttagcatttaaatttagttttagactgacaagagagaaatgacatctttataaaaataattcttcttagtaaaggtcatagtttgtctctctgaagagttttaaagttttcttctcattggccctatatatttgttcttattatttttgctatatatggaatctttcatttttttaaagtagctgttatagtgtgacttcatctacatgagcagagatgattttgttttctttcaaaactgtatatattttacttctgctgattatagtgactaggtatttcagaatgttattaaaataaagtgaaaaggggagccatccttgttttttctctgacttcaatggaaatagtttttttaaaacatagattaccctacttacacatgttcaattcaaaatgagaaaattaggacgctatcagtattttaaaactattattttaaagttttagttcattaaaacaacagatgaagtggtaacattcttggatattattattttgagacagggtctcgctctttcacccaggctgaagtacagtgacatgatcatagctcactgcag

SEQ ID NO: 32857 - DNA, 1028 bp, Homo sapiens
agccaacaagcattccaaacttttgcatattctgagatgtgccagtagatagatggtttgaacatatgagagggcttttctatttaaggtgtttaaagtttcactcttacaaggctctctccaaaactataaagaatatgtatgatcaagtacctgtaatggattatgctacaagaataagaatcctacagatattaatttataatcagatcaattcagctctgcaacaaagtaccacaaaacttttttccccttaaagggatgccataatgcttccaatatgatcagacctctgataacttttcttgtccctcctcactgattctgaatcacttttatttccgctaaggtgctgtatactcttgcccctggcctttgtgtacagcagtctcccttaaccatggtttcagtaaccaagcgtcaactgcagcccaaaaatattacatggaaaatcccagaaataaacaattcataagttttaagctgtgtgatgaaatctctcagcatcctgcctagaacgagaatcattcttttatccagtgtatccacagtgtattcgctccccacctatttttcactagtagctgtgttggttatcagatcgactgtcacagtatcaacagtagttgtgtttaagtaacccttattttacttaataatggtcccaaagtgcagagtagtgatgctggcaattcggatatgccaaagagaagccgtaaagtgctccctttaagtgaaaaggtgaaagttcttaataaggaataaaaaatattgtatgctgatttgctatgatttacagtaagattaaacctatccatgaacttgggaagaagaaaaaagagattagtgctagttttgcagttgcgccttgaactgcaagttatagccgtggtcattcaacttaccacacaagcattgtaccatctcacattgtcgcaaaaagggtgaatacaacaccattagatattttgagagaccatattcacatatcttttattacagtatattattataattgctctattttc

SEQ ID NO: 32858 - DNA, 1035 bp, Homo sapiens
gattgcacaaatatatgatcagatttcagatcatacagtatttgtctttcctgtctgacccacttcatttagcataatgccttcaaaattcatccatattgtcacaaatggcaagattttccttttttaatggctgagtaatattccactgtataagtatataccacattgtctttatctgttcatctgtcaaaggacacaagttgatttcatatcttggttattgtgcataatgctgcaatgaacatgggggtgcagatatctcttcaggatactgattttatttccttttgatacatacctagaagtgggattgctggattatatgacagttttaatttaattttttgaagaccctcaataccctttgccataatggctgtaccaatttacatttctaccaacagtgcacaagggttcccttttctccacatcctcatcaatagctatcttttgttattttgttaatacccatcataatgagtggggtgacatctcatcgtggttttgatttgcagttccttaacgtttagtgatgtggagcactatttttctgtacttggctatttgtatgtcttctctggaaaaacgtctgttaaggttctttgcccatttttaatgagattatttgttttgggtttgttgttgttgctgctgttattgagttgtatgagttctcatacgttttagatgcttgcctctcatcaaatatatggtttgcagatatttctcccattctgtagcttgcctttttggttgtttcctttgctgtgcggaaacattttagtttaatgtagttccacttgtttatttttgcttttgttgtctgtgctattggtgtcatatccaaaaatcattgccaaaatcaatgtcaaggagattttttccctatgttttcttataggagtttgacattttcaggtcttacattaaaatctttaatgtatttcaagttaattttttgtgagtggtgtaagacagggatcctatttcatagttttgcatgtggatatccagtttcccaacaccatttat

SEQ ID NO: 32859 - DNA, 1030 bp, Homo sapiens
atgttatttcttttttgcttgttcaattgcttaagttctttatagattctggatattagacctttatcagatgcatagttttgaatattttctcccattctgtaggttgtttgttcactctgttgatagtttcttttgctgtgcagaagttctttcatttaattaggtcccatttgtcaatttttggttttgttctaattgcttttgaggacttagtcataaattctttgccaaggccaatgtccagaatggtgtttcctaggttttcttctaggattcttatagtttgagatcttacatttaaatctttaatccatcttgatttaatttttatatatggcaaaaggcaggagtccagtttcattcttctgcatatggctagccagctaccccagcactatttattgagtagggagtcctttccccatgacttgtttttggtgactttgtcaaagattagatggctgtaggtgtgtggctttatttctgggttcactattctgttacattgatttatgtgtctgtttctgtaccagtactatgctgttttagttattgtagttttacagtatagtttgaagttgggtaatgagatgcctccagctttttttatttttgtttaggattgctttggctattcaggctcttttttggttccacatgaattttagaatagtttcttttatctgattctgtgaaaaatgatgttggtagtttgatgggaatagctttgaacctgtatatttatttgggcagtatggccattttaatgatattgattattttaatccatggacatggaatgtttttccatttgtttgtgccatctatgatccctctgagcagtactgtggttctttttgtagagatttttcacctccttagttagctgtattcttgggtattttattttttttcatgtggctattgtaaatgggattgtgttcttgatttggctttcagcctgaatattattggtttatagaaatgttactgatttttgtacattgattttgtatcctgaaactat

SEQ ID NO: 32860 - DNA, 1034 bp, Homo sapiens
tgatggggttgtttgattttttcttgtaaatttctttaagttctttgtacattctggatattagccctttgtcacatgggtagattgcaaaaattttctcccattctttaggttgcctgttcactctgatggtagtttcttttgctgtgcagaagctctttagtttaattagatcccatttgtcaattttggcttttgttgccatttggtttggtgttttagtcatgaagtccttgcccatgcctatgtcctgaatggtattgcctaggttttcttctagggtttttatggttttaggtctaacatttaagtctttaatccatcttggattaatttttgtataaggcataaggaaggaatccagtttcagctttcttcatatggctagctagttttcccagcaccatttattaaatggggaatcctttccccatttcttgtttttgtcaggtttgtcaaaaatcagatggttgtaggatgtagtattatttctgagggctctgttctgttacactggtctgtatctctgttttggtaccagtaccatgctgttttggttactgtagccttgtagtatagtttgaagtcaggtagcatgatgcctcgagctttgttctttttgcttaggattgtcttggcaatgcaggctcttttttggttccatatgaactttaaagtagtttttttccaattctgtgaagaaagtctttggtagcttgatggggttggcattgaatctataaattaccttggacagtatggccattttcaccatattgattcttcctacccgtgagcatggaatgttctttcattctgtttgtgtcctcttttatttctttgagcaatcatttgtagttctccttgaagaggtccttcacatcccttgtaagttggattgctaggtatcttattctctttgaagcagttgtgaatgggagttcactcatgatttggctctctgcttttctgttattggtgtataagaatgcctgtgatttttgcgtattggttttgtatcctgagactttgct

SEQ ID NO: 32861 - DNA, 1036 bp, Homo sapiens
aaaagttatgaattatacaaaagctttaggaggaattttagtactcctttacccaaaataaatagtggtaaatttccttctgttcttagctctgagtttgtatttatttataagtcattgtgatcatgtatacttatatatttttaatatgctaattgcttttaaatgggatttttgttctgattttaaaataatacatcctccctggacaatatttggaaatgtagcaaagtaaatcatgttaccattgttccattttgatatatataaactttaggtattattttatatataataaattttaagatattatatacaataaaattaaccaatttaagtatatgattcagtgaattttgtcaaacatatagtagtgtaattaccaccaccacaatcttgatacagaacttttttttccccagagatggagtttcgcactgtcacccaggctggaatgcaatggcgcaatctcggctcactgcaaccttcgtctgcccgggttcaagcaattctctggcctcagcctcctgagtagctgggattacaggcacgcgccgccatgcccggctaacttttgtatttttagtagagatggggtttcaccatgttggccaggctggtctcgaactcctgacctcatgatccacctgcctcggcctcccaaagtgctgggattacaggcgtgaaccaccacacccagctgatatagaacatttgtatcacctaaaaatttcccttttacccctttgtagtcaatccctcacccccacttctatcccctcgaaacccattgatctgcgttttgtcacttttcgttttgccttttctagaatttcaaataaccagtcttttgtgtccagcttctttcacttaatgtaatacttttgagatactgatattgttacatgtattagtaggtagttcctgttttatcttctattcagtagtatttgcattgtatagttataccacagtttgttaattcatttaccagttgatggacatttgagttgttttcagtttttttgctgttatg

SEQ ID NO: 32862 - DNA, 1023 bp, Homo sapiens
tatttcagtctccagcaagaattgcccatcttgttaaggtgactgactttatgtgattatcttaaatctacatgtaagtcagcatgtggtcatgtggttttgttctaactgttaaatagattaacatttcttgctctatttcagcagagcaaataattttgaaaaaatgattcctggtttttctgaattgtgttttgaggtggtaacagaccagccattctaaatggctcagtgtgattgcagtgtgaattttaactgcactttagttattcactcataaccacactttagttgattgctcactaaatgttttagcttttgagccatcgcttgtgaaactccttgtatcaggtaaattagtttcatttattatgttatttggtaatatatctgcctttgttgaacatgtataatttttccaaccttaggaattaagaaaggaactagatattcttctgcaagagaagattgaaagtcctcatcctgtagactggaatgacactaaatccagagactgtgcagtactgtcagctattatagacttgatcaaaacacaggaaaaggcaactcccaggaactttccgccacgattccaggatggatattacagctgacagcttttcaggggtggtctgaaaagccagtttgacagccattcttcatcattgtttaaattttggctggatgccaaaccctgggacatgaacaattttcatgtgtaaggtagaagccttcagtaggtagtaaagacttaatgtgcatgacttgatgttatatgtagagatatatatatatatatatatataccataaaagcaatatgttctctgatcatatactctgctgtggtcatgcccactctttgggagtatattccctttatatatattgagtattgtaccacttgagaaattcctttgttctgttatacaaaattaatctttctgctcataatgattgatgataccaccagtaaaaataggatgtttaccccaaaacaagtgtcaattaagaatttgaacac

SEQ ID NO: 32863 - DNA, 1029 bp, Homo sapiens
atacaggtaattaacattaactatttaaaaataaattattaaacatctccctgttgaataatactaaagacttttacaaattgagataaaatgtgtatgactatcaaaaaaaaaatgacctaggaattgagagattgaattagaactgtcaacatgaatttaaacagaattcttaacttttcattttttattcatctgggtcatactctgtaaaatttttaagttgataattttacagttattttgtaaatcaagggctgtttatcagtattatgattgtcatagtaaaatgtataaactcttggtatgaatcacttaattattttaggtacttttttgttatttattcttcagtggtatagtgtgcattaacattaaggaaaagaatattctgccatttttctaaaatgttgagtaattatacctgcaagaagaagattagttacatgatttaaattattcatactgatagcattttttcatatatttttaaggaaattatgctctgtcctcaaatataaatatatttttttgcaaaaataaactgaattattctctggaatttttttagattccgggatttgtttggtttttaccaagctcttctatcagtttttcaagtagtgtaaaaaaagaaaatcctctagaagacttctttttaacaaactgcattttaactttttttaaagggtaaaagtttacacaaaaaccgatggcctggttgctgttcatcctaaatctgttaatgtggagcaaacagactttcactacaactggcttatctatcacctaaagatgagaacaagcagtgtaagtgaacatttaaaataattaaggatctgattatcagtctcattgtatttttatgattgtgtagttttaacaattatatacaaaattttttttttgttgtgtcttattcctgtgacgtgagtaactttttccctctaacaaataacctattcttttaattttcaggtctgtaatgatggatctttgtattttaattagttaggacagttatttgat

SEQ ID NO: 32864 - DNA, 1030 bp, Homo sapiens
aggtgtctaagaaagtcaggtgtcagaaaaattaggtggggaaagtcacacctttcataaaagggatatatacttaaatataaccaactttatgtttcataatctctaaaaggaattccttaggaaatatttctgttatgaaaatacaagattcatctggtcattcactttcctttctatttaacttttctttaaattgtactaaagttaattgttttataaagaatttctatactatgattctgttattaggatgcatttcttctatcagtatatatacttaatgggtgtctgcaatcttatttatttagaagactgagtattgaggcaagggaagtacttttctatgttacttgaatgctttgtaataagccatgtatcattatttaaaaaaaaaacaaaaccttaagcttacctgccatttttaaccatatttaattctcagtaatagaaatatggatgtggattattttctttatgcttttctatattttttaaaaaatgggggtggaaagtaattttaaaaattctattagtctttcacaaaatagagtaatccttaaacatcagtggctattccttacaacatgcaaactttttctgtgaaaagtcgggtaatattttaggcttacaggccataagatctcagttacaagcattgacctctgccattgtagtgcaaaaacaaccaaatgtagatgaatgggtgtggctgtgttccaataaaatgttattgacaaaaacagcttttgtagtttgccaacccttgctttaaaacatgtttgctaaagtgttttcataaagcagggatagcttacaactcaatttatctattagtgtatggtttatagcctcaatgtgtgaaaggtattctagttctatttgttaccattgctccctagatgctgcataacatgaaaggacagtttgctgagcatcttcttggagctggatttgtaagcagtagaaatcctaaagatccagaatctaatataaattcaggtacagcaggaaacacagtgtaaataag

SEQ ID NO: 32865 - DNA, 1041 bp, Homo sapiens
atataaaagtctccaaagaattgggttttggcattcattctctttttttttttttcaccttggacatttcttagatgcgtaaagtttctgcaaagtttcatagttcaccaaggacctttatatttgtccagtctgttgtgttttattctcattctttgaagcaactgcgtcatttgccacattggatcaccttataagcactgatgaattttatttactccttctgagctcagccttacttaccaatttattcttctgtttagtgtaagaactttcaaatgttcattacaaccaaactatttccagttttcaacttttttcgtaaaccatttgagttttaataactttgaaattttaagataaggagaaattcataataattagtatgtgagggtttggggtaagagaaccagagttgtaggaagagacataaatgagctttctttgccaatcatattagggctaattttataaatgcttgttggaaaaggtctagaaggatatgtacgaaaattttaacaattaattaggtctaggaaggggggtattgggctagaggacacctgtggataactttcttttatatgtatttgttgaacatatattacttagcctttattttcttcagtatcaaataatttttgcatatgctttcttatgttgacaaggatgcttttttctttgcacaaactagagagctgtagtacacatggatgaacgacgagaagaacaaattgtacagttactgaattctgttcaagcgaagaatgataaagagtcagaagcacagatatcctggtttgctcctgaggatcatgggtacgacaagaaatatttttttaaagaataggcaaagagtaacactttaataataaaaataacatctttattttcttcgataagtgaattttaacctttacgtactttttttccttatgtagattaaacagatttagaaaatgacttttaaaaatttagatggcatgtttccataggaaagctaaatggtatgaataatagtgtatctggatatgagatgta

SEQ ID NO: 32866 - DNA, 1049 bp, Homo sapiens
actgtaggaatagcagatataggttatattctaactaaacagatacatcaaaaaaccttaagaggacttttagtagagacattttatgtcctgacaactgaaattagccactcattttcacttcaaaaaaggaggtaacatatagttcatttgctttgcttcttcaggtttgttgttttatcactgatttctcatatttattacattaggttatcctcctacccatgtaaacttatttgagctttcacaaagcatgtaatactgattagaattagaatgtcttacaaaaccctgtctcttgtcttaaagatgcttatgtcttgttctcctgggacacatactcctctacccaccctgggttttcaaactttatgttaaactttgttgtgaccagctattttggtgtttgtttaattgggatagaatacagtgaagagaagataagagttgcactgtacagagtaagggaagtattttgtgaaattacttgtatatgtgtgtactgggtcattagttttactgtggattgctataaaaaataaacaattgaaatctattgctctagattttacagtattttacacattgctgtctgctttcatcagtctccttaccctagctcctgcttccctcttttttccccaaaaatcaaaaccaaacctcaaaaaccaaaaataccttgaagatcattcccaactgcctagttgttggatacagtagtaattttttcagttctctgccttacttacgtccattttatacttctgagtccttttttaacacctttcttcacttcataggagtggttttctcactgtgtgctcctagtcttttgtttgttctcttgattactcctctgacttattttcttgccttggccccgtgaatgccagacttggtcatccgtctgtcctcatctttggaggtggtattatttgtaaattaagagaattcctgtgtctctgtgatttcaactttgcagaacactccaaaatttctatcataactctaaaaacaaaacctctcagagatcaatttccatatattca

SEQ ID NO: 32867 - DNA, 1034 bp, Homo sapiens
tttttattaatgctggtcatgatcctttaatataatttcagaaacagcaatttgaaaatctctgggctagaaaaatacgcggggccttgagatacattgagtctttctaaggactgtagcaagtcattaaaacattttaaacaaagaatgaaatgactggattttaaatgtttaaattcactctggtagcagtataaggaatggattgaagagaggtaatcctggttcagggggaccagtgaagtagcccttgcagtaactaaggtgagaaatgacagcttgaattagcacgttggcagtggagatggaggggagtggacagattaaagtgatttaggaggtagactcaaaatgattttgtgatgtattttatctgaagggacgagtacagtgttaatgatgactcttttatgcctatctgtaaggatcaggcttgttggaagaaggctcagctatggacactatgagtttgatattgttatagggcatacaaatgaggatttgcaggagggagagggctgtgtagatctgatgcctagaaaaatctagactggagataagtatttgacagttaatgggctcatgggtagtagttggagtgtgggagtgaacagtcagaaatagagtgggcccagcctgaattctatagaccattgcttctcagacttgaatgtgcataggaatcacctgacatcttgttaaaatgtaggacactggtgggatcagagattcgacttttgttacaggctcccaggtgatgccagtgttgctggtctgtagatcactcaggctgtcaaatacggaaaatgaaaatttaaggacaggctgaggaaaagaaggttacaaaataatctaggaaagatcagctagagaagagaaaaataaggtgtgtgttgttttgaaatctaagagtagtgtttaaaggagagaagagcgtatcaacaagaagtaattgatagtggcaagcatgcacaaatgatgtaagagcagagaatgtctattggatttatcaacaaggtcgttgatgatcttaa

SEQ ID NO: 32868 - DNA, 1032 bp, Homo sapiens
agcaagacacacagctctgatttggcctcaaaatggcaaaagaaccctatgaatggaatgttatgggtcttttctgttgaggagctgcctctactctggttgaatccactctctagtgctctgctttttgctattggtataatctgacattattataaagtcttctgtgcgtggtgttttctttgctgtagttctcacttccttttttctcgattaaaaactgccaggaaccacaggaaatgtgttatcattcagtgaaacaagagcacatcaggttgttcagcaaaaatcagagcagttcatgatttataatcaaaagcaactcacgaggatttacccctctgcctaccgcattgattccagtaacttcaaccctctcccctactggaacgcaggctgccagctaggtgtgtattccttgggaaggagtggttctctgtatattctcactatgccaccatcttgcctaattctctcccactttcaacttgcacagtggcactgaattatcaatctgaaggacgaatgatgcagttaaaccgagccaaattcaaggcaaatggcaattgtggctatgtcctcaaaccccagcaaatgtgcaaaggtgtgtattaatttcatagtcataaatgcaggtgtgtgttaatttcatagtctaaatgcaggcaacctttattaaggaagctgtttagaaagtgtgataccccagagtttttcaacttttttttttcaaaaagataggttaaggtgtttgaatgtgaattagaattcttgtcaccactacttaatatttggttagccgtgatgtttagaatgttatcttgagaggtcgtgtgtgaaagagggacatggatagcattgggttatcacttgaaatccagtgccccatataagctggactgctttttaaggtctgagcccaatctttcagaaactatcttaagtaatgtgagtctgtgacctgctgggaagcttcaattccacctgaaacaattttatcaagcccttttactcagtgtagtccaattacaa

SEQ ID NO: 32869 - DNA, 1030 bp, Homo sapiens
tcatgcctgtaatcccagcactttgggaggctgaggcgggtggatcacctgaggtcaggagtttgagacaagcctagccaacatggcgaaacccagtctctactaaaaatacaaaaattagctggctgtggtggcgaacccctgtaatctcagctacttgggagtctgaggcagggagaattgcttgaacccaggaggtggaggttgtagtgagctgagattgagcccctgcactccagcctgggcggcagagcgagactccacctcaaaaaaaaaaaaaaaaaaaaaaaagaaagaaaagaaaaagaaaaaaaaaaagggctgggcacggtggcttacacctgtaatcccagcactttgggagactgaggcgggcagatcacctgtggtcgggagttctgaccagcctgaccaacatggagaaacccggtctctactaaaaatacaaaattagccaggtgtggtggcacatgcctataatcccagctattcgggaggctgagacgggagaatgcttgaacgaacccaagaggcggaggttgtggtgagccgagatagcgtcattgcactgcagcctgtgtgacaaaagtgaaactccgtctcaaaaaaaaaaaaaaggaaaaaagagttgtgcaactataaccactatctaatttcagaacattttcggcaccccaagaagaaaccccaaacctattagcaattattctccatttctctcttccaagcatgctgtggcaactaatatttctgtctctattgatttgtctgttatctgttctggacatttcatataaagggaatcatatatgtgacctttgtgactggcttctttcatttggcgtaatgttttcaagattcattcatgttgtagcattatcagtatttcatttcttcttattgccaaataatatatcgttgtatgactataccacattttgtttatatattcatcagttgatggaaatttgggtcatttgctttttgggggctgttacgaataacgctgctgtgaacattcatgtacagg

SEQ ID NO: 32870 - DNA, 1050 bp, Homo sapiens
agtttctttctttaaaattattctaaaaagctttcagaagaactggaattttttctcattgaaagataaaataacatttatggaagctagatcagctgttttataaactcacagaacatagagaaaaatgcctttttaggttgaggaaagtaggatattcagttaccttctgaagttcacacagccagtgacagagcccagaccagaactctgtttgctcccttctttgtgcccacaaaactgtgggcagatgctgttatcaagctgccatgccataaactagatctctcagcacctgctatgtaccaagtcccaaaataggtgttgggtttgtgctgagaattaaacaaacataccctttacttctgccctgatggttttaggaaatctccctttccttactttttgacaaacattacctgcatcattttgcactttttccacatagaaatgaaattgttttcagaagctaatctctttcaattactcagatttactctaatctgtggaagctggcaggaaatcagttcacattttttatgtacctttttactaaaaagattgtcttgcaaaggacctggacttttttttttgttgttgttgtttttgtgcctgctaattcacagttcaatgatcagtgtcccagaatagatgtgttcacaaaagagtgcaagtgatattcttgtatgaccctaatctcggcgaatggtcatgattctgtatgtgaaaatctgtctcaaggttcttttgtagcaaagagtgatcagagcaccaagtgtgcatattactgctagaagtgattttgcctgttggtcctttcaaaggctagaacaaggaaatatatgcaggtatataaaaacatacacatatacacaaacatgcaaatatacatgcacaaatatgtatatatgtgtgtgtgtgtagattgctttctgtttatatatttatagtcatgtgccacatactgacatttcagtaaataatggaccacatatatgacagtggttcctgtgagattataataccatatttttattgtaccttttctgt

SEQ ID NO: 32871 - DNA, 1050 bp, Homo sapiens
agaatgatgggatggcaaaaggatatgatcaaatattggtaagctgaggggaacttagcaaggcttgtttgctcagattcctcttggtgtctctgtgtcttcgaggataaggatttttttttttttttttttttcctgggcatagggaaggcacttttggaatgaaagtcttacatcctatgttacaggaaggtcaggtaattcttttatgacctgcttcaggggagaagggtgggagaggtcagagagtcattcctgcttctgatatttcctcaaaggtcaatgtgccatactttggggtggtgtatccctgaacccctttttatatagtgtatatttatgtatatacatgaaataactcaaatagaatcatgttctatctgtagttttgtaacttttttgttcacataaaaatgtgtcttaagcccgggagtggtggctcacacctgtaatcccagcattttgggagcccgaagggggtggatcacttgaggtcaggagttcgagatcaacctggccaacatggcgaaaccctgcctctgctaaaattacaaaattagccaggcgtggtggtgggtgcctgtaatcccagctactgtggaggctgaggcaagagaatcacttgaactcaggaggtggaggttgcagtgagccaagattgtgccactgcactccagcctgggcgatggagtgagattctgtctcaaaaaaaaaaaaaaaatctccgataactttttttggcaaaattagatttatgatattctttttaatcacatcataatatatggttaacccaccatttatttaattgagccccatggacatttagatttttttcaatttgtttttttttttttgaggtggagtcttgctctgtcgtccaatctgaagtgcagtggcacaatctcggctcactgcaagctctgcctcccggattcatgccattctcccacctcagcctcccaagtagttggtactacaggcacccgccaccacgccgggctaattttttttttgtatttttggtagagacggggtttcaccatgtta

SEQ ID NO: 32872 - DNA, 1055 bp, Homo sapiens
ttagtccccactgtcctgtaagtgctcagcaaccagctccattgccctctgttggtcatggtgacctgaagccccatggtttcagtcccactcaccacagtgaggcctctgggaaaatgggaagggtaatgctattgatttgggggaaaagaggcttttcccccaaaactaccttgcgcaatgcttattcctcatttgatggttaccagtaggcagcgcagttaagcacagtctgaaccttttctaagggcacaggtgtaacagagcaacacgctgctgctgtttcttggttggaggggctgtgaaggccaggctcttacagccctcttttggtcacaaacatcttattttctgagttgttttgacttgaagaaattagggtgattattttggaaggatacatgaaattattttcacagttaaattaacttgatattgaaatgcaagttttcttggcacccgtggatggtaagcagtagggagtctgctttaggcttagttattgatgctgttagaacaactcaaaggaatttagaggagacgtggattgcagcctataatacctttaagttaaaaaaaaagatggagtcaggaatgcttcaccatggagttgttttgtttgtttgttttttgagacagagtctcgctctgttgctgagggaggagtgcagtggtgcggctcattgcaaactctgcctactggcttcaagtggttctcgtgcctcagcctcctgagtagctgggattacaggcatgcaccaccatacccggctaatttttgtagtttagtagagatggggttggccatgttggccaggctgatctcgaactcccggcctcaagtgatctgccccctctcaacctcccaaagtgttggcattataggcgtgggccagcgcacctggcccaccatggagtttctgctataatttatcttttgatttattcatcaactacttagcatttacctcttgccaaacactggcaggtatgggagatatagcagtaataaaagcatataaaaattcttaccctcatggaacttacattccagc

SEQ ID NO: 32873 - DNA, 1354 bp, Homo sapiens
attttgctgtaaccccttgatgcccatctttattcagacaggaacatttacaggagttctactggctgaatgtcactgccgccacagtggctcagatttgatttctaaaaaaggagcctgttcttatcaacagaagaggagaatatcaggatgttaatatttttcacttgttcagattcagagacagtaattataagtataaacatgacagcataaaatcaatatttgaatttcctttcttggaaattcttatccttctccttcaaaaaattgtttctttaactgcatgctttttggaattagtacttttatttttattttatttattttattttatttttgaggtggagcctcgttctgttgcctaggctggagtgcagtgaagcgacctcagctctctgcaacttccgcctcccaggttcaagtgattctcctgccttagcctcccgagtagttgggactacaggcacctgccactatgcctggctaatttttgtatttttagtagcgagggggtttcgccatgtaggccaggctggtcttgaactcctgacctcaagtgatctgcctgccttggcctccctaagttctgggattacaggcatgaatcaccacactcggcctctggaatcagtacttttaaacttcttatactcacttcaataatttctcaaattggagattaaatagctctgagctccagagactacaaacaaaaagaggttggagctgtggttctggggtgttggagaatgtaacaccacccttcatattccttcatttttcccatgtaatgttttttccttttctgcactacaaggtactgcctctgtatgtatacctgtctgttgatattattggctctcttcattccagtgactgttttttccagtgtgtgatccagccacagaaattaattcaggatgtgacctcaagttgcttttcttttctgggcctgcatttcaccatatcataacaatcagggactgggcaggatctctggagtagaacttgccactggttggatgggattgactaagaaagaaagaagagaagaaaaattactcaatgaagtagaccgaagcacttggttgccactcattctttattctccaatcatacgtttatttgtttatttattcagcaaatatttactgaacatgtgccaggtactgttggatacactgggaaatacaatgatgggcaacaccagacatgatccctgctctcatggagcgtacatgctgaggcatcacactggcaggtccaatgaaatggaaatgtggaatataactaatggaatgattttgaacagttaaagatgaatttcaggggaactatgttacgatatcaa

SEQ ID NO: 32874 - DNA, 1034 bp, Homo sapiens
ttgtccattgtcccttgataccttactatgtcccatgaactagtaattccttttccaccaaggaggcaggcgtgtgcattacattttaatttctggccagattttcttcccattccaacattctccaaatgctgttagcaatttggagaacacacacacctctcagacagtttttaccatgatatcttgcaagtaaacttggtcttggtgtttctgaacttggtccaagtagctcactcaaatttcatttcaaagtagccatccaccatcttatacccaaaggagtgacactttgctctgatcatctctaatctatacactccagaggctcctgctggagggacaaggtatgcattttttgaataagtaatgtttcatttagttgtctcctcctgtctcttctccttggttcatagtagagttggggtgaatggtggatgtgggaagaattagagtcttgtctgtcctgagtaattcaactctaggttctttttatagggaagcggaatgtcagggaggaactggtgctggatgtggagtgttgctctggactggggacagtggatttggagtcaggagatgtgggtttgcaacctgctgtttccatttagtcttatttgttaataatgtggaactcacagggctattgtaagggcttttttttttttaaagacaagatataaatggaaaattgtgtaaatcatgaagtgatttacaaataatatattattaataaggaatgtaaagggagtattggtttttatggaaaaggatactgaaggagattgggctctggtggtgataaagtagagagaaagaggtggagacggcagtcagggtgtaatagacaaattcctctacttagaaaaaaaaaagggccccttcttcccataaagttatttatttatttatttatttatttagtgacagagtatcgctgtcccacccaggctggagtgcaatagtgccacctcagcttactgctacctccgtctcttcggttcaagaaattctcctgcctcagcctcccgagg

SEQ ID NO: 32875 - DNA, 1147 bp, Homo sapiens
atgtagtacaggcctggtgaggtggcttatgcctgtaatgctagcactttgggaggccaaagcgggcagattgcctgagctcaggagtttgagacctgcctgggcaacacagtgaaaccctgtctctactacaatacaaaaacttagccaggcgtggcagcgtgtgcctgtagtcccagctacttggtaggctgaggcaggagaatcccttgaacctgggaagcagaaatttcagtgagccaagatcgtgccactgcactccagcctgggcaacagagcgagactccatctccaaaaaaaaaaaaaaaatgtagtacaggtttgctgggtgcggtggctcatgcctgtaatcccaaccctttgggtggatgaggtgggtggatcacctgaggtcaggagttcaagaccagcctggccaacatggcgaaaacgtgtctctactaaaaatacaaaaagtagctgagtgtggtggcacacgcctgtaatcccagctactcgggaggctgaggcaggagaactgcttgaacccaggagacggaggttgcagtgagccgagattgtgccactgcattccagcctgggtgacagaacgagactccatctcaaaaaaaaaaaaaaatgtagaatgggttgagtatcccttatccaagatgcttgggaccaaaagcatttaactgagcaggacagtagcatcatcaggataccagtattggctgttaaacaagaacaataacaaataatggcagatttttttatttttctggtgtggaattttccacttttggtgtcaggttggcactcaaaaagtttcagattttggagcagttcagatttcagatttgtggtttagggatgctcaacctgtagtctcttaaattatgtggaaaacaaaaagtggagttacaaactgttgttacaataatattagtgtttataattgctcatgtatttacttttaccaagatctttatctcttcatatggcttcaagttactgtctagtgtcctttcattgcaacctgtagcactagttttagcatttcttgcagggcaagtctgtggtaacaaactttcttggcttgtatttatccggaaatgtcttgaattcttcacttctgagggtcagttttgctggatataatattctt

SEQ ID NO: 32876 - DNA, 1047 bp, Homo sapiens
cattttgtgagggttttatcatgaaggaatgttgattttatccaatgctttttcagcatctattgaaatgttcatgtttgtatggcttttgtcttttctttgagatggagtctctctctgtcacccaggctagagtgcagtggtgtgaccccggctactgcaacctccacctccaggttcaagcaattctcttcagcctcccaagtagctggaattacaggcacccaccaccacgcctggctaatttttgtatttttagtagaggcggggttttgccatgttgaccaggctagtctcgaactcctgacttcaggtgatctgcctgccttggcctcccaaagtactgggattacagtcatgagccaccatgccaggcctgtccttcattttgtcaatatgatgtatcacatcgattgatttatgtatgttgaaccatccttgcatccctgggataaatcccacttggtcaaagatctttttaatatgttgttgaatttgatttgtaggtatttctttgaggatttttgcattaatgttcatcagggatattgacttgtagttttcttttttgatgtgtctttgtctggttttggtatcagggtaatactagccttgtagaatgagtttggaagtattccctcttcctctattttttgaatcatttgagtaggattggtatttatttttctcttaaacgtttggtaaaattcagcaatgaagtcattgagtcttgggctgttcattgctggcagagtttttattacagctttgatatcattactttttattatggctttgttttcattacttgttgatctgttcaggttttggatttcttcatgttacaatattggtaggttgtacatgtctaggaattatctatttctctaggttttccaacttattggcatatagttgttcatagtagcctctaataatcttttgaatttttgtggtattggttgtaatgtctcctttttcatttctgattttatttatttgagtctcctctcttcttttcttagtctggctaaaggtttgtcggct

SEQ ID NO: 32877 - DNA, 1071 bp, Homo sapiens
gccttggcctcccaaagtgctgggattacagacatggtccactgcacccagcccacattttctttatccattcgtctgttgatggacacttaggttgcttccaaatcatggctattgtgaatagtgctgtgataagcatgggattaaaggtatctctttgatatacggatttcctttcttttggtatatatctaatagtggaattgctggatcatatggtacttctatttttagttttttgtggggcctccaaactgttctccataacggttgtaataatttacatttttcaccaacagtgtacgaaggtttccttttcatccttgccagcgtttgttattgcctatcttttggataaaagccattttaattgggatgagatgatatcctattgtagttttgatttgcatttctctgatgatcagtgatgttgagcaccttttcatgtacctgtttgccatttgtatgtcttcttttgagaaatgcctattgacatctcgtgaccatttttaaatgagatcgttagattttttttcctgtagagttgcttgagctctttatataatctggttattaattccttgtcagatggatggtttgcacatattttctcctgttctgtgggttgtctcttcactttggtaatcgtttcctttgtggtgcagaagctttttaacttgatatgatcctgtttgtctattttttctttggttgcctgtgcttatggggtatttttcaagaaatctttgctcagtccaatgtcctggagagtttccccaatgttttcttgtaggagagttatagtttgaggtcttagatttaagtctttaatgcattttgattttatttttgtatatgatgagagagagaggtctagcttcattcttttgcgtatggatatccagtattcccagcatcagttatcaaagagactgccctttctccaacttatgttcttggcacctttgttgaaaatgagttcactgtagatgtatggatttgtttgtgggttctctattctgttccattggtctatgtgtctgtttttatgccagtaccatgccattttag

SEQ ID NO: 32878 - DNA, 1081 bp, Homo sapiens
aacattgacccctcacagcaatgatgtgtgacaagacacatggagcagtgccaaccaggaaagctcccccaagctttggtgtccacagtttttattcagacatcatgcttgactgactacatagctgaactcagtctctagctcctctggaggtcaaactgatatcccaagactcaaagcctccactgtaaatgagtttgtgtgatccaaattctcaagataaaggacattcttatcaggcaggatatgctgagggtttagagattaccaggggcaaagaaagagcaaaggccagccctgacttaaaatctatgttatataacccattactcagcttcaataataagtatatctccaaccaccttccctttccatattgttttccattaaaactatgtggaggccaggtgctatggctcacgcctataatgccagcattttgggaggctgatgtgggaagattccttgagcccaagaatttgagaccagcctgagcaacatggcaggacattgtctgtacaaaatattaaaaaattagccgggtttggtggcacacccctgtagtcccagctactggagaaatggaggcgggaggatcacttgagcccaggaggtcgactacagtgagctgtgatggcaccactgcactccagcctgaccgacagagcgagaccctgtctccaaacaaacaaacaaaaatttagaaacataataaaatggcaaaaatagtatcaagactacatgtggatatcctaatttttgtattttaccccatattccttatcctctttttgtctttatctatctagccatacatataaacacataattttttcagaactatttttcacaattattcagaatacattgcaccaatggagctcctgtaatctcttaattatcccttaatactccatgcattttcaaaaaacaagaacactctcctatgtaaccacagtacaacccccagatttaggaaattcgtattcacacatttttatcatttaatttacaaaccccattcaaattttgatgatagacccaattagattcttgctaagtatagaatctaatctaggat

SEQ ID NO: 32879 - DNA, 1041 bp, Homo sapiens
acattagatgaacttaggaaattttattatggtcagtcagaaatcattaaaaatgtatatatatattggcagttatgcttcattttaaccagattgatttgggtcaattaaaggcttaagttcttttaaacctaaaactttcaaattggtaaatttggatttttgaccccgtttactataacacattggactttttgaagtggaaatttagttgtatttatagccatctaccatccctaccagtactgaattttcagttgttttcacttaatattattagaaaaccataaggcaaaatgtacctcgtataacttgactgttgtaccaggtataataatatgatgctcacttgtaactgtcatgggtcagtaataaaattgaggttcttgaagaacttacatatgcatggaggaaaatatttcataagtcacgaattaaaatacttttttgtttttatattgcagattggtttttcagcagcagatgctgtaacaggactgaaattggtagaagagggagtacccaaagaacatttagccttattggcagttccaatggttcctttgcagataatactgcctctgattatcagcaaatacactgcaggtccccagccattaaacacattttacaaagccatgccctacaggtaaaaatgaaataaaaccttactaaataagaaagggtaaaatgaggaacattcatcaataccactaatatctgagcgtagaattatatatatggaaaaagatttgaaaagcatcttttttcaatattatttatatgcacttttatctttttaacctcctaacaggtttagatacagcttctttcatatggtaggcacacggatttctgtttttgttgttgttgttatttaagctaaaatggaagtcaactcaatgtttctttctctatagattattgcttgggttagaatatgccctactggtttggtggactcctaaagtagaacatcaagggggattccctatatattactatatcgtagtcctgctgagttatgctttacatcaggta

SEQ ID NO: 32880 - DNA, 1014 bp, Homo sapiens
gcactgaggcaggaaagtacaaaaaagtacaggacattgcctaaattgtggaactgggtttgggaaatcgtgctgagaaaggctgtgactaaattagtaagattttctttaattactatgggaaaagagtttaaagtttgtcctgtaagtaatggagggtaagttctaaaaaatttccctgtttctctgcatgagtaaaacacatgtaagtttttctcttttttcttttttcttcttttttttaattgagatagttgggggtcgggggggctgtctcactatgttggccaggctggtcttgaactcctggcctcaggtgattctccccctccttggcctcccaaagtactgggaattataagtgtgaaccaccccacctggcctaagcttttttgtttgtttgtttgtttttaacttttgtaacaactagaaaacaagtaaaatgaccaatatcaggaataacaatgtcaggaatatagtgaaattcttcattctgtcagtgatgatgaatttaggggattctgttttgaaatttaagcaactgaacttctcagcttctgtgctaccttggaaattcacagtagagtaaatgtccaggtatgtggtggtggtaggaggtgtcacaactacactattttcctgcaatcttattctcacagacatctaaccttatgtacacctcctcaaactgctaatgagtgagccactattactggtgaaatgatggtgatagtactttttcctcagttgtttggttgagagataattgctttgcacccaggtagatttgtctcagtgttctggggttccactcctgctttatgaataattcactgctggccgggcacagtggctcacacctgtaatcccagcactttgggaggctgaggtgggaggatcacttgaggtcaggagtttgagaccagcctggccagcatggcgaaaccccatttttgagactctgtctcaaaaataaataaataaataaaataaaaaataagtcacgactgggca

SEQ ID NO: 32881 - DNA, 1024 bp, Homo sapiens
gttcttcctaaagctagtttgtcccatgcccaggaatgaactaggacagcttgatggtcagaggcaagatggagttggtcaggttagatctctttctctgtctcagttataatcttgcactgacggtttcactttcattatcttccaactaatccttgaattgcttcttgggaaggtgtcaagagcctggacactggttggggttgaggccccaccagcatttggggacctccctaacccactggtatcaataagacctaacaatcctattcctaggtatttgcccaagagagatgaaaagatatgtttacacaaaaacctgtatgcaaatgtttatagtgacattactcatacaaaaaatgggaaacaatccaaatgttcttcaactggtcagtagataaatacactctggcatatccatacaatggaatattactggggagaaaaaaagaaggaggtggggatgcgggacaatgatatcaatgaatctcaatgcattatgctgactgaaagaagacacactcaaaagctacattttgtatgattccatttacatgatattttggaaaaagcaaagctatagggagagaaaatagatcggtggttaccagaggttggggaatgggtggagaggttgacttcagatgggcacaagggtatgtactttttggagttgacggacctattccatatcttgattgtggtggtggttctataactatctatttgttaaaactcatagaaccgggtgatgggtacgccaaaatctcagaaattatcactaaacatcttattcatgtaaccaaacaccactcattcccccaaaaacctataaaaaaatatatattttttgagactgagtcctgctctgtagcccaggctgtgagtgtagtggtgcgatcttggctcactataacctccatctcccgggttcaagcaatcctcccgcctaagcctctcaagtagctgggattacaggtgtgcgccaccatgcttggctaatgtttatatttttagtagagat

SEQ ID NO: 32882 - DNA, 1029 bp, Homo sapiens
acagttaagctttgggactctggaagaaagcagccatctaaacatttcagaacatgtaccaggtgttagctgtgaccttcaatgacacaagtgatcagattatttctggtggaatagacaatgatatcaaggtctgggacctgtgccagaacaaactaacctacaccatgacaggccatgcagattcagtgactggcctgaccttaagttctgaaggttcttatctcttgtccaatgcaatggacaatacagttcgtgtctgggatgtctggccatttgcccccaaagagaggtgtgtaaacatagttcaaggaaatgtgcacaactttgaaaagaaccttctaagatgttcttggtcacctgatggaagcaaaatagcacctggcacagccgacaggtttgtgtatgtgtgggataccacaagcaggagaatactgtatgagctgcccggccatgctggctccatcaatgaagttgctttccaccctgactagcccttcattatctcagcatcgagtgacaagagactgttgggatatggaatggaagactccaaggctacttgtctttgagacctcagactgcataagtgacgtcaaatatttattgcccaggctagcaccctcccttcagatgacgattactggcaagaaacagaggaggtggtggccatattccaaaaaccactgctatcccatttcaccaggatgactaaggcaagctccccgtggcctctaaaatccacctgcctgatttcaggaactgttttgttttgttttttgagacagagtctcgctctatcacccaggctggagtgcagtggcgcatctcggctcactgcaagctccgcctcccgggttcacgccattctcctgcctcagcctccgagtagctgggactacaggcacctgccagcacactcggctaattttttgtattttcagtagagacagggtttcactgtgttagccaggatggtctcgatctcctgaccttgtgatccacccgcctcggcctcccaaagtgctg

SEQ ID NO: 32883 - DNA, 1033 bp, Homo sapiens
caggtactagtaatcaaaaagaaaatttcttgatatctcccactagcattttcagatttagaatttaaccatgaagtacatatctagaactaatgacagaaaaatcgcattttaaaataatattacagttcttctgtaaacctcagagtgatttctgtgtggggaacttgctgaccagaaaattaaatgagaattttgtacatcctcagatagccaaatagagttaaagggccactcccacaccacccccttcaaaaaaaaacaaaacatgttttctctctttttacagatattgacacagtatagtctcacaatttttctcaagtgggatattaatgagggtaagtagccaatagtggcagggctagatacacctcagatttcgagtgcaacaagggtaagccccattaatccatgcaaagaactttcatgcatatagtttagtgcatataatatgattatagaaccagaagttctttctttaacattttgcttttcactaggcaagtcaatttacccagcatattctgaatagtgacatagcatttttcacaaagccagtggttgactttcatgttaacaatgcctcaaaaataccaaacattatattataaaatcccagtgctaattaaacaatgaacatttgccttcctgggtattttacaggtttacttaaaaaactgagcatgtgtatgtttatttgtaaagctcaaatatttaaacttgcagaagttgtgcctacaagcagttgaaagtataaagcaggttttaataaaatgtagtaaaaaatgaacacctaattgcagatacattgcattttctttgaagctaagtttccatagcagtgtagccctctctttcataaatcagctgcattgtcactaaagattgggtattcatccttttactgtctctacttgtaagtggacataacattagaatcctaatagacattctggataagttgtacaaggccattcttggggccaagcaacagtaaatatttgaaaggtaataaagcaaatacctagaa

SEQ ID NO: 32884 - DNA, 1054 bp, Homo sapiens
agaaaatgctaacactatcactaaaattgaccagcatattcgggggatagcaaaaaaaatagttaactctaacattattggagaagtatacatatgttgcttttctacttgaattgccctttctgaatattggaattcaatatacaaaagttaaatgtcaatgttggcagtaaatccttttgtcttttttaaaaaactagaaaaatcgcagaggtgtatcagactctctgagtttctctaactattataaaatcatatcattacagccatgaagaaatttagatgtcatgaagatcaaattcctcattttatagatgaagaaacaaattcagacaggataattaatttatttttaaaatactattattattattgccagtactatgcaaggcactagtattagtctgaggattcagcagtgaacaggacagatgtggtctcttgccctgaatcaccacaaagttaatggaggagctggaaccggaaatgagcctctagatttcaaactaaaagacttccattaatcaactactgactctataccagaccctaagtgtttcacctaacattaagtcttataaccttcactaatttagaataaggtggaacatgccttcccactcccgatgtctctcctgtgtgtagggagctcttttaccataataatcttggctcctctttgttgcctcatttactttacccaaggggagagtgacttatctgagttaggaaagagtaacagcatgagtaatccagccccttcccttctcttttttttgggtgttgggggactgagctgtctgaagggaatgtttgttcgggtttgctcttccaggccctaaggagaacaggagcagaaggagtcctcttcagatcttgtgattgggtaggcaagtctcctactggggtttaaaattaggaagcccactttcccacaggtatcagttctctcatcaataaaatctcaatgtgtgtttgtgcaagagagaagcatttcataaaaataaaactaagcaactggtactatcatatttgaaccacctaaaaccagcca

SEQ ID NO: 32885 - DNA, 1031 bp, Homo sapiens
ggccgaggtggtgaaagaggcatgggttctggagttcaactggcctgcattagaagtctagtcctcctactcagtggccatgtggccttggacagaattgcttaacctctctgagcctgagtttcttcatctgtgggttgacaatgataaacatttcccttgtgtgattgttgtgagattcagtaatgtatgtaaagagacattagcacagagtaggaggtacttgatacatcttgctattatctcttccttaaaggcatagcccaattcctagcaagcagaaaggctgaccctggtatcttgtcctaggtggatctcttgtttttcctaaacattagtgccccttatggcctgtgttattccttgagcaattaaaacacatcactctatgctggcaagtgtcatttatcgtgtttggcctgattcgccaactagactccaatcagagccaggactgtttgttatacttcattgtatccttagtcttaatcagggacccaaaacggtaggtgctctcaatgactgtcgatgacaattattaactgaagtcagttaacaagtatttatggagtatttactatgtgtcaggcagtgggccagattccaagaatactgaggtaaaagaaacccagcccctcactcagggagctcctgctgtggctaaaagctttgccaagacatgaaaagttaatgtacttttctgagcatctaattcccagggaatgactttgttgaagtaatctggctcactgtgtctcaaacagaaggcaaaagccaagtatgcaaccaggaagctttttacactggggagtacatagcattgcatttagtacccaaggacgctggggccattcaggaccccacaggctgttcttacctcctgctcctgaagagcagcccaacagctctcattcccatcaagataacagcctgcaagtgtgggggacagcttgctgctctcctcaccatgagaggtcagtgcaagaccttggacaaacccggtcagtgatggattccccttgtgagtcatt

SEQ ID NO: 32886 - DNA, 1313 bp, Homo sapiens
agtatcttagctttcttaatataagtttaacttggtacttactgaaaatgcctttttacccctgttaacggtattttgagcttttgaaaagaacttggttgacactgcttttattgtggataaaggagagatggtcagtaattaatggcttgaagtattattggagtggtttatcatttctgaaactaatcgtgtcagaattgactttgaaaagcattgctttttacagaaatatattaactttttaggagtaatttctagtttggattgtaatatgaaataatttaaaagggcttcgctcatatataggaaaatcgcatatggtcctagtattaaattcttattgcttactgatttttttgagttaagagttgttatatgctagaatatgaggatgtgaatataaataagagaagaaaaaagaataaagtagattgagtctccaattttatgtaagcttcagaagaactggtttgtttacatgcaagcttatagttgaaatatttttcaggaattacatgaatgacagtcttcgaaccaatgtgtttgttcgatttcaaccagagactatagcatgtgcttgcatctaccttgcagctagagcacttcaggtaggtgtatatttcccattttgttctgtaggataaatcacacaaattttcggtggttccaatacagatttagcaaaaatttaatttaaaacattctgttcttatggtttagattccgttgccaactcgtccccattggtttcttctttttggtactacagaagaggaaatccaggaaatctgcatagaaacacttaggctttataccagaaaaaaggtattctctatttactcgtttgtgccaacatgctaagagtccaagctactctaaggaagaaatactaacttttttttcctccaacagccaaactatgaattactggaaaaagaagtagaaaaaagaaaagtagccttacaagaagccaaattaaaagcaaagggattgaatccggatggaactccagccctttcaaccctgggtggattttctccagcctccaagccatgtaagatgtatttagaattaaaatgacttgggggcactgaaagtgtgtctttattagagagcttttacatttgaaagttgcatagagaaaaatgatgttaggaaactgctgctatgttctctcatggcagtcaaccaacatggaagcggaagcatggtactttgagttacatttagaaacaacttttggccctctgttaaatccagtagttaacatgttgttattatatcttttaaaagcatcaccaagagaagta

SEQ ID NO: 32887 - DNA, 1035 bp, Homo sapiens
gtagtccatgatggtaagtcatagaactctgccctctgcacttcagcccatgacctcaggatggcctgattggctaccctgctctccagccaatccagtgcaagctctcatccgagattcactgaagtggtccatatccatctggcagcatcttctagttctgtcggggtgtcaaaaggatttgtatatttgcttctagaagtaactatttgacatgcctatgtatttaatgtatacttgtaactatcaaaatgaatagttcatttttgatagatttgttgtgcagccattatgaattaaatggtttattaggagtttgactaaatttttatttttagtgtgtatagcatgaatactaccaaaggagacgacaaacttgcagcttaaaatgggcaccagttcccacactggcttaatttatataactgcttggctgtattgcgggtaataatattagaagcaagaagcacttcatttttaaaagagatgttactataatattgcttaaatgctttagcacttggacttcttgagatgcagatgtgtgatttggagtgctggcttatttaaaggtcaagccaaggagtttgtggttcagccacaactactgtttcctaagactattgatgtgaaggacttagtgaagtaatttttatattctgggcttcccagcaagatgtcctttttatgactgccatgcttcttttggactcagtaaatatttgtaatgttagaaaagtctcattatttttataaaatgcatgacattttaagtatgtgttgcataaaatggattatagcagttctcatggtttaggatttttaagaaatagtccatttaatttcagcttaaccttttaaatgatctgtaaaatttctttgatagtttaggaatgttgtggggagggttcattaataaaagttcagcaattttttaactgaaatagtttatctcttttacctagtcacaaaaaaggtatgtaaacaaggccattatatgtgtttattgctctttatttccctatctagattttc

SEQ ID NO: 32888 - DNA, 1028 bp, Homo sapiens
aattttggccatatagaatgcatgaaaaatcagtatgatcttatgaggactttatagtactgtaaatcttaggagcactttagttgttttgtttgtttgtttgttttaccagtcaaatagcagtgggagattgtataccaactttagtgacactgatattagtaagttctgataacccactaccatcggaccagcctggagcacattactttggccagtggaaagtctcttggagagactttgaggtttgtgatgacaaatcatgctatcgttaaagttaaatacatatatatacacacctagaatataagcagaatggaaaagttggcagggatgaattcaagaacattagagtgaatttttttcattacagaattgttagttcctttaggaacttagtctcgtagatgtatatatttaattagcataacttggacagcacaagattaatgctttaacttgtttgcaggagtttaaaaagctggtttctgttgccaatagttggttggaagggaaaatggagatgccacaaataaaattttttggatgtgcaaaacagttttgattttatttcttacaaactataggactccaagccccctgatccttgatcagaactacattaacaccaaaaatcaagttatcaaagcagagaggagggtgctaaaggagttgggattttgtgttcatgtcaagcatcctcataaggtgagttgtagagtacagaaattgggttcgtaagtattaggacttttctaaaaattttattttatatgaatttatgtttctatctgagtgttaaccttggttttaaaaagcattcttttaaaggttcaggcttcatcgaaaaacattcttttggatgttgagatttatcagtaaaatgacagtcaaaaatgtaggttcaaatcttaaatcttaattgtgtgctcatagagaagttatttttgtttctgtggttaaagtcccagtttttccacctagaaaacagagatgtaaagttcctcattccaaggaataaatgtgta

SEQ ID NO: 32889 - DNA, 1022 bp, Homo sapiens
agttgttaattgcatggaagcctttttttaaagcaggatgtaaaagtgtttctatgcatattacaagtttactcaagcacgtaacttgtatatgttattaacttcaactcttttttcccttgcaaccgactatacagcgaccagctacatttaccaaagcctgggtgatgtggagtggtacatagagatgaagctgtcgtcatggcaacagtgagtgaagtatcgaaaatccccaaggagaagccagtgctctgagaataggtcactggaatcggggactaacaggttggccactggtgaaccatttagaaaaactcctgtttcttgttataagcttttgtctttgctgtccaagttattagaactatagctttgtatttatttttgcataggttaatgtcattagaaagtactatcagtattatacattggttaggtaaagcatatcacttgtcttaatgatgctatttgttttaatctagtttattcataactttaaattgtagtgtgactttgacaattacagtggagatacattattcatgttgcttgtaggtcattggtctcttcagcctggctacacattgagaattagcagaggagctttttaaaaagtaccagtgcttagtccccaacctggattgtttggcctattcctccttcagttttttgtggttcgataattatcttttaagttgacaataaacagctaaatttagaggggggattgctttttcattgttctagtttccaaatatttacttttgagatgcagcgtattaaaattttcaaagactggtttaaccattctcattagtaaatacaatgtattttcagtgtatccatagataataaaagttggataggtaagaattggaagggtgttaagtgatgtcatttagtctaccacctttctacagtataattctgtggctctacaaggtggccttcagtttgtttaaatacctataaaggatgtttctacttttaagtaggcattacaaatttttgtatattgcttg

SEQ ID NO: 32890 - DNA, 1060 bp, Homo sapiens
ataatttgaaaaaagaaacataattaaccggttatctaaagtttgtagaggcagttgcatttatggacaatcctaacagtgctgtgaagccaggcctgtggcttaagattaaacaagaaagggagtacatttggctcaagtgtgagtgtattctgtaagttatttttcctctcccctctctggaagactgaaggctggaagtttaaacactgtagtttaagttaatattgtggcaaagttctgtgtagattatgtttttctactcgaagtcccagttaattctttatcaattgaggttggcttttgttagagtacttctcaacattgaactacgataaatcgaataataccggatctgaaaggactgcaggatgataaagtttgaagtttgaagtcaaagggattaaacaggtattttgttttggttagatacagtctcagtgagtgggttagaaaattaacaagtaagattgattgggttgcatttagatagggccatttatttgatgttgtaagaaaatacagagactgaaatagtatctcctaggtgttgtggtaacataattttatgtggacctatgtgttcctgtgaggcagtaccaaaaagtttgttgcaggacttcctgcatctacaggtgacttccagtacatgctgcagaatgatatatttggtgtagaatagtttttgcattcactctttaaggaattgtagtgatgttagacaaattgtactgagtttgaaaggaagttattaaaaggattataagttgttctgggggttgggtatgttggttagtgctgttagtattctatatgagtagtccttattggctgaatctgtaagttggcagtaatggaactattcagacaagcaaatattaaagcaactttaagatgactagtctattctgtgagtctacagacagttcttttttaaaaaaagagtatcctagtcaaaaagtctgcaacagttttcctacatactttttctcccccatcttttctcattcaccttaactgtgtccagggatagagtactttttaaattctaaaatatctt

SEQ ID NO: 32891 - DNA, 1030 bp, Homo sapiens
ggtggcgtggggggaagcgtgtggggtttgtgcgcgcccttcccagatgttcccattccaccgaaatgcatttttcaccagcgggaggatgggcccgcagcccggatggcccgcaggcggacgtggaagttcgcggggccgggctgcaggagggggtgctgaaccagacggcgggactaaagctagcctctagcgcagagtttgccgggagggagaaggggcagaggtggaaagcttaaccctccggtcgcctaggtgtttggggccgccaagacccctcgaactccgcagagcccctgaatctttggatcttaggggccaaaacttcccattctctttcaaggtagaaggaagccaacgaaagctgaggtccaggctacgctgcttctcccgggcgaggcgtttcggtttcttggtgtgttgggggcggggggggggggcggcgggggaggtggggatctatatttacacaattcctttagtgttttcaatcacccagtactcggttctcttagagcaaaaatcctttggtgctagctcagtgttaggaaacgtctttatctcaatggcagagcgttctataccaattcaaaggagttcaacaataaaattgatttggcacttggtgcctgcagtaactggtgtactgccatatttttccaattaagaaaatatgtggcatgcgtggaatcacatatttaagcaagcaattaagttgtttatgacacggtctgttcctgtttagatcagtaattggaaatttggggacaaaaatagagattttattaagtctatggatcaacttgaaatttggacatctcctcgaagccccaaaactttgagtggcatccactgtgtagatgacatgtaatagacaaagccttcccacctcattggcagaatttgaagggtgtgttttcatatttaaatttcaatacaatatcagtaaaaatactttgctattaaattggcccataatgtttactataatgttccttcctaaagaaaggacaaatgtccacaaaactaa

SEQ ID NO: 32892 - DNA, 1046 bp, Homo sapiens
tcgcttgaacccaggaggcggaggttgcagtgagccgagatcgcgccactgcactccagcctgggagacaagagcaaaactccatctcaaaaaaaaaaaaaaaggcatgtactatatatgttgccgcagttagacaatgagattgtgtatgacagagatctactctgtcatacatactcttcctttacaggaaacctgtaaaggaagttttgaaaacaaaggtaggagaatggagcccactgtactaaaaataattttaatttctcacagatgcaagcagtcaagaaaacacaggaaatctaagaacaaagcattggtgcctccaagcttcctagtttttgtcgttttacattgacagttcattcacaacagctgtggctgtgagtaagcatgtctttctttaatggtgacacagctgtacaaatcttccagcttctggtccatgaaacagctatgacaatcacttagcctgccccctgctgcctatctcacaaaacagcaacgctgtcgggttttcagactgacaattcctcttctagaagaaacaaaagttatggctaccaaaaaattcgttaagattttgcttcaactgataaatttctccaggaatatatagatggattgggagagggtgggggtaggggacaaattcaggcactcagtattccttccaaggcctaaccataaggactacagaaggctacagcagattccaagccagctcaagaattcaaggcgtaagtcaaagtttatctcccagatcagcccttgaagcttttaaatcttcaggtggattctggccccaatatggtcctgcagtgggttctacaacaggaatagaagctctagggttaaacagggcttttgtgcctgccgtatttcagaaggtaaataaaacaatgtggaaaactgtgtaaatttattattctcttatctttaagaatcacagttccacagtcttaaatgcctattacattttttgtaataatagttcttgaggaaagtgctgaatcttgtattctgagtgttggggaactgtctctttc

SEQ ID NO: 32893 - DNA, 1030 bp, Homo sapiens
acctgggatttcaaaggggaggtcaggtacaatcaagattagagaaggtgaagaattgtaggaagagtccaaagcaacagtaactggtctaaaaagttgtttgatttggctgagagatgcaaaccacaggcctcctttgcctcaaacttgcctaataactgtgctttgttagttgcatgctctgggaacatagagactaggaagcataacaaaagcaaggcaaagccaaggatttcagtgaaacacttcctgttaatacacagtatctagactgcactttcaaaaagcatcacggtaatcatagctcttaatctttcgggttagtcaagtcagatttaactatgatactttcctcaaaccctcttctagaacaaaaaggttgagagagttttattagtagcagcaagacagaatcccaggtgtacaatatacagtcaggcctctccatgggttctgcatctatggatacaaacaaccgagaatcaaaaatatttgggggaaaaaaatggatggtagcatctgtactgaacatgcacagatttttttctcgtcatgattccctaagtaatataacaactatttatataacatttagattgtatttggtattataagtaatctagagatgatttaaagtatatgagaaggtatgcataggttatacgcaaatactacactgttttatgtcagagacttgggcatccgtgcattttggtatctgaggggaatcttggaaccaatcctccatggatactaagggacaattgtaatgactctcctcacctttaatctgctctatagagatcctcagggccactttttatggcagtcacaagcaaagctgtgctttcagaagagtgaagtcttgagttataatccaacatttagcttttgtgctcagcttaatacagattatttcccttagcaatctaagttttgtgttcaaattactatagtcatgccatactgaaactatctgttttttccctctactgtacagtacagaaaaaagctttaattacacaatcac

SEQ ID NO: 32894 - DNA, 1022 bp, Homo sapiens
ttattattacagttttattataaaggatagacacagagtttctgtgccctcttctctcaggacacatcaccttcccagctcatcagtgtgttcactaaccaggaagctccgctgagctttggcgttcagaatttgtatggggttttattacattggcatggttaattaaatcattgcccacatgatgaaccagtctgcagcctgcttcccatctccagagactgggaacctgaaagttcagaccttctaaccacatgcttgatctgattatcagcccctatcctgaagctatctaggggcccaccaagagtctcctcactagcaataataaagatactctaatcactcaggaaattctcagggtttttgaagctccaggacaaagaccagataaattattgattgtaccagagtagcatattaataacagaaaactgagtagcacataacacgttgcctggcattatagtagacattcaacatgtttttcctttgcggaatatgatggtctattgttggggcttagaaactgataccccaaaatatggtgctttgacatgctgtgctgaagttcccttatctgcctcaacttcagacccaccaaagaagacaacaattccctctggtcccttccctgagttttccttaactaaactcatattgcaggaagaaatacagaaagctgtcaacacacctgggcagacttttgtcacaaaccattgtgtgctctgtgggcccaacagactgttccaggccactgtatgttcttcatgcccactgaattcccctagaaatcatttactacccgttctaaaaaccatccacacttccccatctccatttcccttaagaaggggaagaagtggcttttaaccatctgcaccccattgtatggtagggtaatcactctctgattctcccccatgcaagctaataaatttgtatgccatttctcctattaatctgccttttgtgagttgattttcagttaaccttcaaaggacaaagaggaagttttcctt

SEQ ID NO: 32895 - DNA, 1023 bp, Homo sapiens
gtttacttttaggataaggttcaaatcacttgcatttctttagctgtatattaactgaatgttagcaaaggtaaccagaaatactaagtagtatttcttttctaagcttaaatgtttgctacagataatctcaaggcagaatatttattcatgagtagaaaattcagagttcatagaagtagccgtgggtaagtttcagttaacagcaaaagtcaacttattgttactttagtaataaatgtacctttagaacataaatcttactttaatctcctagtaggcagatggatttacttttggcttcatagatttttcttttaagactcattatttgacattctcactttgtgacaaatgacttatgaataattgacagaattctttcagagatcactggccttttggaagaactacaagaatttcagctgctgttactactgagacagtgtgcagcagctgaagtgctatatccgtttttcctttcttttctctttcttctatcaatttgttgcctgtagatgacacagatcttcagagaaattctaaaagcccatcccactatccaccatggaagattttttctttttctttcttttcttttttctttttttttttttagacggtcttgctctgtctcccgactggagtacagtggcaccatcttggctcactgtaacctcctcctcctggactcaatcgatcttgccacctcagcttcccaagttgctgggagtacatgtgtagagccgggattttgccatgttcccaggctggtcttgaactcctgggctcaagtgatcctcctgctttagcctcccaaagtgttgggattgcaggtgtgagccactgtgccagtctgaagatttgaattctttcccgagacccttcaccagtgccctcccagtgcttcttccacttccttcaatttttctgttatctccttcccatttactacctgtggattcaccatttcagatgttccagagtctaaaatggaaacttggaataagttgtttaatataa

SEQ ID NO: 32896 - DNA, 1032 bp, Homo sapiens
tctatctcctgacctcatgatccactcgcctcagcctcccaaaatgctgggattataggcgtgagccgccacgcccggcccaacaacttaatcttttattagctttgcttaagagggccaattaaatcaaagccctttagttccctttaacagggactggagttatgatgcatgtgttacgacttttggcccactgtccatgcaactctaagtgcaggttgatttgctttccagaaatcccaaaggggctgctcttggatcaccgaagagccttacctatatcaaatcaaaaagacattctgggtcagattagactatgctcctggccctacagattgcacataaactatcataaatacagctttttcagggaactagttctaaaactcttacctgctgagaataagtcttaacactaagatgactgtattatatcaatttattattagaatcagacttatacctagcacaattaactattgtgtgggcaaagaacatttaaagggcatagtagaggtaaggagagacacatactcagctagagataaaaatactaagttgcactgattacttaaaatactagtcacaccataaaagtgccctgtagtttcaaaaacacgtaagcaatgaaatgttagccattatgtgttaaactacttaatctcatttctgtgatgtgaatatttttaaccccctttttgtagatgagggaactgacaagtgacttgtccaaggccatatagctgtgagaaaacccatgcattctcttttcagagttcatgctatcactcaactttaaagtaggccaagattaatgttggtaagggtttgtaatctgtaagaatgctaaaaacgtaagtatatatatcattttagatttgacattttgtatcttgccagtttttaggagaacttttcattttgttaagtatgcatgaatatagttgagtatatgagtaactggttcttatgctgctgttttgtatttttaccagcaggaagattgcaaaagttgatgtatgtaaatcttga

SEQ ID NO: 32897 - DNA, 1040 bp, Homo sapiens
taacttttatatatggagacctttacgaattccactcaagtgccctaattgcagaagtattactgaaattgctccaactggcattgaatctttacctgttaattttgcactaagggctattattgaaaagtaccagcaagaagaccatccagatattgtcacctgccctgaacattacaggcaaccattaaatgtttactgtctattagataaaaaattagtttgtggtcattgccttaccataggtcaacatcatggtcatcctatagatgaccttcaaagtgcctatttgaaagaaaaggacactcctcaaaaactgcttgaacagttgactgacacacactggacagatcttacccatcttattgaaaagctgaaagaacaaaaatctcattctgagaaaatgatccaaggcgataaggaagctgttctccagtattttaaggagcttaatgatacattagaacagaaaaaaaaaagtttcctaacggctctctgtgatgttggcaatctaattaatcaagaatatactccacaaattgaaagaatgaaggaaatacgagagcagcagcttgaattaatggcactgacaatatctttacaagaagagtctccacttaaatttcttgaaaaagttgatgatgtacgccagcatgtacagatcttgaaacaaagaccacttcctgaggttcaacccgttgaaatttatcctcgagtaagcaaaatattgaaagaagaatggagcagaacagaaattggacaaattaagaacgttctcattcccaaaatgaaaatttctccaaaaaggatgtcatgttcctggcctggtaaggatgaaaaggaagttgaatttttaaaaattttaaacattgttgtagttacattaatttcagtaatactgatgtcgatactctttttcaaccaacacatcataacctttttaagtgaaatcactttaatatggttttctgaagcctctctatctgtttaccaaagtttatctaacagtctgcataaggtaaagaatatactgtgtcaca

SEQ ID NO: 32898 - DNA, 1645 bp, Homo sapiens
atgttgcctgcagactgcgcctgcgctgcgaggctccgcgaggccccgcccggtctgggcacctgaagcccttcggggcagaggagggcggggactcggggcggctctcagcatccgcctggagctcgtggcgctgtgtttccgtgctgtggagttgcctggtccgcttcctccccgcggtgagtctaaggacctttacggatgcggagaaggtggttctgagtcctttttcttttcctgtagcacagtctggtgtgcctagtgtgttgggcggggagtcctgggggcgcgacgatggagggagtggcttgggacctgcactcattccctcttgtcccatactggagtttggggagccactttcccgtccctccactgtggagctgcgttcctgtgagggaggaggccctctgtggtggcgagggtgagctgagcggacgccgccgagtcggtcagtcccgcggggttggggacgggcgggtgccgaggtggaggcgcgttaggagggaggcctgggagagtggagctttgagaaggggaagggaagagtactgccattttgagcccctttgtgggaggtgctcgcaggacttaagtgaggtaggtgcagttacccattttacagatgtgaagcctcacttttgagaggtatttggtaatactgacccaggtcccacagcattgaaatggcagaacagagagatgagcaaactatactaaatcagttataatttagagctggcaaggtattttactcccatggatgcttttgtcttgcagttaattttaagcactctaaaatgaccgtgaatgttttttctgccatcaccattgttgggtaatattgtcgagagctcataagctacttgacgttgtgaaaagaggtcctttgtgacagtctgtttggtcagagttaggattttcaaggaacaagcgatacctctactgcagctccagcaactgtgttggtgtttgtggcttttctgaaaacacgatgaagcatcgtgaagataaatatcaaagacagtgaactaacaaccatttttatgacatgagacaataaattgaaaacattaaagataacattattttaattttagaataagaataaaagattctggaggagttggagaagagtgtattcagcccccaaaccacgagatcaacaaagtaggtaatctgggagattaaataaatatgaaaaacaattaagtttttacagagtgtatgatttaaactacaaagtgaaatttagaagtcttttgaaaaaacattgtgttggcggtgtataaaactccaaccattttatcgaaggagcggagcataaagtgaaaaataaacaactcccttctctgatctgtaccttaaaagtagtcacttaactcttttgtacatccttctagaaattttacaagaatgtgtacatctcaaaacacatgcaaagttgttattttatacatacagatctgcagaactacacaaaactgcaaattaagttacctggatactttttcactatgcattcatgtattggtctttttaaatgagtaagtagctatttaatctggcaaggtgaaattttgattttaggtgatgttagttttgacattgcctttcactaaacacgttgatgaatatttcccac

SEQ ID NO: 32899 - DNA, 1025 bp, Homo sapiens
ggtgacagagtgagaccccatctcaaaaaagaaagaaagaaaaaaaaaaccttctataaactgtttcaattttctaaaggatggtaagacagtgttggcattcatcatctctccagacctttttttaagggtaatgggattagtactataatactgtttatatatattttaaaactaattatcacattctttttcttttttttcacctagattgatgaagaccctagccttgttccagaggcaattcaaggcggaacatttggtttcaattcatctgccaatgtaccaacagaagggttccagttttagaaagatgttgtggaagttaggtacaatgcagcactgagatatatatatatatatgtgtgtgtgtatatatatatatatatacatatatataaaaaggtttgatccatcaagcttggctcatgggatctgctgctgcattaaatcgggaaagaaaatgtgaagatttcatttggaatcacagaaaatgcccaaatgaggtcaagatggcgagtgggtgcgagtgagaatgagtggcaaaatgtaatgaaaactttacatgaatgcttatttaggttgttcaaagtaaaaagggctacaggtcacagatcgtcagtgcctgagaaagaacattgacttactctatatcaattgaggggaaagtgcagtaccgtcatcttcaagccttgtaagcataaaagagaataggctgcccatataagtcaaaggaaaatgagcccaggccttgctatgaagcagtgtgtgaatggacaatgttgaatgaatgtctggctcagtgatggagagccaggttcatctttgaaatctagggctcttcactcatgaagcagactcctagtcctggagtgactgtgtacgagagcgtggttgtggtgctgtatgtgaacgcatgcaagcttgattcaccttcagggggctgataacctagtaaatcatcaaaatgagatcataagtgttaatgtacactggacatgaaaacaaagactggtttagcagca

SEQ ID NO: 32900 - DNA, 1050 bp, Homo sapiens
cccccgtctctatatattaaataaataaataaatcctgcgcaacatagtgagaccccatctctctatatttaattaattaattaattaaattaaaaatagcatacagcctccattaacagcctccttaactgatttcataatttcttactcttaaagggaaaaatctttgaaggaagtatttcttatggcaaagaaatgtttaatatgaagttgagtgattcctttattttaactttacgttgtttttttctaagttcgggaaaaaggaaactaaatttaaaagaaaaggaggttagattaataatgtgggcacacttaacatgagagagatgaggtcatatttctatactcgaaatttcaaaatcagaattattccagtgagataacatggcacacaaagtttacctatattgcattattttatgttgtttttattcttcaggtggcttaccttatccaacaaaatgttatcccacctttttgcaacttgctgactgtaaaagatgcacaagttgtgcaagtagtactcgatggactaagtaatatattaaaaatggctgaagatgaggcagaaaccataggcaatcttatagaagaatgtggaggtaagtttattataagctcttattccacatcttaatgttctctttgtaactacctttatttgccgactaatatagcacatctatatttttctgtcttagatattcaagtaacagaataaagtaaatattgtattctatatgtgcagtcctgctcagcctcttgcatatgcttaggtaactgaattgctgccatatattgaacaggcactgtgataagttactgggaagacagtggtaaacaagacacagtccttgccctcaaggcatgtagtctagtcttgataaatatgaactgatttaatgtgctaattaccctaatagaaatgtacaacaaaatgggatgcctaatccattctggaagaagcaggaagtgcacctgagctggattttgagagatgaataaggattaataaggtaaaaagggatgaaaggtgttccaggcag

SEQ ID NO: 32901 - DNA, 1074 bp, Homo sapiens
tgtgtattggccatgattctttagtaaagaacttgtcttgttttttgttttgttgtttttttttagacggtctcgctgtcacccaggctagagtgcagtgacacgatatcagctcactgcaatctctacctcccgggtttaggcgattcttgcgcctcagcctcccaagtagctgggactataggcgcacgccactacacccagctaatttttgtatttttagtagagatgcggtttcaccatgttggccaggctggtctccaactccccacctcaagtgatcaggtgtgagccatccatgcccggccaagagcatttctttatcagctattgtttattaatactttgaaatacagttcatttaggataggcaagataaatgtttgattctttgtccttatcagtcattttttagaatgactcgttccctaataaccttgaaagcagaccagagtagatttttttttagtgtcatttggaaattatgaatttttaaaatatattttgcaagttttaataccttttagttgttactctttttgatactctgtttgttcctgaccaacaggaacctcttagaattggtgacctgtatcttttatgttatcactagtttttgagagctacaccttttggatatgacatgattcccaggcctatcttacatgttttctgatctagaactggaattaactatttttctatggtatcttgattttgttttgtagagaatggtgtttaaggatcatatttcagctataaaggtgatcattgttataatgttgtcattttttctaggcctgaatcaacaaaataaatgataggcattgtagaaagtgaaagatgatgagttcaggaacatgagagttcataaaaaatgaatcatgaatgaaagggagctattaaatattattggatatttaagataacagggtttttaatttttattcctatgattttatatttacatctcttttatgctgaaaatcttcctaaaaacattagcataattacttatttttcttacattttggtatgtatagatctgtggatacatgtcaatatacattattt

SEQ ID NO: 32902 - DNA, 1224 bp, Homo sapiens
aggctggggtgggaggatcacttgagcctgagaggcagaggttacagtgagctgagatcgcaccactgcactctaccctgggcgacagagcaagaccttgtctcaaaaaaaaaaaaaaggatttcacatagaatgtcatctcattgtgcatttcagactgctgcacttagagctgtgggcaacattgttactggaactgatgagcaaacacaagtagttttgaactgtgatgctctttcacacttcccagcactcctgacacatcccaaagagaaaattaataaagtaagtactattaaatactacttaatagatagcacttaaaatgttaacagtttctatttgtaaaattagagtcttagaaatgtctgtaatattgattcttaatacaaactgtcatttagacatcaagagaaaataaaaattttactctccataacaagcattaataattttttcatacataaaaccagttatgaaaagtgcaattttggctctcttggaaatgatgaaatagagataattgggtgttgaatgttgtatgactggaaatttttaatatgtatattatgtaattcttataagtttagtgttttataggtacttaatagagagtgtgtatgcatgtgtgtgtgcttgtggtggctatggaaagggggcactgactggtgatgctgatattggagtgcatctgaggctgttgtagaaataacatgggttgttgattacaacattgccaatgattataacccaagaacagctcacctaactagcctggcaccctaaaatctctaacaggttcattaaaatggtcctgtgatctgatccaaaagagcctagtatacattagctaatactaatattttttagagtaaaacttattagttatctatgattataacgcgtaaggccaccattattttgtcaaaagtagcaccaactgtgatgtaaagggtaacataaaaagattaagataggccaataaaacaatcaaatatctggttccacttttccttgagagaaattatgcagtgaatgactattacaaataagtatactaaaacaatgcactttgttttttatgtctccattgttgtggataattgatatttatctactttggctaagattcttcatcagaatagaatagagaataaagcacattatgtgagggaagggcactgaatcttatttacagctgttttaggatttgtatttgtatta

SEQ ID NO: 32903 - DNA, 1033 bp, Homo sapiens
aatggcaaagcattattttcaccttttaggagtttcggggtgtctttttggttttttttatcttatttttttattttctcttgggtgtcctaagcataacattagtttacagttttacgatttttttaaagtcagggtcataaaaacaagaaaaaataaacaatgccgaattgtttctgtttttcatagagacggggtttcaccgtgttgcccaggctggtctgtaactcctgggctcaagcagtccacctgccttggtctcccaaagtgctggggttacaggcgtgagccactactccctgcctagtttattgttttaaaggttttacacttctccagcttgtcttgacacagagttcatattctggaaaggctttggaagtagttttaggcacaattattattcccatgtctttgtcaataatttgtgtatttatttgcagcagttacagttgtttgtcatactgccctttggtcataacttctaattaggacctaacgtactaggaaagatcaaacacatggcctgttgtacttaaagatgtaatcgttaaaaaaaatggtaggctacttagtagaagttgattacacaggcttttttttttttttcataagtagcagctgtagtgaagtacgtattttttgttttaattacaggtctcacagattgacctatgattattttaatgtcttgatctgcagctgtaggggacttccactatttaagaagttgctggccgggcgcagtggcttacgcctgtaatcccagcactttgggaggccgaggcgggcggatcatgaggtcaggagatcgagaccatcttggctaacacggtgaaaccccgtctctactgaaaaatgccaaaacttagccaggcgttgcggcatgcgcctgtagtcccagctactcgggaggctgaggcaggagaatggcatgaacccgggaggcggagcttgcagtgaaccgagatcgcgctgctgcactccagcctgggcgacagagcgagactccgtctcaaaaaaaaaaaaaagt

SEQ ID NO: 32904 - DNA, 1062 bp, Homo sapiens
tatacaccaccatggaatatctctaagttctataaacaaagtaaaccaaaacaaggtaaaaaacaggatagatagacgtgtcagaatcatggtaaatctaacagtgttttctatgagataaggaaattgtgggtgagcaggagggctcctttggctttttttcgctttttttttttaaatagttgaatttactaatcttgtacgtgtgttattttttgtaatatcatcggttcatatgaggggtgagattatgggctcttttattctttgtacctctgtatttttataaaccttatattatagtttttaaaattgtgatatagccaatattgtattaataatttcaaagagatttttcatgttttgcaatatgaatgggaaatgaagattgaaaatcatctacatagtatgatttttattatgagtaagatttgactttatatccatatggctaaaagaaaagattagaggtgtatattgaaatgttaatagtggttttctctggataatggaatttgaggtgattttaaaaatattttcctttaatttttttgtagactatgagaagacaacgaaatgaagttgtagttgaattaaggaaggtgagtctgattaatattgggtacttctaagcataattctaacaacattatagcattatatacaagatgccaaatatatattatgtttttaggtaaaatgtataacctattgtataactaaattttatttactaaatttagttaaactttttaaaatctcaactgctaagcatttttctttagaaaaaggagagattttgactaaatttgacaggcttttgaagttgaaaggatacaactagttacttgttcattatgcaaaaacagatataaagaacttaaagtataagtcattgagatacagttgtattaaatagttctgctattaatgggcagtagtaagtccctgaaaagaacttgttgcaaacttcttcaacttttaagtattatagttgagaatatatttataaatttgctccaagcattttaagtgaagttgaaatggcccttgatttttgta

SEQ ID NO: 32905 - DNA, 1076 bp, Homo sapiens
gataaaagacttaaacataagatctgaaactggtaaactagaagaaaatagagaaagttttataactttggtcttggcactgatttcttggataagacacttaaaagcaaagctataaaagcaaaaatagacaagtggaacaacatcaaactgaaaagttgatgtgcagccaaggaaacaatcgagtgaaaagacaacctgcagaatgtgagaaaatatttgcaaatgatgtatctgataaaggattagtatccagaatatataaagaactcctaaaactcaacaatagcaaaaaccaacaaccctattttaaaatgcgcaaaaggcttgaaaagatatttctctaaggaggataaacaaaatagccagtaagcacatgaaaagatgctcaacatcagtaatcattagggaaatgcagatcaaagcaactataccatctcccacccattaagatgactactatcaaaacaacaaaaacaaaataactgttggtgaagatgtggagaattcagaatcttgtgcattattggtgagaatgtaaaatggtgaagctactatgaaaaacaggatggtggttcccaaaaagtgaaaaatagaattattatatgacccagcaattccacttctgagtatatatccagatgaattgaaagcgggaactaagatacttgtacactctagtttatagtagcagcatttgcagtatccaaaagtggaagcaaaaggttatttaatgtataaaatagatagataaaatgtgtatgtacatacagtggaatattatttagacttaaaaaggaaggaaattctgacatattacaacatggatgaaccataagcattatgccaagcgaaatatgccagtcacacacaaaaaaatactgtataattccacttatacaaggtacctagaataggcaaatgcatagaaacaggaaaaggaataatggttgccaggggatagagggaaggagatagggagttgtttaatggatgtagtgtttcgtttttgcaagaccaggatagttttgggagatttgatgcacaacaatatgaacattcttaatgctgccgaa

SEQ ID NO: 32906 - DNA, 1034 bp, Homo sapiens
ccaacaacttggataacctagatgaaatggataaattcctaaaacacataacctgtcaatactgaatcatgaagaaatagtaaatctgactagacctataagtagtaaggagatttaaaatctcccaacaaagaaaagcccaggatcattggcttcactggtgaattctaccaaacatttaaagaattgatgccagtcctgctcagactctttcaaaagatggaagagttccaaactcaaggccagccctactctgatactaaaaccagaaaaagacattataagaaaagaaaactacaggccagtagccttgaggaaaatggatgcaaaaatcctcaacagaatactggtgcaccaaatccaatagcacattaaaaggatcacataccatgaccaagtggaatttatgcctggggtgcaaggatggttcaacatatgaaaatcagtatgatacaccacattaactgactgaaggacaaaaatgacacagtcataccagttgatggaggaaaagttcagtaccagactttgacaaaattcagtgccctttcatgataaaaacactcaaactaggaatagaagaaaattatctcaacataataagggccatatatgaaaagcccacagcaaacaacatattcagtgatgaaaaactgaaagcttttcctgtaagatcagaaataaggcagtggcggtgtgtgctggctcatgcatataagtccagtgctttggaaggaggcctcagtgggagaatcacttgagcccaggagttcgagagcagcctaggcaatatagcaagaccctgtctctacaaagaaaaaataaaataaaaactatccaggcatgcaggcatgcacatggagtcccagctacttggaaggctgaggggggaagattgcttgagcccaggattttgagactgaagtgactgccactgcactgcagcctgggcaacagaataagactctttcaaaacaaaacaaacaaggatgctcacccttggcatttctcttcaacatagtactagaagccct

SEQ ID NO: 32907 - DNA, 1050 bp, Homo sapiens
gtggtccttccccgcctgcccccgccgcacccctccgggcccggagccggctcctcccagcgtcgttcgcttcccctttccgttcgctctttccgccccggctctccatcgccccttctgattggtcgaacgcaccggagcctggttagccaatgggcgagccgggctggaggcgatgggcgtggccgcagcgccggggccctcagatcgaggctgcctccccctctcagccggcagcacattccgtcgccttgccgccgcccggccccacagttgtctttgccggagctgcagtcgcgctggggttagggcgggggggcgggcggggagaggagaaggccgcggcggaggcaggtgagaggaggaaggaagcggcggcgcggcgggcacagcagctcaggcggcggcccggttcctgggagtgtcggtgcggcgcgttggttggggcggatcccgcggggcccgggcgggggaaggagtcaccggcccggccatggcggacaacgagaaactggacaaccaacggctcaagaatttcaagaacaaaggccgcgacttggaggtaaactcggggacgacgccggaggggtgggggctgtgggcctggggccggtctccgccgggaccccgagtgtggggattaggggcgggagccgcctccaggcctcggggaatggcgctaggggccggcccgtctgtgacgcctctgctagcgcgccgggaagtttatgtcgggcctgctccgcctccgccggggagcgaggtgcccgggtacggccggcgcggcctaggcctgcccggcggagccggcccggcgcgggtgcgaggggccgggccgcgcggcggggaggccgggcgcggcgcgtgcggaggaggcgtgcgtgtgcggccggtgctgccccggccgggccgcggccccttccccggcagtggcggagattccggctctcgctcgggcaccgacgtctggcgccgcgggaaggagggcggtgggaatgggagggtgagcgtgtggcgaccgagtggggctctgaacttcctcagcgaggc

SEQ ID NO: 32908 - DNA, 1049 bp, Homo sapiens
aacatatcttctttttaaaggctgaataatattccattttttatacataggtgcttttagtactaaaaagaagcaactgtgtgaggtgatggatatgttaatatgctcaatggtagttatcattttacatgtatatgtatgtcatgtgcatgtacatgcataccaaaacatcatgtacatgtttgtatactttaaatatatacaataataaataaattagatagatgttttttgaaagaaactatttcaaattgtactacgtactccctcctgtaaatagagcacagtgaacagtttcactatgtgtgagtgactcatgcctgttataataaccacctttattataagaaatagaataagaaagaggcctcaaatagctgatatagtgtttatgatgatatattccccctcagaaattcactattctgattagtacttaatttttctcctttattctggtcttgcccattctctgtcatcatttcttgattttaatcaattgtcttgtagctctctgccattttctttctatctctagtctctgtttaacctttcacttcttttttcagtcaacatgcttttttgtcttattgtttttatcattttcctatgcataaagtttttgttgttgttgttgtgctttggctttgatggccatttggtcagatatctctttttcttagctctcactaaccaatcttgtagtggtttttgttttttattgttaaccattaaagtcataaggctttgttgactgctgaatccattcctaatttgagaagttagggaagacatccgacagatgaatattaagcattgctatataaaaagcaagtattctaggctgacggtgattacactttatattctttaacctgtgctgtcatttgtggttaatataaagtgtagccaaatttgatagttgtaaactgtttcagcctttatccaacagcccagtaggtcctgtgagtttagtcagtatggatcattttgtatcagcataccttgttttacttacgatctctgaaaaattgaaggcaaatatttac

SEQ ID NO: 32909 - DNA, 1034 bp, Homo sapiens
ggtaagctggcaagctggagacccaagaaagctgatggtttagttgcagtctgagtccaaaggtctgagaaccaggagagccaatgttgctgttccagttcaaaggccagtaggctcaagacccaggaagagccaaagtttcagttcaagtctgaaggcaagaaaaaagcaatgtctcagtttgaaggctgtcaggcaaaaagaattttctcttagtcaagtgaaggtcagcccttttgttctaatcaagccttgaactgactgaatgaggcccaccaacatgatggaagcaatcccgtctatccatgccactgatttaagtgttaatctcatcttaaaacactttcacagaaacacccagaataatgtttgactaagtatcttggcactctgtggcctaatcaaattgacacgtaaaattaatcatcatagttgacaagggagtctcatcctgttggcaagacttgccgtagagggaaagggaacagcaaaagaatctagaactggcctatgaataattttgatttagaatttaaatcacaggaaatactctattgtttttgaaatgtgattgtgacatcaccagtgaggtcagtctttacagtaattttggttctgaatatgaaaacccttaatttttaaatttggcaaatcagtggtctattttgggaccacctcccccactacctccatgaaagccaaactttatagcaggggagtccaatcttttggctttcctgggcctcattggaagaagaattttcttgggccataacagtaactgatgagctttaaaatgtatatatatatatcgcaaaaaaacccatgatattttaagaaagtttacaaatttgtgttgggccccattcaaagccatcttgggctacatgtggtccatgggccacaagttggacaagcttgttctatagcttaccaacaagtaggcctaaagagggaagatgaaatatagttcattttaaggggaaaatagcctacaaaagtttaaccttctgaagagtcaattgaggctgttg

SEQ ID NO: 32910 - DNA, 1029 bp, Homo sapiens
aatgtcagataaatgaatagagaaactggatatatcctagagattggtagtaagatataccaaaataatttttatttcagaaatagcagcagtcattaaggtaagtaacgtactcttaggcatgagtagtgttttctaagactgaccaaatagcctctaaatccttgcctttgggggatataggttaaataagaccaagaatactcatggggccagaaggctggctggtgagcagcagcaagaagggtcatcctagagcagtagttctcagaccagggacactcttctggagtacagtgaagggtgagagggtaggggattgagtgaaaacataatccctacataagtatctttaaactagaaagtctgataattttcttcagcctcagtggataaaaaacaaagaaagctgggaatacttgcagtgtcactatcaatgcatggttttggtgaaaccataggtagatattgctggggagaaaagatttagcgcaggtctttttctggaagaggctgtgacatatgtggtaactttgaagaacctaaggagactcacttggaataaatagtaacattcatcttttggagtttgggcagtgggaggagtggcagcagccaggcagcccagctttgtgaaggccctcagcatgccatggcccacatgcatctgatatgcgccttccccacttccaggatgcccaagaggacggtcagctcagctgatgggacagtgagggaagatcccaaaaggagattgatgtggttgtcagctaaacctgctctttcagtagtggaaattgaagccccaaaaggtagcaggaaaagataaatcttcaggcaaaaaagtgcaaacaaaagagaaaagagtaggaaagtgaaaacaagccaaagtagctaagaataaagatttacctgcagaaaacagaaaaactaaaactgaagagagtccagcctctgaagcaggagagaaagaagcccagtctgattaatatcgcataccatgtcttatcagtggttccccgtctctct

SEQ ID NO: 32911 - DNA, 1053 bp, Homo sapiens
tgtttaatttccttgtgtttgtatagtttcaaaaatttctcttgttactggtttctagttttatttgattgtgtttagagaagatgtttgatactagttgaatgttttaagacttgtattgtgacctaacatatgatctgtccttgagaatgatccatgtgctggggaaaagaatgtgtattctacagctgttctatggaatattctgtttaggttcatttgtctatagtgcagatttagtctgatgtttctttgttgattttctgtctgaaagatctgtccaacactgaaagttgggtggtgaagtctccagctattattgtattttgctcagtctctctatttagttctaataatatttgccttatatttctgggtacaccaggactgggtgcatatatatttacaattatcatatcctcttactgaattgacccctttatcattatataatgaccttgtctccttataatttttgtcttgaaatctgttttgtctgatacaaatacagctgctcctactctttttttggtttccatttgcatggaatatcttttttcgtctctttattttgagttcagatgtctttataggtgaaatgtgtttctcgtaggcaacaggttgttcttgttttttaatccatttgccactctttttcttttgactagtttagtccattcacattcaatgctattattgataagtaaggacttacctctgccattttgttacttgttttctggttgttttgtggtcttctcttccttttttccttcctttctgtcttccttttagcaaaggtggttttctctggtggtatgttttaattttttgctttttatttttggtgtatacattgttttttgtttcgaggttatcataaggcttgcaaacactatcttattacctattatttcaaactgatgtcagcttatcactgattacataaataagcaaaaagaaaactaataaaatctctatacttcattactgtcattttttagcttttgaaataaacaagcaaaaagaaaactaataaaatctctatacttc

SEQ ID NO: 32912 - DNA, 1054 bp, Homo sapiens
ggagtgacgcgattttccaggtgccgtccgtcacccctttctttgactcggaaagggaactccccgaccctttgagcttcccaagtgagacaatgcctcgccctgctttggctcgcgcatggtgcgcgcacccactgacctgcacccactgtctggcactccctagtgagaggaacctggtacctcagatggaaatgcagaaatcactgtcttctgcgtcgctcacactgggagctgtagaccggagctgttcctattcggccatcttggctcctcccttatacatttcttcacacctagtagataaatccttgacatattttttcaattgtatatttactttaattttgcttctgctattttgagtgaactttttggaaatcaaaatatattattgcaagtctttaaatgataacagtgtcaaaatatattatcgcaagtgcttgaaagacaaaagtgtttaaatgatatctgtggtttgttttaggttcaggaagatttgactgaagagaaaaaaagggaactggagcataatgctgaagagacctatggtgaaaatgatgaaaatgtatgaccgggatacatatttctattgagcacttgagtgtttgtgggtgtgcatgtgtataggagagatatatgtatttgggatacgtaccagtgggtaatggtacctctgagttaccactgaatttaacaggcccacctgaaattaggaaaagttgtgacaacatgaaaagtaggagagacagcagcactgttgcttacatatcatttttcttccttttttttcctccaaaaatgagtaatttttcatcctgtttttagagagaattatttatcactaactctatactatctcttagtttttcttttttcttttaattttaagactgatgataaaaataatgatggagaagagcaagaagttcgagatgacaaccgccccaaaggccgagaggaacactacgaggaggaagaagaggaggaagaagacggggctgcagttgctgagaaatcacatcgaagagctgaaatgtagcggcacccaatt

SEQ ID NO: 32913 - DNA, 1034 bp, Homo sapiens
cctccaaacatttttgtaaattttacagtctctccttctggcctcttccttcttaagaattcagtatcttaattaaatttaacaataaaagaggaggaaaaagatgtaaagagctcagctgaataaaatgcatttggatagagtttcttaatattttagtttgcttttcattgtaaacttcgggcatcttgttgttaattagatataagtagcgtttattgtggtgctgcttacggtgtagttgattattgtggtgctgcatgtggtgtaattggtgaatgctgcttgttgtagccgttttatcacagcattccgctgcataaacaactgcaatatttaagagtctgatacaaattaggccaagaccctgtatttagtctcattatggaccagtaagtagttcccaaattaaaaccctggttcagagctgcttctcagccaggtgtcttgcaaatgtgtggttttatccctatggggaaccccatgggaggatggacatatggcagactgaacagacacaccccatcactggagatcctgtgcagaaatcatgagctgtgctctcacacacacagttccctcgactaggtctgctttcttgttcttactgattttgtaagcttttcagagctgatgataaaatttgtgcttataccaggaaaacagaaaaggatgttgctctttaaggtcactggcaacatttctaataacatgcactttaactggcttgatctttttgttctttggtttctcatcctaatcaagacccttggctgtcttgtcagaaagagagcagcagagaaaatagtgaccttgaatattaagacattgggcaagaaaaagatattcatccaggcttctcatataacaggatgtctagactaataccactttgttttattatgtccaatactaggaatctttgagggattaaaagagaaaagttcaccttggcttcttttttaaaaattcagaagattaaacataaaattttaaccagtgtttactgattccttttcaattttatattatga

SEQ ID NO: 32914 - DNA, 1033 bp, Homo sapiens
tccgcctcctgggttcacaccattctcctgcctcagcctcccgagtagctgggactacaggtacctgccatcacgcccagctaatgttttttttgtatttttagtagagacggggttttaccatgttagccaggatggtcttgatctcctgacctcatgatccctccacctcggcctcccaaagtgctgggattacaggcgtgagccaccgcgcccggccctgagtcacctcttgaatgctttgctgcttagaaatttcttccaccagatccctaaatcatctttctcaagttcaaagttccacagatctctaggtcagaagcaaaatgccgtcagtctctttgctaaaatataacagaagccacctttgctccagttgccaacaagtttctcatctccatttgagaccagctcagactggatttcagtgtccatatcattatcagcattttgcttaaagccattcagcaagtctctagggagttccaaactgtcccacatctttctgtcttcttctgagcctccaagctgttacagcctctgcttgttacccagttccaaagtcatttctacatttttgggtatcttttcagcagcaccccactctactggtaccaatttactgtgttagtttgttttcatgctgctgaaaaaaacatactccagactgggcaatttacaaaagaaagcagtttattggacttacagttccacatggcttgggaggccttacaatcatggcggaaggtgaaagttacgtctcacatggcagcagacaaaagaagagaatttgcgcagggaaactcccctttttaaaaccatcagatctcatgagacttattcactctcatgagaacagtacaggaaaaacctgccccatgattaaattatctcccactgggtccctcccaccacatgtgagaattcaagatgagatttgggtggggacacagccaaagcatatcacagggatacgataatgagataaagtaattcagaaattctcgccctcaatcgaggttctgttcttttg

SEQ ID NO: 32915 - DNA, 1050 bp, Homo sapiens
aaaatctagatgccatccaaatttgatccaggtgtgggtgaggccccttaggtatccatacaatctttaactataattcttcaagtatgcttcctctttatctgtagatctgtgaaaccagagtcaaattacctgccctcaacacagccaacatatggtggtaggacaggcataaaatacctagatattcctgtttaaaaaaaaggcagaaatgtgagaaaaataggagtcacctgtcaataggaatttgaagtctgttgaggcaagtgctcctgtagtaggtctcaaagcctgggaatagttctccagggctcttgactgtaccatttggtttcttggttccactctgagtcatctttcctttttcgtgaaaggtggcatatgtttgcagctgagtggttttctcagcctgcttcctaccggtagaattttaaggacccgtggcctttttaaatttagtactgcttctaccccttttggtccaaataggcagtggttctgctgatacaatcttctcaaaaagtttgtgggtctcctgtgaaacttctttgaattttctccattagccaaaagccacattcatatatctcttggagataagtcttctctactttgggcttgtgccaagatcggggagagacaatgcatgcccttaaatttcccaaaggctcattatgaggctctgaggaacccttaggaggttctgtcatctgatgaaatagtactctgagatatcacttttgatcattccaagattttaacaaaccgattttataagacaccctccgcttttgtctttagaccatgtttttctgatagtgtcctggaattgatcttatcttaaaagctgtttcttaatttcaacattatttgctgtctagagaagctaagaattttcgtaactatcaagtcctgcctcctttttgtttagcagtacttcccccaatgtatctctttcttctcatagtttaccataagacagtaagaagaaaccaggtgacatcttcagcactttgctggtaaatgtccttaactggataagtcagttca

SEQ ID NO: 32916 - DNA, 1035 bp, Homo sapiens
gaacttcagcctcttcgtgttttaatttgggttagcaatgtctaacttgcaaacttgtatggattagaaatagtgcatctgaagtgacgagtatgagtcctggagaatattactactaccatttattaggtgaccagaactactgttgttgaattaacattgggcttctttttattttgcccagcctttactacatctagtaggtaagagtgttattagtgctggcctaaaagtggctcctttcactatgtgccctacttggctgaaactttttgattaagatattctcactctgtcttttctacccttttgagccgttcttggggtggaaaaaacctgaaaatgctttacatgatagcaactaagagttgttgtttttcattttgacagccaatggttcttcttttatcattaaggacaaagtggttttgctacttttgccagtagatggtttatgggttttatagctttattttgaagtgaaagttatatatcatatagctttattataaaagaaaaatgataaactatattttctttttagccagtgttctttggagtgaattttagtagaattttgaaaacttatttgagaaaattaaattatttttaatccataacatttattgagtacctaccatgttcgggttcaatgctaagcttattacatgcattatgtcatttaactgtgacactagcactttaatctgaatgagcaatctgaggcttagagaggttaattaacttgccagtgtcaagatctagcctgatgaaactaagcttagaaacctaatgtaactttttccatagtgcatcattgccctcaaaattattttagtgtctctcatgacagtattaatggttttaagaaagtaggttaggtgggtcatatggggattcatgataaaatttagaatcagaaataacgggtgtactatttgatgcagcatttccagggtacaagaaatttgctgctggtatgaaagatgattttggttgatactagagttgattttatgtggcatgtagatgttg

SEQ ID NO: 32917 - DNA, 1032 bp, Homo sapiens
tgcagatacaatatgaagtttgtcagttgtatagatagattcaaatgaaagtgatttgattagataacaaatgaaaagaaaatttctgtgtttttcgttggttcattttaggtataaagaggaagaatataaaagtggactttctgctctagatcatataaggcacttcacagatagcctcaaaatgaggaaaatggaagataatcaatattctgaagctgagctgtcttcttttagtacttcccatgtgccagaggaacttaagcagccgttacacagaaagtccaaatcgcaggtacagattttcccatagtacagcatcatggttacattatgcatgaaacgtacatttcctttgattaccaaaaagcaaatattctatctttgaaatattttagaatccaaatggggtcagatgcctttctaaaaatgttcatatctttactgtatttatgaccaaatccaaaatagttaagcaagaaagcaattaatttagctgcattctgtatagaaattttatgacaagccccatcctacacttatctttccttgactttgcaattctcttacttttgtacagttagttcatcatgtttgtttacaaatatttatgtattacctcagagtcattttccgtgtctatacttttgtcaatgtaattatattttaagatttttctgaaaagtgaattctattttttgtccccttctatgtctagtaaattgttaggtgtagttaattagcaagtcatctcatgttgtaatttaatagtaaaatgaggatcagaaaggaagtgagttgccaaaggtctacaccaacttactggcagatttggaaataaaacctgtcaatttaaattcaacaaatgaatgagtgaatgaatggtactcaaatttattaggctctacaacattgtatcagcactatggtaactaaaaataaatctatttaagggtccataaatagcaattaaaagagcctcagtgtttttgttacaaaataaaggaagtcggtacttttttgtttgacatc

SEQ ID NO: 32918 - DNA, 1028 bp, Homo sapiens
acttttaatattatttttggttatttgcacattttatttccaaatgtttggctttgagtacatctgcaacagactctcttttacttacatttctatcctttcttcattcttttatattttctttcttttaaattggctgattatcatgctactacattccaaggaactgaggagacagtcttttcctaagttataatttacacattgatgtgaaaaatcacttaaatcttctgttcttcatcttctattttgctttcaacaagtgtttcatatggttagatttcttctgcaatcaagttttcatcctttaaaaactacatatattccttattaaatataccaaaacatgtataagcaaaatatatatctcctttaaccaagcaaaatgatatttttaagcgtatataacttttgtgtctcctggaagagcttctaacccactgaaggttttcccagtgactcttgtcagaatttgtcattaagagctagatctttttagttttccattaacgttcttaactgttctgactactgatggtctgagtcctatgctaataaaaatcaagtagtgaatttccaagtacattatcctttcattatccttttgttatttagtgattcatatttgagtaaatatcttttctttgttattaacattatacaaatgcaagagattggatttttacaggaaatggcctaatttttagtaattaaactaagtttaaggatattgttttatagcaagtagtagttaataaaaaggaagcatctgctttgctgtaagatttgctagtaggtagcatttagctttcttgtggaaattaaccttgattcaaacattccatttaggtaaacagaggaaattcaacagagttataacaatatttaatttttatttccaaagcttttactcaaggtacagttacatgataagcaaaaattactaagttagtacaaatgttaatttctcaaaggatagattgcaataaagataccaacacagaagtaattttttgtttttgtttcaa

SEQ ID NO: 32919 - DNA, 1049 bp, Homo sapiens
ttaaggttgactacattaccaatgagtcattttaatagagaacaagtcacactgcttggtttatgctgagctacaggtctaggactgatggggagtcctgggggaggggactcagcagataacatactatcaatgtgagcttatgactgcttagttgacagcttaaaaagagagaccggctgctggactgaaggaaatataatatgtccttttaacgagctgaatttgaaaaactttttgaggaaaaaagaagcaaggtattcatgaagggctttgtttatcacagttgccagtctacatctttattagcttgtaagaggtgccaagtgtagatatttgtcagtttactgtggagtaattctgtccttttaaaaacttttagtggcatgatattgagatggccctattgttacattcttgtttaattgttgactttgtgttgattttattattcgagtaggccccacctattgttttagaggtcaacgagctttttcattgcatttcatctgaactgtagcccctagtcaactgcactttcttcttaggcaaacattccgcagcagctgggttggaaactatcattccacacatcacagcaaatcttagacaacttgagtttaattattccctgttgactggctttgccattactaaaatctcttttaacacactagcattgagagtggaagtgtagggtttcttagctctcagcacaatagcttttgcattaatatctcatggcttatttcatagagcaaaggcctacttgtggtctttaaaatttgtttaaacataaattacaaagaaaggcatgggtgacacatagctatatatagagaaaagaaagcacatgagtagccttagatactttgtaaagagtgaatatttcttaaaaaataatttttttgcctttcaagtgaatgttaaagggatttttaaccacacttttgtttttcctagttttcagaaagcatttatgttttattactctgttaaataaatattgtgggcgtagtatattaaaaattgaacttttcattttactt

SEQ ID NO: 32920 - DNA, 1051 bp, Homo sapiens
tgtagagggaggacagaacaatgctagaatgaagccatggtctctaggcctgggcagagaagctcagtcccgggcagatagtgtaagctgtctggggaagaccttactctaaagcaatagttttaatctttagtataatgtttagagtcctctaagacctaattgcccaaatatctgacttgactttgctctacattttgcctagactccaaactaagatcgctttcattttctgttgctcggcattatgtctgcctaaattttttccttcagattgcccacatccactttactcattagaactctgctaaatgacaagtttcccatggttttcttaattcccttttgaattttttttagacaaacctagatcttgttaaaaaacctcccactgtgtcttctgttattaaaaaataattaaataaaaagtgagtttggatacatctatcatataatttgaaattacacatgaatgtagagacgaaaagtgactttgaaagatcaattctcaaattttgatttaagaactgtgctattagctgaaagaatatgaaccaagtccattcttttgacctttgtaaagtcgaacctagtcaattattgcagcagagcagggaaccaaagaatagctttgaattggttagacccaaactgatttaagtttgcatgtggttaaatacgacattagttaaaaataattaatgctgtctttgacctttgaaatgaggaaggacattcattgtcctcccccagctcccactccattcatgtaaatctacttaactctttgcattgcctaaaacagaacacaacgttttactatatcttgatattaaatatctttaaaaacataagcagagttgtatgcttcttaaatggatggctttccaccaattttcactcagatatttagatatacagatatactcagatatttaaagtatacagtttccatggctcacagctaacctttgaaaacatgtaaatatacagtgtatgtttcatgaaatgacagagtaacgctaggatgaaactatggtctcaacttatc

SEQ ID NO: 32921 - DNA, 1025 bp, Homo sapiens
gcaacacctgcagctactcacattgctggtggctgaaataatccaggtccacacggagagggcattacaatttcattgtgctgtttgtgcttactgtttaagcctttctcacaggagaaagcattagctaagtgtacagtagataataaaaagggggatttgggctcatctgttccccttaaatctgtctaataaaatctctcctcataattagtatctgactccttttctaccactggctggcatctagaggcaggtagaggcacaaaatggcatttgttttttagttgtcccatttcatgactttatggatcatcccctctttgagccttcatgacctaagttctgagacttaggaaactgtatacttcctaagattctcttctgcagaagttataatagatttcagatggaagatgtttgggatctcaacaggacaaagaggacacatcattttaaggcaataataacaagccattcttcatccttaattgacaacttaatttagattttagacgagtcccttttagtgatgtcctattttaatttcaaccccaaatgctgataatcatgaattcaaaaacacagtctataaaaagttccatcaaatgaattttggtttaggcatgaagatttagggtgggggttggggaatgaggctgaaacccagctagaggtcatttcttcctcatctatgctggaacagctcagagttcaggggattcatactcttttgactttaattgctctggggccactgaggcaaagcaatggtgctgtatttgtctgggggtcaaagaagcaatcacaaaggtcttcagaatattttcaaacatttgggggagatagatggtattcagacattctataatcataaaaccagtttctagatagttgtcgaatttcctaaactacacttgctgaagtttatttggttattgaaacatttagcttaaccagtcatgttctttctactttatgaaaatgtagacaggaaattatcagcaaattgctcgtttagaatt

SEQ ID NO: 32922 - DNA, 1048 bp, Homo sapiens
gggtatgctgccaccaggtggtggcaaatccttcgagtcacgtgttattgtaatttaactttttttaacccttttaaataaaagcaataggaaatctttctttaaacaatatcttactcagaaacccaatatataaaatagataaaagtcaacctagatcctatggtgaaagtgggacaggaggttcaaagccaaaggtctgtgctcatatctttcctctgatgatctctgaggaacctcaggaagacagtttgaaaatccccatctcaattataatgcacatattttacgtaacattaagatagaaaacatttttttttaaataaagaaaactaagcaatagaaaagataatcttctagagcaggaagaaagaccgagaaagcatttatcagagcaaatggaggaaaaagagggtgcttgtggatccggatcaaatgtgatgtggtgagtgaagcaggcatgggcaagagcatgaatataagcccaaactgctgagaactctgtccaagcagaccaagctctgtttgggcacagtcaggacgtactggagattttggaagaaggactgaggcaggagggtatgattgtcctgagagtcaatgattgactgaacttcttcagatttttagattcatcattgtccaataagctccttagagctggggctgggatcccagagtataaggtcatcaacttaaaggctgataagccttgagctgtatttggttgtttgtttgtttttctagtggcttctctcccatgtgatgagagaggacagaacagactgcatagctgcctgtttacccagctccatacaatggggacatttgagcagagaccaggctactgcttctgcccctcttgagtcttgtcttggctaacatttttactttgtttgtgaccttacgccagtgccctcccaaatgatcaatacattagttaaaagcaatgtttttctctgtgtttggctaactttcccctgaaaacacctgcctgtagaaattgcaaactctcccagaaactattttctaaaatgattattttctc

SEQ ID NO: 32923 - DNA, 1067 bp, Homo sapiens
ctataattccattacttctttgtgaatcaagtcatgttatgctccttgtaactggctctgggaaaagctggtaaacaatctttaggggaactaggcgtggatttcagttgaaaactctgcccatgtagctaattcctatttgctcagaatgccctgagtttactgatggtctacaaagaacttgtgtggatgtaatcttgctggcaaatccacaatacaacataatcatggcttcttacagagcaagtttattgcagctgttgagggaccataactaaaccttccttctgcgtccaccagcctgccgccaagaatatttctttggcgttcttgctcttctcactcccactcactctgttctcacagatctgggagtgttataggatgccacttgtctgtcctgctgattttctcatgtcctgcctgaaaacttaacctaagatcattgttgtgagtaagagggcaatgacttaggagtcccatagctggagggggaaagcaagggccactacagactgctggggaggcatctatgtgggtctggtcaaaaaagtgacttgagaatggtgaggctcaggtttcatttcccttttcactcatcaggtgtttaagttactggaacctattcttgagtgctaaaggtgttctatctgaacagactatggttgaatcaggccagagcaaggtcagttggttcaaccaatatgttactgttgtatgagagctgaaaggcctgaaaaaggaaaacaaacaagcaaacaaaccatcaaacaaaacctcactttcttcctccacttgtccatgaatatacttgtgattgtaatacttgttttttattctctttgtgcagtcatttctaaagttctgtgaaaaggtgtctttgctttgttttgttttggtggaggtagagagcagcacgggcaatgtccctggtacaatttacccagaaactgagtatttatgttgactttaaggagaagaagaagaaatgaagttttccccagatatttgaggataggtaggtaacattgatgttcaaacataaaaagaatttgagagaatgctac

SEQ ID NO: 32924 - DNA, 1022 bp, Homo sapiens
cagcacgagaaacagaactaaaagttcatgtcttagtttagggccacttattgagcgaagccttgacaaatcataatataacccaacaaggtgttggagtggctataaaagctaatagaaccccaggctccagtatagaagtacagtgacctgatttaatggggtaatggttagctctgttgtactctcctctggttggaacccgtttgggttatcgtctttgtttggggacactatgttttgagagagagattcatgaactagaaagcttccaaagaaagggcacaaagatagcaagaagtgagatcatgtcaataaatggaaggacctaaggatattttagaagagaacacttagaaggtacatgaggactagcttcaaatatctgaagggctgtcatgtgctaccatgattagacttgttcattgtttttacatcagcaggtgtgaaattaagactatgagtctaaaactttaagagggtatagaacatttgaacaattataactgttttgagtcaactgggttaactaaaatgttgtgagatagtataaccataggtatttgataaacgccgcaagatcattttataaatgttttctatttgaatgatttataagagaggctatcatctaagattctaaggtttcttcttagtatgtaaattatgattatttactataaaatatcattcattttcttactgtgagagcagaaattcaatctttagtggcttgcattctctttattaacagagtcaaatctgtaattatgacagtgggctaggctgctcttaaacaaaggttatgacttcatggcaataggctgagggccaagagataataatcttaggctgacataaatctgaaacaatccatgaaattgttgaaaaacattatcagagtgcactcagttaggctcacctctgaagcacagcacaaacaatgagtcccttaagttttgcaaggtttctatgagggactcgtggctgtctcagacatgtgagggagtggaggggaaagg

SEQ ID NO: 32925 - DNA, 1048 bp, Homo sapiens
acagcctcagaaactggaaaaaaaatcacttcggtggctccctgtgttcttcagaaagaaatccagtttcattagtttgatatttaattaggacagcaaccatgagtagtgtctttcctctttcctttccaaaaatgtctcttccactgtcttttctagtgccatgtctcatgttttggtaaaactaattgaaccttgtatctgtactgctgttcatgtttgacctcctcccttaagtgttaagcaagtcctccctgaccacgcttgtcccaccctccctccacaaaaccacataggtccacattccatctccctgaagagtcactgcccaactcttcaaggctttgtttagctaccttcttttctgagatacattttctgatcagattgaaccagttaaaccagatttaaactcttttttttttttgagacggagtctcgctctgtcacccaggctggagtgcagtgttgcaatctcagctcactgcaacctccaccttcccgggctcaagtgattctcctgcctcagcctcccaagtagctgtgagtaaaggcgcgtgccaccatgcccagctaattttgggatttatagtagagactgggtttcactgtgttagccaggatggtctcaatctccggacctcgtgatccacctgccttggcctcccaaagtgctgggattacaggagtgagccacctcacccggcccactctttgtattctaacagcacttttcctatccatttagcatttcacaatttacttttaatgtagtagtttatattttttgtccaataagttttacttcttgagcatagactgtacatccttccagtgtcttagatatgaatgttcatggaattatattagagtggtggccttcctatcctggcatggctgtacttaccaacaggaagcacaccagctttgaagcacagacccattgccaaatcccctcatggagaccctgggttattttctggtaagttattagcccctctgagcctcagatttctcatccagttactggcagttcatttataaaata

SEQ ID NO: 32926 - DNA, 1050 bp, Homo sapiens
ggatttggctaataaaggaggacctaagagttgatgcaagaagactccttcttcctgggggcacagtgcgcagcagataatgattacagttagcctctgctctgaaatctcttttattcttgccatgcctacacttagggttttcctttcatagaagatgtgtgtgtatgtactttctatggctattggccagtcagttcatgtcacagacccatgggagatggatgctttgtgcctcctaccaactggctgagagtgttgttttcctctgacactgcagctgacctcacaggcttcccaggtgtgcatggcatggcaatgaaacctcactggttggcagccacaggtgtgcatgatttgttttttcttttttcgttgtttagattcttgtggtaagaattcagcaggtgtgtgatgccagcatagaatctccaccctggcacagaggccagctgccctcaaaaaaaggtatttcttgttggtctcgcaacactactggcctgaatccctgttttcctggaagcctcacctaagggaaagactctgactaatgaattaggataaactaatcacagatgaacatgaagcattttttcagatgagtatgagtctccttatgtgaatgtactgtacgggtaggagcaggttacctggctttgaactcaagttttttttttcctagtttgaggtagtattattgcaattatagggatgtaggaaatcctggacctggtttccaaagggatataagccatcctagagtgctgttgttgacatataaatttctgctcacgtgattgagactaaacagtaggagcacagatggagagtgatcctgtgtggagttcttccatcttcctggaatctccccaggaagtcaccaaccctgggacccaaccagttcagtatagggcaagataaatctgaaggtcattccagacctcatctagccttaatgaagggtggggagagattagctacagtaacactgtttgagagaaccagagagcaagagaaggaacgcaattgctgtcagtctaagtcagcagt

SEQ ID NO: 32927 - DNA, 1058 bp, Homo sapiens
ctgggcaacatagtgagaccccatttttacaaaaaataaattaaaaattaggctggcatggtgacacatatgtgtagtcccagctacttgggagactgaggcaggaagattgcttgaacccaggaggtcaaggatgcagtgagccgtattcatcctaatgcattccagcctgggcaacaaagcaagaccctgtctcaaaaaaaaaaaaaaaaaaaaaaggctgcaatcaagtttatagacatttaccctccagaagcaccatggactgtctctggttttggcctgggctcaagagggaccttctttcttatggaaaggtcagctgtcccctttcctacattcacatatgctctgtccataccatgaggcttgcttgccttattctttcttctatgaaagatgtcaatgaagtccagcatgtctattactcttactgctgtttgggcaacctctagtacttccaaagtgaagttggtgaagtggaaaagtctgatgtccaaatttaagaaaatttcctcaagtatgaggagtcttctgttttgctctgtctgccttggtgatcaaccagaatttgaatgtgaatcaatcgtttttcaaaggaatgttgggtgatttgtcttccggttaggaaacctcatataaattgtttatcccaaaacaaaccctcatgagtttctttcttattattaacccccatacttgcatgattattgcttccctctttggccactaagtcaatagtaaaactcacaataaaatattcaggaaagagcctcttttaatagttttgacagttgtctaggatttggcaattatagggacagagattctttatgatgcttaatattctagaatacttaattgagaccactgcatcagaatattctattctctatgctttttccttgaggataaattaagaagcagtgagaagtaataggaaataaccaattcaaatctatcttagaaggataggagttggttcagcttctttgctccctagttgtttcatcaaatgaaggtagcaacatgaagagaatttgttccaataatgataa

SEQ ID NO: 32928 - DNA, 1038 bp, Homo sapiens
aacttttgaataataatttatgtgacagactcaatctagtagtgactttgaatttttttaaattacattttcaaggatagtgttacaccaaaataaagatcatgaactttagtgtaagataaaaataattctaaaggtaggtatcttcatctgtcttaaaactttctccattaggaataataaaaacaaaataaaagacacaaagcaaacctcacattttcttctggaaaacactgtacttttgattcttagcagaaatggccttgtgaatacttacggcatttgtaaatataactaagaaagggctttttttttttttttttttcctgaaagaaagttgctacattaccatcataagtttctaaaaactcttcagggagaggaaaagaaaaaaatcctccaaaccttaataaaagttcccagcaaaaccattagggatttcaattatgaagctgttctcaagactcttgtaaaggttatttgttgaacaatttctctgtaacagtgtatgacaaattactcgcttggcactgtaaatgatgcacaagccctttaattagaatatagcactcgatatctttaagaccttctaacatttcttagttaatattattcctcatgagcctttccaaagaaatgaggacttgtttgtagaatcgaaatgggtgatggaggagggtggacagggaccttgcacagggctgggaatatccagaagccacacaaagaaaggaaggctctgaccccaacaagttttgattgcaaaggcgactctgataacagagttttttttttattatccattgcttttagccttatttaccatcaggctctcttgccacaagcatgctttttagttctgacagccctgaattatggccattgtgggatcctatctcattaactgaaatgggagaataaaacatcaaacaatcataaaaatagtttggcactgtgaaaccacttaggagcagctgtcaaacaggttggaagataaacttctaaataaaaagaatagagacagctgcagtgtcctgc

SEQ ID NO: 32929 - DNA, 1026 bp, Homo sapiens
tgtctagaatttaaagcaggaatttttttttttttcctgaggtaaacttagaaagaaaagcagaagcaaaaataaaggtaaagagatttaaaaaaaagagacattgaggctgggtgtggtggctcatgcctgtaaccccagcactttgggaagccgaggccagtgtattgcttgagcccaggagttagagaccagcatgggcaacatggctaaaccctatctctacaaaaatacaaaaaatcagacgggcatgctggcacgtgcctatagtcccagctaccctggaggctgaggtgggagggttgtttgagcctggggtggggatgggggtattggggaagttgtgtggagaagggttggaggaggctgcagtgaggcaaggtcacaccactgaactccagcctgggtgacagagccagaccctgtctcaaaacaaacaaacaaaacaacaaacaagcccccctaaaacaaaaggacattaggcatttaaaagtgtgccttattgtaataaaaaaatagctcagaccctcctctagctatttgaatctatctctaaatctttaaaatagacatttttttttaacctgtagtaattcccctgtgatttttagttttgtttggtttctagatgatagatacaccagattcctcataacttatactctggcaataggaccattaggattctgaaagtatttcttcccgttttgacttactaggctttcacatcaagcactgtgacatgcctcagaatttctctctctgtggccaggaatagaacagtctaatacatatcactttcttccctcttgcctgtcccctccccctcatacacctgtaccccatgattcctgctttcatggcagaactgtgactgtgaagttgtgttattcttccagcagtgagcttcaacagaaaggacagggctcctaaaggaataaatttgtatctggttgccaggacctccaatgatctgagtgtggttttgctgtcatcaagaagctcgttttttctctcttccattag

SEQ ID NO: 32930 - DNA, 1029 bp, Homo sapiens
aaaaaaaaaacttcgactttttagtcactatttttaatgtgctaaggaaacattaccatttcatccatgtgtccattaaaagaaagggcagcccgtattcctggccttagaaattctcagtttggcttgtcactgtgatcaaattcagtcccagggtgcataagaggaaggtcatgaaacatcctgtgcccagtttttccagaagcaaaatgggaataacttaaaaaaacacttcaaccgtcttgataaagttgggccaggggacaaagtttgctgcttgtcagggttagaactaaaatggttatattaggataatcatgaaagatacttatttcaatattaaatgactttcagaatgaagtgcaaccattggcaacaaataagagcacaaattgtcttttttcccctatagaattatatgctatgttatcattaaaaggaatttcaagtgatttgtatgtgcatttgttaccaataaatacatggactctgttctgattgtttacgtgctgtgttagtaattcagactgttggcctgaggagaatacagtaggagttgttcaggctttaagaatcacaaaaactgaaattggaactcagcttggcccctactagcaatgagatctagggtaatacatgtaactttatcgaacctcagtattctattctgtaatatgggataatagtatctacctacagattttatgaggtaggcagacagatatcaatatagattgattagataccatcataatgggtggttaagtactagacactaagctaatatatatcagttatctcttctcacctgcagaatcattctgggggcaaatattaatccacattgatgacataggtttcagagagcataaaaaactcagagtttttgtatcttccaaatgatttctcttctttggtggaggattagcagttattacacaaaacatgggctgccaacctcaaaccctgcttttaacaccaaggtttcacataatagagtttttagcattagggaaaaagcagttactt

SEQ ID NO: 32931 - DNA, 1070 bp, Homo sapiens
gggcttcattctttcctccaccaacccaaactttctcctttcttagggtctttgttacctctgcttgagatactgttcctagacgcctccctttccttcttgttgctgctcatctctgtctcttgcacacacacacacacacacacactcacatccctatctatgtgaattcctacttgctttatatctcaccttaagtgtcacttcctgcctgagaccctagcgtatgttagatttgctggtcaaaagcttttccagcattcctcctgctacttatcacatttatgactaattagttatcttggtagatgttggctaatgtctgtctttctggctacagtattagtaaagacagggattatgtttgtctgaatcactactgtggccctcccattcagttctatgcctggtacataataggtgatcaacaaatattttggtgaataaataatgctagatgcagaaacaaattagtgactacatcattgtagcattacaagattgtggagtcctactgtgttccacatcaataactgctggctctgtatggttaatctgtgctctctgaattgtaaaatgacccagtatggttaaaaatgggcctaaaatgacgtaaatggtttttatcacagaggaacacccccagatatttgttcacaaaggaagctggtttagcctaggaattggcatcccttctcctgtatagtttttttaagccataatactcaagtctatcaaatatcctagcacaatacacacaaccttagggaagtggcaggcaccagtcgctattcccgtgggtggttaagcctttggtatctgggaacaactgaagggtagtaattggtgatacttattgtctgaacataactcaatcttggcttagcttgggaagtattcgtaccctcacttgtgggggtgcttggccaaaggcagaggtgtccctataggtcactctgaggcatttttatctgcacaatagctattaacaagtaatgggaaaagtggagataggctggttactctaggtggctgtaaaacaagtgtagataggacacaaaggagcagca

SEQ ID NO: 32932 - DNA, 1049 bp, Homo sapiens
atggcatatgttggcctaagaaacaaaacaaaacaaaactcttcttttgtactttattcgataaatagctaaagcctacatatggaatttttgtactgattcactcaacaaacacattgactttatatgagttgaactttatttagacataatgagaagccattggaatgtctgaaatgtgaggagacataatcagaattatgctttaggatgtttgttttggcaaaggtatgcaggatgaattacaagagagaaaaactggccgggagctgtgtctcatgcctgtaatcccagcattttgggatgccgaggcgggtggatcacctgaggtcaggagtttgagaccagcctggccaacatggtaaaactccatctctactaaaaataccagtaaaagaaaaaaaattagccgggcctggtggcaggcacctgtaattccagctacttgggaggctgaggcgggagaatcacttgaacccaggaggcagaggttgcagtgagctgagatcacactactgcactccagcctgggcaacagagtaagactccatctcaaaagaaaaaaaaaagaaaaagaaaaagagaaaaattgaagaattagagagctagttagtgggctattgcaaaagaagcattgggagtaaatgataaggacctgaagtaggttgtggcaatagggatagaaagaacaatataataaggtaagaataagcaggacttggttgctgatagtaagtgggaagcaaggagtcaagagaagtcaaatatgaactgtggcatggggagaataatattgccattaaagaaattactaaatcagactgctaggattaaggaactaaagagtctgctcattttaatgtgttatgaatttataaactctttttcagaaggaatggtagcaataaagagggaagaaatagggtaatagtttgaatggatagaaggctaaaatctttcttaaagtttatgcatgcttggctgtgtttactgaatataatctattttatgggggtcccaaagaaaatttttctgtagccatcacagct

SEQ ID NO: 32933 - DNA, 1049 bp, Homo sapiens
caccacgagagagcaattaacagctagtaattactgtgctcttcagaacggcaacattttgcctttcattccaattatataatggacaagtgggtttttgatcttcaaattagtgagctcttgtcctccttgtttggaggcagaattggcaggttaatgatggcctgtgggggcactctttcctctgactgatgtgaggcaagaacgccttaaaggaggcagtgagagcctttcaagacccgcagttccacctttatgataaagacagagaaagagtctttattttcagagggttttgatgaggaggaaagataggcttacatgtggcctccaaacagtgccatgtgcttttccttcttcttatcctccagcaaaaggtgaccaagttttaaaacatggaaaactgaaagtttcagatgtgcaagatggctaagttctggagatccagtggacagactgatgactatagttagcaatattgtattgcatacttgaaattttcttaagaatgtagatcttaaatgttctcaccatgtgtgtgcacgtatgcatacacacaaacacacactcacacaagattactatgttaggtgattatatatgtcaactagcttgattgtggtaatcatttcacaatatatatgtatatcaagttatgtacctcaaatatatacagtttctatttgcaaatgtacaccaataaagctgaaataaacccaaggaaaactggaattagattatgtgatgttttggtatgcctttggtaagggcataaaataccacatgttggcaaaaaaaaaaaaattcctgctctaagattaagaaaggattttgactttatttaaatttattgtaactactttgagaattacagggtatgatatactttggataaaatggaatcttatcttaattgatagtagtatatgaggagtaggccttgcacttattaccagatctagtataaatactgagattataaatagaggaagttggacatttttgttttagacatgtttgttttctgtctccaatctctgctattcatg

SEQ ID NO: 32934 - DNA, 1092 bp, Homo sapiens
gcttattattgtatcccgatgtcctctcttgtatatatgtttgatcattgggttacatttatatcatctgaaatggaagtgattctgatttacaactcaaaatttgcctaagccaaatggtgaacatttcattatttccgttttatgggtcatgtctgaaggggtttggctcagaaaatagaccactgctcgaaaggaggaagtctgttcccatgaggcagtaggtatggagtcagcaaatcatggcacgttcacccccagagtgtcagggaaaccatttgttgcagccgccaaagtcaacccatcccactggcatgcacacgcctaagtatgcacatcaaacttctatagacagacagatgacacagttagcaaagtcctaccaaagaagagagagagcccgtatcacagtggtggagtgaagctgtgacccaggctcctgtgttttttccttgctttctctctctcacatatctttttccagtgccaatagcaatacagattgcaaataaagagagaggagcaagcagaatgtgagtgtgtgtgtctgtgtgtgtgtcttctctaaccataggccctcagagctttattcaatctctggcacaatgcagcctctgtagaaaagatattaggaacaaaaaacaaacatgaagatttgggagcaggctgccagaattattaagaaaaacattcagatgatgccattaaaaacatatggggattctataaagccctgaaaagaaaatgtttaattatgcaccgtatgtaaaagccatcacgtttagattaatactaaagactgaaactgcgtggggcttaagtagtccatagtgatgcatcaatctctttactcctttaaaaataatgtttttcttttgctgatgacaaatacctttcaaactgttgagatcatgctgctatagtgatacatggagtttaatgaagtccaaagtcactaacgaaagtttccgaattaacttttcaaggttgttgagttagatttctttcttttctttttctcctataccattcctgctcacttccctctgctaacaggaattcctcctccccctccttctccaacatacaaag

SEQ ID NO: 32935 - DNA, 1051 bp, Homo sapiens
ccaccatcacgacctggagcccgcagggaagagactgttgtaaaaatgataaatcagaattactacacaccaggtcttgataaaacaaagaaagttgattccggggtctgatatatatctataatcacagagaaacaaagcttgatcagtgaagggccaaatgtgaggaaacgtgaagttcaaaatctgatggctgcttaatattccaaccaagcagaacattggataatacagtggaaattgatgactcagtggcatcggctgcagcaaaatagagatatattacaaatttcttcacaagaatagggtgatatatatgccagtgcctgttcatcacatttttatgtattcttcatatctagaaacaaaagaggatatactgtctataccaccttcataaaatagggttaacgtattttctggggttttgttgttgttattccctttaagaagcaaaatccatgattctctttcagaaaaatgtctatgtgtaaaaatgaggtattgctggtgcatctcttaaatgactgtcctaattgcactcctgaaggactctcagattcagtatatttgtgtgtgcatgtggggtagggccgggtggggaagcaactgaggagccagcgatgtaaaaatcacactgagggcaacttggtgttcgattaagcagcttcaattagattcatgctggatttcacagaagcagtggtctaggtgctcccagggattttcagaggctatttataaggcagcatgttcccagaagtggagttgggaggtccttcagtcggaaattctgaacgtcttaattataaggggtcttagacaaagtgctcatctagcatggaatcctctgaccctgataagtccatgaaggagtcaggattatgggtctttgctcttctattttcctagctggtattgcttgttagcaattgacacccagtagcttagcatcaccattctaggttagagatttctagccagtgatttctatttcaatgtctgcatgacacctttgtctggcttgagagtggtggttctcaaagcgtga

SEQ ID NO: 32936 - DNA, 1053 bp, Homo sapiens
tatggcttgcgtgtggtttatttggtttggagttgcttcaactttccaaagacatagtagatttgtaaaaacagatcattaatgataaccccagaatacttatgtctgaaatattgggtggatgcagcagttaggatatttttttttcctgctagttgtctgttctttaaaggcatggctgtttagttgccaccggattgaatgcttctgaagattagcctctcattgtttgaatgttttcataacattgttgccataaagcatcttcatacttcacagttgagatcttgacttccagaataaaaaagaagtcaggggctaatcataacaattagctaatgtgtcaacaattagcactttccatcaacctgctctaaaaggagactcttcttatccacttgcagacaaaaatgcaatgatgtagttaagaaaagcactgaaattggctcctagagtcccctgttgtagccaactaaatccccagggcattgtttacagtgattattctgccattatgatgttattgcataggcggaggggggagtcgtattgctcaaaataagtctgttcttttttttttttctagaagacaaaacaaaacattaaaagaaaacaatccctttttggctgcttttggaaaagtagaacaaaaactgctgtgaaaggtcagccagttatagtactttagtgtttaactggtaaatattttaaaaaagagtatatttaatattttaccacttggaaaactttcaatgcgttttaggtccagcacagctcaatcaatgtaagatttcagaggtctctggtggggatttctttacaatggatacattatattctgtggccatctatagcactgcttagtagaaatacgttttaacatcttttatataatccttctagtaatacaagaacatttatactacaccttttataaagaactgcacagtactttacacagacccatatatctatgtaaataccgtgggtttgtcttttaaaaagccttaaaacaacttgtaaatccccagtagcatctcagaattctgaggg

SEQ ID NO: 32937 - DNA, 1025 bp, Homo sapiens
tcacttcaccactttaaatattactttcttcatatgttaggtgaggggagttgatttaggtgagttttaacttttctctttttctaccaataatatgtgcttttaaaagccccttccatcccaacacatacttgaatatttatagaaaattgtatattttacagtcatgttgtaaagaaagccattaatatatttttagaaaatatgttaacatatacagggattttattcctgtgttattcttacttaaggtaaattaagagatagacaggaattgccacgactgcagaagagcatatatagagtaagatacagttaggctcttatatatacaattttaaaagaattagaaataaaggatcatagaatctatattttggtaggaaaacaagttgaattaaactaaaaagccaattattggctcagttcaataatacattaaagaataatagcttcatttagttcccttacagtaatctctcttcaacctagcgcttcctttacatgaagctttacttttgaatataactttcactatgggaagaattttggttttcatatataaatctcaaatcattcctgttgagggccattagaaaaagaaaaaaaaagagattgggaagagaagcgagaagtcacatgctttgtagagcaggggaggaggtttggcaggaaaccaaaagggatggtcagagcaagtggcagcagagattcatgtcagggaagaggaagggatgtgcctcaggctgtgtctctggcacagacttgggaatcagtattgactctcaggcagagtggcactcatgtcagatgcaggactggaccaggacagagatgtcttcttattgtgatctttgaaagaaagctaagtgaatttgaaatatccggttgaaactgtagagaagaaagagcctaaggaggttctaacaagagagaaaaaagttattattcatttaattattacaaacttagggtagaaagagttcactgatgttgttatcttggttttgtgtactgtctttatt

SEQ ID NO: 32938 - DNA, 1022 bp, Homo sapiens
ttatcttcctttaccctaattccttccctcctcatccttcaaatccccttcctcatcattcaaagtctaactcaagctagcctttcctccttattttccccttatctttccaatccgtatggagatttctcacctttcctgatagaggttgcgccagaatggtgaggattaaattgtaattgctttctaatagactgctgtgtctgcccactagatttcaagctctctaaaggtcaaagctatttcttacattagttttgaatccgcttctggacagcgccacatcccagaggacttcctcactcataagcctatgagggtcaaggcaacaatgtaggagctagtgattctcacaggaacacttatttcagaaaagctatgctgaaaatctgggttttaatttgaactactaggccttacttggccttaaaaaatgacatgtaatcttttctgtgctgtcccttctccaagaaggtgggcctcaggcagatgaagaatcgaggacacagggaaaatcctgggcaagctgtggcactgggggagtgtggtttatcccccagaacaatctaaggcagtccacacctgctgcttcatgactagggtttcaaagctttgagaactggcataggcaaagcttgtcttttggtatcaggataagtttcagtggatttaaaatgtgttgtaatcagatttaagtccagaaagcttttttttttttttctttacttacagtgaaactctctctttaatgctgtttggtcaaataaacatcaacaaccacgttcaagtttcttggtcactcctgaatcctttcttttaagtgggagtgggaagttatacagagacaagtgtcggccgggcacggtgactcacacctgtaatcccagcactttgggaggccaaggtgggtggattacctgaggtcaggagtttgagaccagcctggccaacatggtgtaaccctgtctactaaaaatacaataattagctgggtgtggtggcatgcgcctgtagtcccagct

SEQ ID NO: 32939 - DNA, 1056 bp, Homo sapiens
ggacctagctgtgaaattgttgggtaacatagtaactctatatttaactttttgaaaaagtgccaaagtgtcttgaaaagtgagctgcatcattcccaaatatttaaggtacaatatttgaatattaatttgaccttgcttgattggaaatgaaagagaagtcatttgattccaatattcctagaaaagactctcagttgttcacaaacacttcagagtatttgtctcagcccctgtgatgggcactgcgtaaaccaagacaaatgaaacatagtttctgattctgaggagtggatgagaatttttggcatttcaagttgactttttttttttttaaagtgtagatatttgttttcttcttttattacttgtcttctcttttggatatcaccactggacatttaggaaagactcttaatggggtactagatgtgttaagacctggagggctggatggatggtgcacatagaagtagacagcagataggaagccaggatatacaggatcaagagactctcaagtcagtggattatttaggtgtaatcaattgtcaactcgtttcatgactgacagtggctttcctctccaccacagacatcacttaaaaaggaaagggcagcactttgggaggccgaggcgggcggatcacgaggtcaggagatcgagaccatcccggctaaaacggtgaaaccccgtctctactaaaaatacaaaaaattagccgggcgtagtggcgggcgcctgtagtcccagctacttgggaggctgaggcaggagaatggcgtgaacccgggaggcggagcttgcagtgagccgagatcccgccactgcactccagcctgggcgacagagcgagactccgtctcaaaaaaaaaaaaaaaaaaaaaggaaagggaacctgtctctcatttataaagaccacatttgttttccatgacagaaatctgatggaaactttcattttcacagaattaccaccttgctttggtttggggtctaggtaatcataaaattttgtgagctgtggcaaatcgtatatataattgtatccacag

SEQ ID NO: 32940 - DNA, 1017 bp, Homo sapiens
tttgggcctgcagtgactcacccagcactctttctacaacactaacccttttcctatttgcattaaaggtggattgaatggtggttaagagtgtcagctttggaccaggctgtgtcggcttggatcctggctccaccactaactagctgtgtgactgtggtaagctctctgtgcctcagtttcctcctatattaaatagagagaagaatagtactcaccttatagagttgttcttttaactcttttaggagttaatacatgcaaagaatttagaacagtgaccaatgtatagtaagtattcaataaatgttagttgctattattattattactcttgctattttaaagtgattaattatataataaatggccaaagggcttttgtaggtataagaattttgatgatgttatcaaaatatctattgacaaagaaaaaaagaatgcatagactattaatagttttcatcacacctgaagaactaaacataaatcctgactacgatttcttcaccaagaggtttctcaaatttctttttattgtgatataattgacataccataaaatacctttttaaagtatacaatttcatggtttttagtatattcacaaagttgtataagcattaccactgtctgattccagaacattttcatctcctaaaaagaagcctttacctgttagcagttacttctcattatccctccctaatctactttctgtcccagtggatttgcctattctggacatttcagataaatgcaatcacacagtatgtagcattttgggtctcttttacttgaaagcctaatgctttcaagattcatccatattgcagcatgtgtcagaactctattcctttttatggctgaataattttccattgcatggatataccacattttgtttattcattattcattgagtgacatttgtattgtttccattttctagctattataaataatagtgctgtgaatatttgtgaacaagttttatgtgggcatatgttttcagtt

SEQ ID NO: 32941 - DNA, 1068 bp, Homo sapiens
gcatctgttagaaatataaatgacataaaatcatcatacctcttctggtaaacttatttagaagttaaagatctggccacctgcattagcagctcaggagaagtttagattggcatttagattagctggctctgttattcagtgacttgcatacttgttcaagggcactggagtcaaccaatgtttatttttggattccccattgctctcgggatcactgcagcgaagactggtgcccccaaccccctattacctccttcaccttgtttgttgttcctggtccagggaggactgcagcccagattcagcctgactagctgctccttggtgccctgttatttttagtatatgaaccacagcagcagctggcaaccctgagttggcccatacaggcttagtttttgtgaggttgaaactatgggtttaagaatattgggaatctctggtttttatgtccttgcattatctcatgataagtaatatattatttttaactttcatctgtgatgtgccaatctttaacagtgaaaacttacactaaaagacctctgcctggttttggataactttgcctgtattttacgctgaaagtaaagagaataggaagagaggactttaaaaaatgaaatcatagtcctgtgaggaaatcttttttaaaaattgaaaactctttaacttgaataacagaaagcttttggggaagactaggagctctgaaggcataattgaagtgatgttgtttaatgtaggcgaactgctgtaataagcaaatctcagcacgtgttcattttttccctcatatagtggtctgatgtaggcctctgtcaatggtacagttgtaagttctgccccactattttcagggacccaggctttgtcacttttaccatgaggcttctaacatcatcacgggggtcaatatcctgccagcagatggggaaacagcatggaaggccatgaggtttctatggagctggccaggaagtggcacacatttcttctattcagatgccactggctgtagccttatgactgctttccacctaaatgcaagggaggctgggaaat

SEQ ID NO: 32942 - DNA, 1030 bp, Homo sapiens
aaatatcatctgcctccagtattccacgagttgtttttgttgaaaagcttcaggttgcctggccctttaaggcaaatctctggtgttcaaattggtgaagtaaaaagatattttatgctccagtgtctgctttgtgtgaatacttaattttaagagggtagagtgaagtgtttctatttaaatttagggggaactatgagggtggggtggtgactacattccatgaagttcccttttttttccttttaataggaggccctggactcagctcaatggttagcttcagtttttagtggccttaaaaactgcttttgacaggaaagctggttgattcttcaggggagggaacataggatttcagaaggggcacattcccttgctatctgtaacattaggtaccctgactgtacacagagggcacccaatgtatactctatgagtgattgaatacatatttaagacaggacttgcagcatttccggcctgagagcaatgaggtggggttgtaattgtgtagatctgggcacattcttggcactccttacaccatgtcctgggagtggatacttttagcccctgtactaattattgctgtgtgacaaattttccctaaatttacagctttaaacaataaaattttttattttttattttttagattctacgggtcaggaatctgggagctggcataacagtgtggttgtagcgtagggtttcttccagggttgcaatccagatattgctggggactaccgtcatgtgaaggctggggaacatatgcttccaagctcattcacagaagccctcagttccttgccacttgggtgtctctatagggctgtcatgacatggcagctggcctcccctcaagggagtgatgtgtgtggacacatgctgctttttatgaccttgtctctgggtcacacactgacacttctctttattttccttgttagaattgagtcactgaatccagctcacactcagtaggaggggatgacgcaggggtgggacaaccaggaggtgggga

SEQ ID NO: 32943 - DNA, 1598 bp, Homo sapiens
agatggggtttcactatgttggccaggctggtcttgaactcttgacctcaggtgatctacccgccttggcctcccaaagtgctgggattacaggcatgagccactgcacccagccccctaccagcatttctatgtgataagcagccccccagactgttgaagatggcttttcacagacatgaaattcactagtccttccaagcatggctcctttctggagagtttggggttttgggaagccttgagagtctccagggttttgtgggttggataactcaatatcttccaggaggcggaaaggttaagacaccaaattcatgttgctacacaattaaacatcaatacacgtagctgaagcactttaaactgcggcgtcggagttttttgagggtgagcccctccaccataatacgctgcaatcttttttgggttgtctccctgccccacttccccagccaaatatgaaggcagaaacaacatttctaacatgccacacctcacagcaagtagaagcaggaccggagagactgcaaacgactttacttacctagatcatcctctatgaatctatctcagttctaaccactgtttatttcattgagagcactctgtttattttgtttagagataagattctggacccttgcaagagaattttattgtttccaataaagaatgttttaggtgctcattgtttctttttctatcttttttttttctttctttctttcctttttttttttttttttttttttgagtattgctctgtcacccaggctggagtgcagtggagcaatctcggctcactgcaacctccacctcccaggttcaagcgattctcctgcctcagcctcccaagtagctgggactataggcacacaccaccatgccgggctaatttttgtatttttagtagagatgggatttcaccatgttggccagactggtcttgaactcctggtctcaagtgatctgccctcttaggcctcccaaagtgctaggattacaggtgtgagcacacatgcccagcctaggtgctcattgtttctttacaatgttttatgttaaatattaagaaaaaaagactaaataatggacacctatgtatctgcaaatacgcattcagttgtctttaataatcctttgctaatcttgcttcagatggattaagtgtgcgtgcctgtgtgtggtgtgtgttttacattacagattagaacttaggtcctctggattcacaaccccgaatcccatttgtttttcttcctttccaaagttgtcattatcgtgaatttggtgtttagctatcccatgcatatttttacactactgctataacatatgtagttataaaatagcattgttttgtatgctttaaaactttatttaaatgggaccaactgtttatattatcctgatcttctttcccttatcaacagtatgcttttgtgatttatctgtgatgttccatataggtcaaattctttcatttttattgctttataatatttcatcatatgaaaatatcatgatttatttatctatttccctattgctagaaatgcatgtcattttaaactttttactattatcaataatgt

SEQ ID NO: 32944 - DNA, 1054 bp, Homo sapiens
gtccactgggggcaattgtgtgtacctcaggggtggctgtaaggattgtatgagatgaaacacttaaaatgagaggcgcataaaagatgctcaatacatggtgcctttgctgcacctgttctcctgtaccatccttcttcaaagttctctttaatatgaatttctagcagagttcacctggctaaacagaaggatcttcatgtataaatttctcctgggattggggaaggctctgtgagtatgtgtgtccaggtttagtttgcagcatttgtttggacacctgaagcgctatggtttttaagtgagatgaaatcatgtagtgaagagagttctttaaattgaacctcattacatgaaaccttttagtgttcagaggaaaaaaatggagattttggtaattaaatttgatatttcaaacaggaaacttgtttcattggacttgcatgggcaataccattttttatataagtagctcttgctaaagtattttttgggggggcacttgaattatagtaaactctatttgactaacctaagacctgctgtggaaacctggatttaaatatatgataaaatttggaaatattttatcacatctatagcttatttgatttggaaatatatttatttcatatatagattatttgtattttacatcccaataagcatatgtgcattgtttttctttaacagggcttttactacttttttcctatattctgattctttattatgttaatttgaagcaggcatagactaggagaattaagcttaagacttttctttttataatgtttaactctcagatggtgagtcttggctggttcatatatgtgacatttagtcttttgaatacaagtagatgtcttgtatgtttgagtcgtcttagtgattgaaataagttttttctttttaaaaaaatattaattaccccatggtcaagattattgcaatttactctacaccttttcttcaatttttttctaatgctgttagttattccctttattgaaaagatctgtctttcttataaaataatcatctttgataagac

SEQ ID NO: 32945 - DNA, 1052 bp, Homo sapiens
taagcacttactatgtgctgggcactgtactaagttttctttatacgttaactcatttcatcctcacaataactctgtgaaataagttactattattttcctcatatctttttaacatgtgaggaaacagaggtacagagatgtcaattcacttgcttatagtcactcagcttagaagtggcaaaaccaggattcagactcagaaaacttggttccatgctctttaccctacactaaaccatgtctaaagtagcgttagcaagtgaagaagttgagacccctagcatatatctatcttggcccggccagtgctatgtctacacaatgtctaaattggttatttgatattatattaactccaaatccccaaacttgtgaatggcatttatcactcttaactctctctctctctctctgtgtgtgtgtgtgtgtgtgtgtgtgtgtgtgtgtgtgtgtgtaaaacaggaagtgaaatcctggaaaacagacaataaaatgaaatcctgatcatggaccttggatgcatcactgaacctttccaagtttcaaccccactctcatacagagaaatacattttaaatgactaccatagtgcttggtacagagtatatgctattatgattgagaatgaggtagagtgctgaagtttaactagataaattaagtaattagtggcttaccattagagaattcattgttgcagaatgttgggaaggttgaggaaggccatgtttaattgtaaggtatgcataaccttccttacgctggctgaataaaaattccaataccttttttgatgtgccacactgttccaaggcttctctgggacttggggtgcatttcatcttgaactatgaattgcagagatttttatcgtcttctgtcacatacacagcatccttttattgtggtttttgatgcgttaaatatgtttttatggccccctatgtctattgtgcctagcatactgttggtacttaataaacgttaaataataataatatatgtgcatatgagatgtgtggaaaggaatgacatactgttttaagga

SEQ ID NO: 32946 - DNA, 1039 bp, Homo sapiens
tttctctaactcattcttcattttcttctgtaatttttttttttttttttttgaggtggagtttcgctctttcgcccaggctggagtgcagcggcgccatctctgctcactgcaagctccacctcttgggttcacgccattctcctgcctcagcctcctgagtagctgggactacaggcgctcgccaccacgcccggctaattttttgtatttttagtagagacggggtttcaccgtgttagccaagatggtctctatctccagacctcgtgatccgcccgccccggcctcccaaagtgctgggattacaggagtgagcccccgcgcccggcctttcttctgtctttattaaacttcattttgtttcttaaaaaaacaactctttaatttaaaaaaatttgttctaatgtctattactgtcttttaatgttagctttggttcctagaatgagaatatcttctatgtctttatttcagtaacaataacaaaacttgcttatggactgaggagcctcattaagacaaataactgaaataatattctctcagcaggaattcatagagtaaatgcatgcatatttagaataattggggcttgcagtggccaggatttggccagttgtgacaaactgaaagtaaccacaattgatcaatttttgagaattaagctacggtaaatatttctcaaataattgattttaaaatatttactggctggacacggtggcttatgcctataatctcagcactttgggaagccaaggcaggagaattgcttaaacccgggagttcaagaccagcctgagcaacatagtgagacttcgtttcttaaaaaaaaaaaaaaaaaaattagccagacgtggtggcatgcttggatccaggaggtagaggctgtagtgagttctgtttgcatccaatctgggtgacacagtgagactctgtctcaaaaaacaaacaaacaaacaaaaaattaccaatcttcaactattatcaagtcatgattatgaacattaatccttagtttgtgcttttttagaag

SEQ ID NO: 32947 - DNA, 1143 bp, Homo sapiens
ttttcatattctgagagtccagtgcttttaaattaaaaaaaaacccaattcatacatatatatcaaagaacagcttctttgagttaaatccttgcttgccaatgtgtccttttatgagatagggtcatttgtcatgagggaaagcaggattaattaactgtggaaaacgtacgaagtgtggaaactgtgagttctaaaatgtttccacattaaaacacgggaaaagaagcatagatgaacgtagacatcagtatgacttttttcttcagaaggcttaaaaaaaaatctctccatcacacaaatgaaacaacctattatacacagtcttcccatatgtctgacgcagaaacaaatgaggaatgtactttatttccacataaattgtgtggtttcaaaattcagttcccttcacccctgaattctggccaccatgtcacttatatgtctaacaggatgacagaacttttaatgggacgaattgtagaaggggagaaccacataatattgtagctcatgaaagtatcaaaacaaaacaaaataaaagtcacccacaaaaatctctatggcaaaataaaaaagaattccaaaaggagttgccaaagaaaggtatataagtcacggcagccttggggaagtcatcatctatagccagcaagtcactttatgttcttattttgttatttactctgttgtttgataaaatgagtgcttacattgaatactgtaatattatacagaagatatagaaactactttgaagatgaaagatactctacatatccaggtctctctttatgtaattttattttgcttaatacaaataataaagattctgtttacttataattttcttctggtttctgatgacaatatggtaaacaattttaattattatggtaattaaattaacaaattaatttggaactgtatggagtttatgcatatttctggctaattctggatctgatccttaaggccaggatttaattttggataaagggattcatttaaatttggtattttttttttcctggcaggtgaataatagaactttgtaaacaaatagaaaagtgcattttaaaagataaaagacatggagacgcaactggaaactctttgttccatgaagcattaggctatgac

SEQ ID NO: 32948 - DNA, 1031 bp, Homo sapiens
ttctagaatttcagggcagagagaagctcatgtgcttggataaaagttacccagtaaaggctggacctaaactgggcattgggcaaggatttaggggaactagagaggagagggcggtggacaccccagagggtagaggagaaggctggaaggaaaggataaacacaacccagttgggcagggtgggcgtgagggcagtaagaggaggtggaggctgtctgtgaaagggtgaggaaaataatgttggccaagtaggctgcagttggctgaggaataatgtgaaagtcagaaaggaagaggccttctggactggaggcagccacatccgtctttaggagttgtggacagcacagtgctgatgcccagatttttgctggtgagccagcaagtttttgtgaacagcagacaccctggaatttttaatctagtgttttgtttgggtttctagtggtgtgtttgggaattatttgggtttgtttctggcagtgtgactctgaagtttgcattgtgagggatgaagagcgagactggttgaagggtaactgctggtcgggggtagaacaaaatctctgagtcacagtcactcagctttctgtgttctctccttctgaaagtgtaaacagccacatcatttcagtttggtttctagaaaatgaagatgaaatgggtggggaccagaaaaaacaacagcattgattttatgagtatttttttatggaaaattattctctatactgtactgttgttatgggccatctcctaggatgtaaaaagtgcttgttttcaatggaattttccttttaggaaagaattttatcatattgttgccggagagcatgctatttgacctgtggttctgaatctttgtaataaggtactctacatattataacaggtttctctttcattttgtttgtttttagtatgagattgtctctcaaatccacacattgttatattgggtcattcaagtgaaataggtgattagcacgggttaatggctgtatgtcataatagtgtgacatagcaga

SEQ ID NO: 32949 - DNA, 1150 bp, Homo sapiens
gtttactttagtttggtaaaattacatttaaggtgtgaggatgaggtttaacgttttatcaaaaccctgaatgatggaagcagagtggtatgaatgaatatgtctgttttgatcaggtacaggcccagtgcaagcatttagtgtagtttgtttctaaagctacatgtgtcatatcaataacaattctattaggcagtcacatatcatattcattaaggtcacagtctgacctgtgatgtttccaaagtttctctcttctctttcctttgaccttcatggttttgatgcctagtcccatattttcttcttcactctggcctcatttggatccatttttgtctcctgttttcttaagacccttctctttgctagctgatctgatctagcaactcatgatgataataacgtcaacagataatacctattaagagtttatatgcaccaactgcggtgcaaattgctcactatactacactcagacgaaaagtatcattacccccctttatgaatgaagtaaatctacagatcaggatcccatggctagttcaaggtggcggtagaattgaaaaccaggcttctgtctctgacatcatgctgtttccattacaccacagaatttagcactacaaaaaatagttactggaagactttgttctgctatcttcttacattttaattccacagtaaaccctcccaccctattttcttttggttcttgtatgagattgaatcttttttgtatgttttattggcagatgtatatttttgaaaaattttcagccagttttataacttgctgtttatttcatatgatggaaattacagctgcgaagatgccattttaagataaaattgcatctaatgctaatttaaaattggcacctggttttaaagtttatttaaggacattgcttgtttattggatacctttaaacacttaaattattttcagattgatagcagggcagttggaaatggtgaaggagaaaaatgaattttttgtacccttattatgaatcttttaatattttcatcctggtaaaacttatgaggcagctctattttgaagatccagaaaggttgatatactgggtgtttttctcttatttattatggtttcctgtaggggcaaaagcttggacaactctcc

SEQ ID NO: 32950 - DNA, 1033 bp, Homo sapiens
ttgctacccatggagcttgcaggactggaagttgctctgggtgagttagtgcatgaatggtgagtgaatgtgaaagccctggactttgcagtacactgctgcagactttataaacactgtacactttagactacactaaatgtatacaaaaatttttctttcttgaataataaattaatcttagcgtatggtaatttttttttactttgtaaactttttaaactttgactcctgtgctaacagcttaaacatacattgtacaactgtacaaaaatattttttatatccttaccttataagcttttgtctatttaaaaaattttaaaaaactttaaaaactttcttttaaaaactaggacacacacacattagcctaggcctacgcagggtcaggatcatcaagatgtcacttaagtgacagacatttttcagctctgttataatcttatgggaccattgttttatatgtggcccattgttgaccaaaacctcatgatgtgatgtgtgactgtatataatttgttattcaatatttatttttcatggtatttaattactgatattacaataatatattccctgtaagttaaatatgtgtgtatgtggtatttgtctatgtgcatatatgagtgaatatatgtattgggggctagcctgtgaacttattcaccacatataataaacatttctatggagaaaattggtggtatgtttctaacgagcatttcaaaactttcagaacatagtttttttgtaagttgcaatcttgtggattactttcatagctctgcagctcatgagtgattggggaagggaggactctgtggggtctggaaactccctatgccttcagatttattttaaatgttatttattttttctttttgactaaatatttccttcctcttttggtatacgtcagaagtcctcaaccagagatgatttttctccctggggtaaagttggcaatgtctggagacatttttggttgtcacaaggagtaggcagcctctagtgggttgtgctattggca

SEQ ID NO: 32951 - DNA, 1020 bp, Homo sapiens
ttctgtcttgcttagtcttgtcgtctagcacagaccggcaccctccagcattgtctagttttcactgtagcacacagggctaacagggttactgttactcatttctgtgatacagacaaaattttgtcacttaatctcttttcttccagagttaatgtctattacccctgtgcctacagaaaaaagagtaagagctagcatgtgtctgagtttaaaaatatataactctacttttttcctttgtgtagttttcctttagtttgaataaagcttaagggacatggcagctaccatgaaatagctgaaagtgtttgtttttcagaggtggatctaaacttgttctgtccagtgctcaaggcaatgtctactggctggcagttacttgggaggcagtatatatcatcttctttccttaaatggtacctttgtgtctaggaatccgagagccaggttatttttttcggcatttctgcaattgactaaacctcccactcagagttttctgaccttccatccgtataatgttgcctctgggaatttgtatgtgtttcttaatggtatctataaacaaagaccagcatttctactcttgccctttagataatatcaagcagaaagagatactaatttcattctgtcttaaataggattcatgctgcgatgggtatgaagacatgtgaggaaaagggaaaaatgagatacccccaagaatactgtttctacaagctcaatgtccaacagcttcattttctgttgtcatgtgcccacttttagggatgggaggtttttctgttctctgtcaacttcctctagagggcagctcatggaaggatgccctgcaagtccctcttgagtttcttaagatgttttggggccctttcagagggcagctcttctgggagactgcctcttggtagccctggggaagtaagtccttggtcccactcctggggtttggagaggacagctgggtccctgacacttcctgggctccctgtgtcttcagctgtctgaccccat

SEQ ID NO: 32952 - DNA, 1305 bp, Homo sapiens
gtccttctattcttaccaatacgatttgtggtcaacaccaccaaaattgattgttttatagtggtaggagaaaaataaattttttcaagtatcttttgtagtggtattttaataaattccttgcaatttccctctcccctcaactttttattttctaaaaaggagtttctgactttttttcttacacaaatatttctgctggtgttgttattttatgaagagacattggctttaagaaaaaagccacatggcatgagttttatttcatattatgtgctttgtctgttggagtaagactcattaggcacactgtacatagcgtggtagaaggaagatggatatcgagacaaaaaaacctgagtttgaattctaccttggccacttcctgctgtggcgcttgggagaattattaacagcttcaagtgtgttgttcatttataaagatattatattgcctccgtaagtatctaaaaaattaaaactttttttaaagtattataatacaggattgtggaaagagttcaatgaggttaaaatggcggagactccaaattttctcccaatatctattccccttctctgtccttttaataacactacgacttgagctatactgaggcatatggctattcagttataggctacatttctagcctcccttggaggaagacatgatcatgccattaggattctgttcaatagaatgtgaacagaattatgtttaaattatctgcaatttataaaaagaagcttcctgtccaccttcccctcttttctcccttcctgcaggtgggaaagtagatggatggtagtgagtcagctctgaccatatggaggagaacaataccctaggagatggcagagcaataagcgaggaggaatctggaaccctgaatgttcttgcagagcagagcttcctacctgtctgggactgcctgcctaacttgggactgttatacaaaaaagaaagacatttctttcctgtttaagccactgtactttgcggtggttttgtttcagcagcttagtctgtatgctaactagtagatctaatacttgtaaaacaccaaacataggctggcacatagaagcacaccaacacgtttatcatttaaaacactgggtatcatttaatttctttcatttctttttctttttttttttttttgagacgaagacttgccctgtcacaggctgaagtgcaggtgtgatcttggcttgctgcaaactccgcctcctgagttcaagcgattctcctgtctcagcctcccgagtagctgggattacaagcatgcaccaccacac

SEQ ID NO: 32953 - DNA, 1031 bp, Homo sapiens
gtgccccagaggaggctccattgactgcaagccagcaagcctggaatctgaattggtgtcagggtcccactcatcatgaagattttacatttggtttgggactttggagcatgaggctctggatgtaaaagtcagaagagatatggcttttgtaatgtctgcagagattcctgtgtcgataaggtcagcagaaagttaatagatttttatcttctcatcacatgaacttaatatagtgcaactgtttggtgcgggtgagatggcgtaatgggatgagaatcccatcacgcgtctcagatttttcacaaaggatgttttaggtctgtaagtgcatttttgcttaaggctaaaaaaatctattactcatttacataataaaactgttaaataaaaactttaaatgctgtgcaacaactctggctaaaaacaattttagtcagagcagaacatgtttttttcctttgtgcaggttattcaattacatatgagtaagaaaagcttgcatttatcgtactttaacagaacgtgagccagttcaacttaaatgcctttaagcaaatgctcagagccataaggcagttccattaggactgcttcatccttacaccagactcttaataactgccgtgtgcctgccctgaagggaaggtccttttgccaggcactggtacatgactggaaacacaaatggagggaggatggtatgtgtgaatcctgccaccaagactcgctttaggaggggatgtggggaaatgtggaagaaaaaacaccaggctgactccagatgccacctttgaaaatctctaggtcatattactttcaaaccaacctactgactcgagatctgctttcaaggccactctgatcagctgcccgaattggctgtgagggtggtttctgcaaactagggatgctcataggggtatgcaggaaagctgggaggctgaaatgcaaggaaacccatggagggacagcaccaggtcagactgactagcaggcctcagcgatcaaacacgtcacacctgtcttgg

SEQ ID NO: 32954 - DNA, 1077 bp, Homo sapiens
ctcaatgaggcaggtgctattaatatgcccattctatagattaggatagtgagacgctgacaagttatgtaaattctcaattaagaggttaagaaatgtgaaatagagcaaagtttcaaattaacaggaaaattcaccaacactagctgatataccagacaatttttatctgttttaaattctttataaggttggtttattttttagctagagtagacatcttaggctttctaagctgcaagggaaattggagagcagctggcctcacagcatcactttattgattagaaatgtgaagctcagagaggtaaagtgactttcttaagaccgcagagctctttgaatctagactttaagccctgcactctttttcctatatcaggcaatatttctcatgctacgttttcattttcaaaatagcataaaatcctagtgtttagtcttctatctcctattttacagaaaagaaaataaagatactttaaaaaaactagatctcagttccttgttgagtacctatcgctagctctggctgctttagaatctgcggtgtcagaggcctggacctttgcttgctcccatgagcctggtgcctggctgcaccttgacgaaggtaacaataggtattatcggcctctcatattctgccctcactagggtattttggctgtggttacttcctgagcccatggagacaaccttggctgaatcacttaaaacactttttaatcagaaccaagcaccttattttaccaaaataaccccttttaaaggtgtcacaatttgttcaacagataagcatcaaagggcaatagaaaaactggaagcagacatcataattagatgactaaaatgaaagagcagagtgatttagcaatggttgaacatttggcaaagaattttcatcaggcttcatcccaattctttcaacagaggagggaagaagcttctgagaactgtttgaaatggtggaatagcaattaaaggccttcgtcattaacagagaggaagcagaaatgaatgttatttgcctaatatggcattatgggcattggaagccagagggttgcaatggaa

SEQ ID NO: 32955 - DNA, 1024 bp, Homo sapiens
ggaattgtcaaggagcagagaaaagacatccaggatcttcaaggcctccaacatttctgagataatcaagtaaaggatgaaacactgaagactgttcctagaaaccaggtgtgttttaaatgtaaggaaaaaagctaggctgctcaatcctttaaaacttgaaattgttgctatcacgagggagaggaaggctggtgtggaggtcaggccctgggcaaaccaaacctctgagctactcaccacaggctagttcatctcagtgttctaatgagatcagtcgaggctctttttgttgagtgagagagagagagaggaatagttacagatgtgacatttcctaagactttatgaattaaatttcctgttaactactttgagggcaaatgtatcttaaagcaacagggtaccttctgctcccaagctccgctcaatgattattaactctttaattgggcaaagtctgtttatgccagtcagacatagagaaatttacatagtgtacatattaccgtgagaattcctctaatatacaattgtcaatcaaagtagagatgggtcttcaggtttaggagggtgaggataagttacaccacaaatgcaaacagatacagctgctgttataaacacaccagtcctatgtcatgcttatctgaattctttctggtactcacttttaaaccaataaaaatttcaggaaaatgttggagatatttttgtgccttcagaaccatcacttacataaggaaacttttgaataaaatgagtttttggaaataaaagtggtaaatggttgtaatataagaagttacataccaaataatagcttatgctgtattttcaacatgctagtttttggatgggtaatttttttggtaataaatctgagttgggtctgaaatgggaggtttgtatttactgtaggatctgtacttccgatcatctctcctaatgtgggaataatttctgattgctggtcaattgtcttgagattctcagatggaaacgaagctcacattgccaaata

SEQ ID NO: 32956 - DNA, 1897 bp, Homo sapiens
ttgagagtaagcagaaggaaatggtagtaataacaagattggtttgtgctcattcacacttttctgccatttggattctgggagtggtagggtgggatacgggatggcagaagaaagaatgtggaagaaaaacagatgtgcagcagaaaggggatgtgcaaggtgcagcacatttggggtacctgtaagagggtttctttagaaaacacagtgctaataactcaatatttaaaggctcatatttgggggttcacatatttccattaatagttatgtgaaaagaaaatttagcaaaatcagattgatgactgatgtaatttaattagactccagcctcataaatatgcaatgttatttgaatgaggagttgaattattaggctccctgagaaaaaaatgacaatctggtttgcttcagagtttgttgcaaacatttctgcccttgtataaatgtgtaaaatgatttggtaatttaaacactagaagaaaggctaaatttaattgaccagttgcagtaaccatttgtagatattttttgctctcctttgcagccctgactctcttttcctcttttgtgattggggatattcctttcttgaaccatgccttctataatagctttgggagatgctactgggttttcattctcctgataatttcacgctgccttaaatcctttgcatggtggctttactagcacatccagaacaaactattaagactttataatgatattaaaatcattcagttggccaaggagacttactgattttttttttttgataggttggcaggatgaagtaggggaagggagcatgagagtactttctattttttttttttaattaacctttgttttgaataaaactctggccaggctaaatacctgaagctgtgtgaattgataagctcaatctccgagataatttggcaactcagtgtactggagccctctccataaccatggtgactctccgagcagtcagatttttgctcttttatcttctctgaactgctctttacttttggccaagattctttccttttcactttttttttttgttgttagttggcttaagaacctaccctacagtggatgaatttgcagttttcttttcttttttttttttttttgagatggagtctcgctctgttgcccgggctggagggcagtggcgcgatctcggctcacaatttgtagttttcttaatgttttatcagttacccgactattttaaaatcccatttctaaatattttccttctctcttgtcttcccttcacatttgaaatggataaagcagaagttttgtttttcatgcctaccttccccagtcaccatctgcaccatctctgtattctttctctttttaattccctgcaagtgttgcacagctctgtattctctttatgccattttgttagattctttgctgaaatgaaatatatgattaataaatgggaaggcctttactagtgattgataactactcttagaaacactgtcatttgcaattcattaaatgccttatttgccatttatatttactgaaaattgatactctatgtattagttctttctcaatgacagatcactggtaaatgtatcattaaaagagagcttaattccaatttgtcttcatttctccttgaaataatcttacagctgtcatatggaccttcttctccattccaatgcattcctctttgccagtgcccacaattgttctctctgatttatgaattcctttccttagggcaatatcatattgtcagaagacccaaattcaaattctatctctgccactggctttgagactttggacagatagttaatagaccccaacctcagttttctcatctgtaaagcgggaatgagaatatttacttcacagaatt

SEQ ID NO: 32957 - DNA, 1049 bp, Homo sapiens
aaatgtgtgcaggtgtataactttggacacctgaagggcccacactccttcagtttagttttaactgcttgtttcaaaactattaataattttgcacaaacctctgagagatttcatttggattttgcagtttatttcaatgctgtttaatctaattgcccctttgttttgttcccccaaaatgatcacttgagttttataatttttagaatttcctttgaaccaactgtaaaggaatatgatggttcaattgttgaaaagagagattaaagccaggtttttatgagaattttgagttttaaaattatactgccagtgtaagatgaatataaaatataaaatggtaggggccgggtgtggtggctcacccctataatcccagcactttgggagggagaggcaggtggatcacctggggtcaggagtttgagaccagcctggccaacatggcaaaactctgtctctactaaaaatacaaaaattagccaggcgtggtgtcatgtgcctgtaattccagctactcaggaggctgaggaaagagaatcgcttgaatccaggagccggaggttgcagtgagccaagattgtaccactgccctccagcctgggcgacagagtgagaccctgtctcaataaataaataaataaataaataaataaataaataaacaaataaataaaataaaatgcgaggaactgaaccaagagtagaattttctagcctcaggagtggggcttcagaatcataactatttgagataatctatgtattttaagaggattataagttatggtgcaagaggagttttgtagcatactatatgataaactaaagaaaatagaatgattctattctacagttgaggcttgaaataaggaagatgagggtaagtttttctaggcaatgcgtacgagggggtgaaactggtaagagaatgctggcttacctatttcttagctgctagactgcatacatttgttgctatcagaggcagttttgtgacttgttttatgagagttgagtatctctagttgagagacatctttttc

SEQ ID NO: 32958 - DNA, 1066 bp, Homo sapiens
tcctgcttcttcatgatctctcctggagatatgacttctatgttatttcattccaatagtatggaattgtctttatcatcattttggcattttattataaattgcttgtcttcatggtatatatcttatttttctaggtaaactgtaaaactcctggagagcccatttctgttttgtatagggcctaatactatgctttgcatatggcagatatcaatatgattaggtgatggtggttagcaatgggctttggtggattatgtgaaccccttcaatttctttggctgtaaaacctgtgcagttaagtaatgtcggcaccagaattctgggatatctgacatttcaagtgcatactaaatccacaattgacctattttgacagtgataaaccacctggaaagtggagtattattcctaattttcaccaataatgtccctcattttgccagtgcaggtattgcccatgacccctcacttaaatcacaaattgttattgatcttaaactctgtactagacctgattctggagaatgtcaaaggagtcaaggtagaaatggtaaaacattctgtggactcatgtaattcctagggatttgggaatattcagtttacaagtcatcagaagccaagtttttacctaaatcctaacaccaatgtaggcagttttgctgcctaatatttatgctctattaatatagagcatggtgtcaagcattttgctgtatatttaaatgcacttttatgattaaagatttctttcaaacaatttaaggttgatagataatgtattgaatcttgttttactgattaaattaacccaactcactcaactctgttcccttaattcaagtgcaaacatgacttcttcttctctgcccctccccactcctctaacccccatctgtcatttcacaaatcaaccatctctatagagaaaataggactgtctgtgtcttggacaactatcctcaagtcctgaatgattacaggcttttagtgcctgttaggagttttcttttaccgagaacagccatatatggtttcttgtgcacttaggactgctcct

SEQ ID NO: 32959 - DNA, 1539 bp, Homo sapiens
tcccccttcccactcttctggccttcagagtttaccagggaattttcaaggaaattggctgtatagtgagaacaagtgtaaggaagaggataaagaggagacagacaaatcgatcagaaaaccagagagggagacaggaagggagaaatagtgtagttcttccagatccttagtttgcacacagattggtattatcctccccagcccctccaggaaatgaaaaaagtataatccttgttaattacctttgcttactacaagccatacaagaaacttcagagatgtctctacatagggaagaaactgtttacaagactctttcaaaagtgtgacatattgctctagttcagcactaaaaagctaaacacacttagcctcctttgaagtgccctggctggggcagcttatttgagtgtggttcagatattgctgtgggtataactaatggcttctacctatttagctcaagtgggaggagagaaagtcctgaattccttgtccaatgggtccctctggagactgggttctggcttcttgccaattctgtacaatgtcaacattgaatatttgaattcccagactctatttaacaagtttctaaataaataaactcattgtgtgtctgtgtttaaaattatttcacctctttcataaaagctacagcatcttattacattggccttgcaagttgattttaaaaaaataaacaaacagatctcaaggcattttaatagccagatctccacaatttgtatgtattgtgaagccattctctcacgtgtggctgtgtaggggttacctagagggatcgtgatagcgaattttaataaaaaccccaactaagttcagaaagtaagtgaaatattaactgcgtctaaagggagccttgactgtgtaactttagtgtatttagatatttgttaattttgtctactgggtctacaggggacagagagcctcactgatgtgttctaaatggttgtctgaatacagatcccccttccctattggtatcagtaggtctagaactctgcccagatggttttgtttctaggcattttttatctgtgtatgtccttgtaagttggaaggagtaaatatatagatattatcttcatatttcactttggtgaaaaaaccacaagtcctatggttttactaattattcagcatttaaacatccatacagcatttttatctatatagaaacatagttgttctaagaagtacatactgaattttttttaaggcaagttctagtccttttgaaagtgtggaccacatctggagttgttaggaaagaaagtggaatttactctaatttatgtgtataaaatacaatgttattagaaagaatgggatttgaaagggcacacggtaaagcccataacatttagtgggtaatgtggagaactcaaagccaagacaaaaataccatcaacccatgcaaaccctaaaatagattacaatgacctcagtcattttcattttcaaaaataatagccatgattaaaatgggggagtgttttgcttggaacc

SEQ ID NO: 32960 - DNA, 1034 bp, Homo sapiens
cccctgggtctgagaaatcaacctaaatatagggctctttgggtcatcagtccatctgtttctcttttgggtgttgttctttacactcgctgctacagtgtcaaagggcgccggtggaactgttttccctgtttgcttttaaatgaggccgatgtctttattttcatctgaagggaaataaatgtacatatacttgaggtttgcgggcttcgatttggactaaaggttgggagagagagagagtgtgtgtgtgggggggggagttggcgggagtgggatggtgggtgggggtgggtagcccttttcaaccatgcctaagttgtgaagtgaaagcttaaggcttcgcgccgcaactcactgcccgataacttctgaagtgaaagcagaacacaaaacccttcgaattttcttgagcaactttttcaactattttaattgccaagcaagacatacgatgccgtcttaaaatattcccgcacgcacagtccactcagcatccagaaactgagcctcgtttccgatctgatgatacttgtcattcaactggtgggagacccatttattttgtccccagggtctctaaggatgccgctgccgctttctgatagctagatctcaactcttacaaacttttactgagcctcagattcccgcttgcactactccagctgttgctgccgcagctgcctttcccagacagaagcgctgcgttgcaattcttcagttacaatctgggtaataaaggaaatcatattaaaactacagatttttgtattttaaagcgcgatttccttcccccgagtagcgcgtggcggagatggttggtgacccctgcggtgcaatcatccaacgaaaacttcactgctctgcaccagtttttctttttctgggtttagaaggggagttgtgactacaatactttaaaaaacaaaactacctttattgtggcaagagaaaacattacaatggaaacaaattacatataaatagttgttttctcggtagcttgttgttctttttgtcttttgtaaatt

SEQ ID NO: 32961 - DNA, 1036 bp, Homo sapiens
tatttctaactttaaaatatatccagaatctactactacttatttctttcactgctgccaccctggcctgaaccaccatcacccttgcttgggttttatctatagattcctgtttaccctgattccactcttataatcctataccagtcagaatgatcctcttaagctgcattctggaccattctgatcttacttctggacgagtctgaccttatttcctagtagtccccaccccctgcttatttcctatcaaccactgtggcttccttgtggttccttgaacgtgttaacattgtttggtggaaccacaattacaattctactgtcctgaattctaatataatagtctattcataagactatggtgattaaaagactaaaagatcaaacaactcatttggttttttaccttgcatgaatcttgagattgctagaagttgcaaactgtaagttgcatacatcacatttatagggtttttcttcaccatgatgcatgcgactatggaagactagctgacatttctgagcaaatcctttatcacacaattcacatttgtatggcttctcacctaaaggaacaataaaatttatatttagaagaaaatagtgttttggttgcataagtcatataagatttcatcaacagtactagctttgttattaagaaaatgttaactgttggaactgaaaacaaatataatcttttccagaccactgaaaacaccagtagaatcaaaagaaattagtgtttctgaattcacgagataaatacatacagcattttaaaaagtacgaatctagggctgggctcggtggctcacgcctataatcccagcactttggaaggcggaggcgggcggatcacgagttcaggagatcgagaccatcctggctaacatggtgaaacccagtctctactaaaaatacaaaaaaattagccggacttggtggcaggcacctgtaatcccagctactcgggaggctgaggcagcagaatggcttgaacccgggaggcggagcttgcagtgagccgaga

SEQ ID NO: 32962 - DNA, 1061 bp, Homo sapiens
tataatttcattctgtgtaattaaatgaataaaaatctatttacaatacctggaaaatattaaaattcagcaatgttattcagaatattttattttaaactacaaattagcacagctaatttgaatatttaaatttccgtaagcactgtaaattgaatacattttttcttaatgatatagtttttttcctaaaaatcctaggcatattcagacttaattcaaatgggttgtctaaaaccagacaatacagatgtggagccatttgtggtagatggacgtgtatatcttgcagaagtctccaatggccttaaaaagcattattattggacatcaacttatggagaatcttatgaccactcatctaatgcaggttttgctcttgttccagtaggtcaacagccatgaaaaagtagctgtaaaataattttcatacacttgtcttattgtttcacagagattaatattctatagcctattttcttttataaattaaaacaagttacttttttcaaatgtgtaaaagataatgactgtattaaactttgtataactgtctattgtgaaaaactgagtagggtaattttttaaaagaaattttacaatatagagactaaaattctaaccctggagaaagagaccaaggaactagactaaatttctttttataatgaaaatataaccaagtagtgaaatagcgtacaagtaaaggtcattgtaggtatctaactgaaagttattaagtagtattaataaaaaggtttgtggtagaaaattaccagtgactttcaaagggtttcaaagttcagaagttgaaaaagtattctacctatcctatttacgtgttacagacaggtgttactaacaatttcataaatacaggcaaatatatataaacatatacatacccctttcccaacaagccagtgctgccagctctcccactctcctctcataaccactatcctgacttctaaccccacagagtagttttgcctgttcttgacctttatataaatggaagcatacagtatacactctctttgtgtctggcttcttttgtt

SEQ ID NO: 32963 - DNA, 1104 bp, Homo sapiens
tcacaatcaatgaaaacaaatctcactttctctcatatctacatttggggaaacaaatttgatgaggctacgtgtatagtaagttttaagttttttccttcactgaaggctttttctgggatcatctctgtaacatcagatattatttacaggtgcctcagaaatggttacacagtgagacactgcagttttgataattaacataagtcttaaaattaactactagagagtttggtggttcaaataaccaaagatattaaaactatgtattagtattacacatcactgaatgacacagttctaattcctctaaggttaagaaaaatcataattattgatcagatgtagcaaaatttctgatctgctccctaataattataccaaaatatggaatgggagagatagagtacaagctatcaaaatatttggcatgttgctcacataaatacagacagcctttgatactactttcaaaacagaaataatggtaacagttttcatttggaaagaacgagggggaaaaagtagatgttaaaattctcaaaatttgcaaaaggactaacaaaaattccaccactaaaaagagtaataaaacatagagtgttgtctaaaccaccctcccaaaaaaaccaacccttacttttagaaaaacatccataattctttaggttctacacatcagtagctgaataagttgagtctggaactggaactaatgatgaatgacaagctaaagcaaaaaccaacttgacttttaaatcttttaatgtctaaatttccatctttctccatattgccaaccttactgacaaaccagttcaacgtatttgtatgactctgttacatagatactaaggatcgtggctcatgcctgtaatcccagcactttgggaggctaaggcggggggatcacgaggtcaagagattgagaccatcctggccaacatggtgaaaccccatctctactaaaagtacaaaaattagctgggtgtggtggtgcgctgggcctgtagtcccagctattcgggaggctgaggcaggagaatctcttgaacccaggaggcaggggttgcagtgagccgagatcgtgccactgcactccag

SEQ ID NO: 32964 - DNA, 1027 bp, Homo sapiens
atagccagtaaaaggtagagctagtatctgacagacttgatttttataaagctcatgtactttctgctattgctatgtggtttcatttaaagtttttttcaaagtacctttatatataacaagaacacatatagttatctgtgttcatcatcagcatttccagtgactaaaaaacttattatgttatacagcaatcatgcaagagtacttcttgtcacaaaatactttgggccattcatttgaaaatatgctttgattttactaaaaacttaaaatgcctggtattcaaatcttcattgatgccatgtatcttttacctagaagtagctagattgtggaacttaaaaaaaagtcttctgatgatcagaaaataagaataaaacctcttaggaatttgagatgaatataaagggaaggatcagatatatcacagggttaatgagtgtattcttaatataaaataaagattgggaaatgtctttgtattttgtctgaaaaccatcaagagtagagatcaagagcaaagttcaggaacatatggaaggtataagaaaggtttagagacttgaaagatggattacatgctcaatacatgatgggaccaatttttttttcctttcgaaatgactgattattgtttttttaaaaaaccaaattaaccagcctcttttacatcacttaggtagcaggcacttgtaaaatatagtgactatattttaccttctgagaaggtaaaaaatatcatttgtggcaaagataattttttaaagatagaccaaacaaatgcaaattgtggactaacagttttaaccaatataatctttttaaaaagctaatttaaataacagcatatgtctgaaataaacatgtactacttcaaaattatattttagaaataagattttatccacttttaggaagagtctacagtccatgtaggccgcatgttgaaagaaaatcactgtcttgttgcactacacatgtgtaagcatgatataaaaaacagtggtatacaacagttatgtga

SEQ ID NO: 32965 - DNA, 1050 bp, Homo sapiens
gaggaacactagagaacctagtctctagttgttaaacttaagtactggccaagaagcctttctcctgccgttcctgtgctaactgtaccacctggtgacagaatagtaagtgaggtgatgtttactttttttggaagtactctagctaatatgagtgaataaggaatgataaaatttggaaactgcccaatttgccacctctgatgtactaaatggaggtagccaaagatcatcaatactaatactgaaaggtggaaattgaagagtaccttgctatctacaaagtgggcttgccaaaaaattagaacccgaccaaacctgtagattcaactactgatgttcaagaaagaggacaataacttatttaatgaccccacaggatgcagtaaagaaaatccacatggtggtatgctctataggattacaatttgttacttcaataaattgtttcaacaacaatacaaaaattaagacttaggatatatcaactaagtgcaatgtgtagaatttatctgaattcatggcaacaaagaattacatatataagacaatgggaaattatggtatgatgggctgaattatatccccccaaattcatatgttgaagcctttaactcccagcacctccaaatgtgactatatttggagataggacctttaaagaggtaatttggacacacacacatgatactagggatgctggtacacagagaaaaggctgtgggagggcacagcgagaagacagccatctacaggctgcaaaaggccccaggagaaaccgcccctgggacacctcgatctcaccctttcagcccccagagctgttgtttcagccacccagcctgtggtggtttgttatggcagccctaacaaattaatatgtgtggttatatttaaatctcactatttaaaataatacatactaaaatatttacagatgaaataggttgtctggaatttgcgccaacataatgcagtgtgtgtgctgggggtcgagtggatgaaagtatagatggggcaggatcgaccactggttaatggctgttctaa

SEQ ID NO: 32966 - DNA, 1072 bp, Homo sapiens
ggataatagttcctgtcagagttgctataaggattaaatcagttgctgcatgtaaaacaaacacttaagacggtacctggcacacaggacacatttcttaaatctttttgccattattagtgttccatagcgcttgttttaggacattttttcaaataacagaaagtaatccatttgtggatcatcaactcaatttagtggataaaaaccagcatttaaaaaatgacactaaaaaacatatttgcatgatatgtaagggtaagtattgttatacttgtatgtacatgtacatgttatacatgttatgtaagggtaagtatgttacttgtatgtacacataaacgtacatacaagtctataggtcatgatgttaaaaaatatatcttactataaatatcaaaaaaaatcaaaagccaccaatttaggaaaagctaggtttagatttatgcaatatagtatttttaaatggtgataaaaaatatctatgtagcttaattcctaaagtaatgtaagatgatgatcctgccactcatattgttttactccagtgaagcaactctgcctatccaccgggggagatttggcaatgtctggagacattttttattgtgtctactgggcatggaggtgccaccaatcagtcagtgggcagagagcagggatcctgctaaactgccccacaacaaaaaattaaccaaccccaaatgtcaagcgtgccgaggatgagaaattctacttttacgtgtgatacatcattgctaacgtgattatgatgtgatatgcaagtatgtgatgacatacaagttttataatatgaaaacgaatctgctgaatcatcgaaagggacctagtcactgctcccagttccataaggtgagcaaccaaaaccctcttcttccaggaatatttgcattaaaaacagagatatactttttaaaattaattagctacatttaaaatgaggtaatcttcttcttcctcttacattgaactttatgccaaatcattttaagaacaatttttactttcttgctttcatttgaacatttaataaaaatgtttaggttgatat

SEQ ID NO: 32967 - DNA, 1511 bp, Homo sapiens
cctaatccgttttaaaattgtactatgagaaagcttttttttgaaagttgtaaagcattaatacaaataatacaaatataattattaccatcacattccagagaatatggctttttctaaactttcaatttagaaaacatacattaagggagaatctctgccctccttttcagctctgaagatcagcttttctactcagacacatgcacacaccccttccaagtgtcatgtttatgggaacatttgggaaatgttttccagatgttttattttttcccttttatagtttgttgacatttaattttacttaaagatgacaattttaatcggaaatgttagaggtacaacatagtgaggttctagctagctttatacttttgaaaaatatttttgtttctactgctttttacaagtactagtcctctcagtgatactggtggtgttcagtatgaatccatagaaagaaaacaaaatttgttgtttaaaaaaagcagagtaatgaatgaatttcagttttgaaaacaacataatttgaaaacactgttatactaacatggcaaggtgttaattaaatataagagtaaggtagtaagttcttttagagcacctgtttaaatttactccagtaatcatcttaaggattgatagtcaccatcacttattggcttaaaagttatatttcatggaatattatcagtgttaaatccaagctttgtggagctttaagtgatggtggtgaaaaagttggtgtttatgagagagtggtggggtgtctagtcattagtgaagttaaacatcaacctgttttagaaagaattttttagtcttgcctaaagtaaaccagaagtgtctagtgtttaaatctttatttagaatgcttctcttaaaagtattttttgttttgggtagtattaaataatcagtaaataatctatttcagtagtaaataatgaattaagatgatgatgaatgaggattaacacactggtctggagactggggttttatttcagtgggttagctgtgtgtgacatgttgggcaattactcagctgttttaacagcttccagatatgcagtatggtgcctgtactactcaaaagttgattttggtttaattcatctttaaggtacctcccagctctaaaactatgattctaggctgtgtaatggggttattcctactttattctctttccttttttaagggttcattttatacttaataagcatccatttcttgggtcacctacagtctttgttctcctaaggattaaaatagaaaattcatacataacaagcaaatgatgacattttcctaaatgctccttattggttaaccactgaatatatgaacacatatgaatattgtcattcatgtacttaaattcatttagcaaactatttgaacacttacatgtgcagtgtttggtgaacatgacatgaggaactagtagtaagtaaaatcttccccccaaaattcattgtggcttaaataaatatgaacataat

SEQ ID NO: 32968 - DNA, 1058 bp, Homo sapiens
aaaggatgaagcttactaaacatatatgatggaagtattattcagataacattaatattctgctgaataattttttctagtttaatcatactagaaaaagaaaaaaaatctacaaattgtcctataaaataaggacaaacatgcaaataatttaactctcagaaagtactaattcattctgattatctttcatacctctgtgctcctctgcactgacgaagacataatatgattatacctatgaactagtgcacagccttttctggcaagaaaatagtttgtagcagatacgtggttgctctttggatttttttctattgttgaacatgctgggactagctagaatgcacattcctacttcctttaccaaacgtttgcatgcttcctgcaaagcacttaccaagtgatttctcttgaaccatcggatataattttgtatgtacatgtttgaggaaaaaaatgtaaagcaaaaccttttactgaacagtgttctatagaattatgacactaaaacaaaattgtttgtggaagccctgaaagctttatagtcctggacatcaaaaattttatttgagatgatgaatgttttgttttcatcttttcttatattaccacaattgagatattttagtaattgaaggaacatacacagatatttggcagaagtcgagtaaggaggggaaaaaaagagtccgtgagtttcagtcattttcactgctcttttcaaaaagattgtgttgagctggtagaagactaaagatgtcactgaagacatcacagatactatatttatcttttggctttgtgtacattagagaatgttgattatttttatacaaaaatacagcgggtaatttttttaatctttagatgcctcttgtttgaatgtatgctttgtggaattctttgtgtagtaatgttttaaaaaaagatgtttactgatagttacatgtaggattagaatatgtaatataatataaggctcatgttccagacctacgatagcttgtagtctatgttacgtatttctttatatcacatttttaatcattggatta

SEQ ID NO: 32969 - DNA, 1031 bp, Homo sapiens
ctctgcattaaaaagttatctacaggaataattcttattttcaatttactgcgggttatcttctttaacctttccttgctatggtgaactgccttttgcagagatcagtttgtcctctgtttattgaagggtgaatccacagtagatttgatttttctgtaggcatataaactaggaatcattttttaaaacatgactatttactggtttttgtaatatcagtattgggacttgtttattctgtagtattgagtggcaggtgataccttttcaccaaccttactgtggtcaatttttgtgcagggtgttttattttgagtttagctggagaagtgatgccagacacttgaaagatcagttgggacccatgtgcagaggtccttgcctgtgctgagagctgcactacacttgcttctggtgaggtgaagctagctcagctgactggctgtgtcagttggtgtatgttttgtacacatccccgggatccaggcattttaccaaagtagatgttaatgtcagaaactcagaactttatctcagtataccttgagcacttaaaattgtttttaaaatatatttttctgtaatgagattctggaagcatacttgcttccaatttttctaagtcacttttttttaaatttctatactgatgtaactatactttttttgtggttagcttaagaaagttgtgatctaaaatgcattcctatttgatcgtgctaattcccaaaacactttttgttctatattattttgctaatacatttactgttcacctacaagaggatatttgaagaggaatctcacaatacagaggaacaggaatgtgctacatattttcctcatggagaactccttgtttctattcccaaatgtagctcttatagttctcattacttctcattgctcttgttttctgaatctaagtaagtcccaccctatctttctctctcttcttttctttcctgtgttcttgtaagtaagactgaagagagaagaacattagttctttcataaaaagaaggatg

SEQ ID NO: 32970 - DNA, 1063 bp, Homo sapiens
agtgatcaaatcagagtaactggcatatccatcatctcaaatcattgatcatttcttagtgttgagaacatacaaaatcccctattaaaactaatggaaagcttcatgaatttgaatgtcatttttgggcaggagccatgctaatcttctctgtattgttccagttttagtatatgtgctgcggaagtgagcactggccctaatttttaggaggtagtggaaatgatattttaagatactagaaatcttattgaaacacgttgtagctatccttaaaaactgtggccgggtgcagtggctcatgcctgtaatcctagcactttgggaggccgaggtgggtggataacctaaggtcaggagttcgagaccagcctgaccaacatggagaaaccccgtctctaataaaaatatacaaaattagccgggcgtggtggcgtatgcctgtaatcccagctacttgggaggcttaggcaggagaatcacttgaacccaggaggcggaggttgcagtgagccaaaatcgcgcacttgcactccagtctgggcaacaagagcgaaactcccatcttaaaaaaaaaaaaattgccctgattactaaccaatccatgccattgtttgcatatgtgcaaataactgcccaaagaaatgagggggtctgtcaaagataaaggcttctcctttgggttccttagccacagtttataccattgattgcctaactgcagctcggtgtgaaattcagtaacatggaagcaagaaatggaagcctatgacctaatatgttttcttccttagatcaacctctccacttctcctacacctgcacagttaataagccgttcccaggcttccagttctaccagcggcagtattacccaacagactatgttactagggagtacttcccctaccctaacggcaagccaagctcaaatgtatctccgagctcaaatggtaagatatgagctaccaaattttttcagtgtttaaggacttgagagatcaaaatgtttcttgatttgatacaataagaggtatttttaatatttaagaaatgtttaatt

SEQ ID NO: 32971 - DNA, 1078 bp, Homo sapiens
ctgctttaacatgataaaagcaaattaatatactaaggtaagcattaaagagaaaaatagcatttcctctctgattctaaaattaatatctacatagaaaagttaaaaactttaaaaaaagtaatcccggattttactcctagaaggcattatatatatacacctttaacattttggtgactgttctcacaggtagtggtgcatgggtgtgtgtgtgtttctatattgagtctagtcatatatcatgttatgagtatgtattattgtgtgtatatccaatgcagtcatttttcttaacttttttttttggagacagggtctcgctctgtcacccaggttggagtgcagtgctgcaatctcggctcactgcaacctccgcctcccaggctcaagtgatctcccagctcagccgcctgagtagctgggaccacaggtgtgcaccacaatgcctggctaattttttgtatttttggtagatacagggtttcaccatgttgaccaggctggtctcgaactcctgagctcaagctatccacctgtctcagcttcccaaagtgctgggattactggcatgagccactatgcctggccatctttcttaacatgtttttcacatttgtgatacatatacacacacagacatttgtatgtacctatatgaatgatactctacatgttgttttgctgcctttttactcagcagtggacacaaaaatcttttaatgccactgaatacagatacatcattcttttaatgtgaaatgtttctctatttagggtatacctgattgattctgatcagtgaaacggtagaggcaactctcaaatggactttggctatgggtagtaatcggttggaaactccttttgaggacattaacaggtagttgggagttaagtggctttttctggcagacttgtttctttctggtgactcctagaattagcgtcagtggggagacagcttgcagtaatcgggctcagtaagtgagtttctttgtggagtgtgacttgagatatgaagtgacaggattggtcagggtcttcagtgaaagggaattaggagtgttgggatgga

SEQ ID NO: 32972 - DNA, 1055 bp, Homo sapiens
tcttgccatgttgcccaggctggtctcgaactcctgagctcaagtgatccacctgctttggcctcccagagtgctggggttacaggtgtgagccactgtgcctggcctatcaggtttttttttttctttttttgaaatttttcttttttgagatggagtctcactctgtggcctaggcttgagtgcagtggtgtggtcttggctcactgcaacctctgccagccaggttcaagcgatttctcctgcctcagcctcccaagtagctgggattacaggtgcctgccactatgtccagctaattttttgtatttttagtggagatggggtttcaccatgttggcaggctggtttcgaacttctgacctcgtgattcgcctgcctcgattttttgttgagatggagtctctgtcacccaggctggagtgcagtggcacaatcttggctcaccatgcctggcccgcattgagtatttaattaaggatcacattgaatatttaattaaggatcacatactgcattgaagactcttttttctttttaatataaaaatagacttcattttttttctttcatgacgtttgaagagctcaggtcagcttaccttatggaatttccaatagtctagatttgtgtgattgttttctcaatccttttttactgtattaattgctatttcagtggggtttagtaggagggataagcaaatggtttgtttctttattgtcttctttatttattggttgtaaatatgatttttaatgagtatataatgttctaccatttttaaaaactacttttctcttgctggtggttttaatttttctgtctttttgctaatataagtaaacctgcattgactattttattatatatatttgtatatatttttagttattattttcttcttaaaaatttcctgagagtatattcagtgggtcagtgagattgtttttagatcaagaaccttaaaactgttcagttttctcaaaaatgtccaaatcacatcagccacatatcagagtccatttgatatatttatactatataggggatgt

SEQ ID NO: 32973 - DNA, 1025 bp, Homo sapiens
tatcattcttctggggtaactgcctgttttttctttccagaatctttgagatatgcctgtttgctttagttttttattttgtagtttcatggcaatgtgtctagatgtcattgtgtaggacacctgttgggccctcttagtgtgaaactaggtttttaatgatcatgtatgtgaaactaaacaaatctgcaagaagttaattttgttctttaatgatcatatatgtgaaactgaacaaatccacgagaaattaattttctgttttctctttctggagctcttggttgaatgttgacctttctggattgatcctttatcttgtttaccttttcacttactgcctttttttgtgtgtgggatatttccttaactttttcttttagccctttctttgacttttaaaaaatttttagttcagccactatttataatttctcagagcattttcttgttttctcattgttctttcaaactaatattccgtttttctattatggataaaatactttggatctctgttatgctatttatcagatttttttttttttttttttttttgagaccgagtctcgctctgtcttccaggctggagtgcagtggcgtgatctcggctcactgcaagctccgcctcccaggttcacgcccgttctcctgcctcagcctcctgaatagctgggactgcaggcgcctgccaccacgccctgctaattttttgtatttttagtggatacgcggtttcaccatgttagccaggatggtctcgatctcctgaccttgtgatctgcccgccttggcctcccaaagtgctgggattacaggtgtgagccaccacgcccggcccagattttattttacttttattttcactttttttttttttttcaagacaggttctcactttgttgtccatgctggagtgcagtggtgctaatatggcttattgcaactgccacctcccaggctcaagtgatcctccctgctcagcccttcaagtagctgagattatagtcgtgtgccaccacacc

SEQ ID NO: 32974 - DNA, 1263 bp, Homo sapiens
aaactacaatcataagtctctgagtgacttaagggctatgtatatgtcattctctttccttgttgcattttggcccataactacatgaatccctgatattttggcttcgactcactgtactattctgtcagaaagggaaaaaacttttttttttttatgactttctagttatgatgctagacaagatgagcttttgaagcccagttttatgactttgttcattcatgcattcactcattcagtcatcaaatatttatcgagcgtttaatattcgccaaatcctcttctaggtgctgaggatacagtaccacaacaaacaaatctctttcctcatggagctagggatagacgaacattaaacaagtacgtagtatgtcagatgatggtaagtgaaagagaaaaataaagcaaggaaataaaaaaggagaaaaataaagcaatgggggaatatgccattttaattaggatggtcagggaaagccttgttaataaaggtggcctttttaagaatggtgaggagggcagacatgcacagggaacagaaaggaggacagtgtggctggagtggaatgtgagagtgggagtgtggtttaaagatgacatcagagaggtaattgtaatcctaatcatgaggaaattataagacctttgggttttagtaagtatgagttgggaagctgttggagagctgttctggtatggaagtgacatgatctcaaattggtttttgagagtaggttctaggggtcaaagacagaagcatggagttaaatgttcttgtaataattcaaatggagagatattggcaatttggatcatgatggtgatattagaggtggagaaaagtagttagctagattgtaaattttttttaacctttaattatagaaatttggatatgttttgaaaggagagctaacacaagatatgcggatgcactgaataaaagatgtgaggagtcaaggatgactccatagtattttggctcaagcatctggaaaaattgggagctaaaggaggtattggagaagaaaattaggagtttgattttggacatgttaagttgatgatgtgtattagacacccacctatagtattgagtaggcattggttatatgagtttggagttcatgtgggaggtttcatgattaatgatgtctcatgtggctccttcaacattcatgtcacaagagtacttgatgacttcactactgttcatggtgtgatgagagaaagttgagtagaatggaagagatgagggac

SEQ ID NO: 32975 - DNA, 1079 bp, Homo sapiens
tccatttgcactgatcatgttcagatcttatgtggtttcagctttctgtgtgtattgaaagcctaaaatatacaatgcagggatattggccatgaatttactgtgatatacaatagtatgtcatgtccttggtagacatctaagcatttctaactttgtgcaattcacattttagaaattatactttcagcttacatgagttatttgggttcaatttgcaagtatccattcaagatagggtaatttattttgagaaaggagtaaaagaaagctgattcgctatattgcacatatatattgggaaattgtgccaagtttcccaggtaaaataaatttatgggcatggtaatacttgtttagcttttaattttggtataattttaaactgcaataataataaaaaaatttctgtatctactctactcagattaatcaattattgcatattgccccattactttatcattcattcttttccactacatgtatacatatttttttctgagtcatttgtaagttgagatatgttcctttattcctaaatactttgatgtgtatttcctaagaacaaggctattgttttttgaagccacagaaaaattactaaattcaggaaatataacattgatacagtgcagttcattttcacatttcatcatttgtctcaggtttcccaacctcatcactatggacattatgagccagataattctttgttgtcaggggctatcgtgtaatttataggatgtttagcagcatccctggctactagatgccggcagcttgtggtctttctccttcctctagtgtgacaactataggtgtttcctggtggggggcaaactgcctgtagttgagaacctaataatgtcctttctagatattttttcctggtccagaatggtaatactttgatacttcataaaattggctccaatacaatatagtttgtaggttgttaaggaattgaaggttaaggaattgtgctctatttcttcagctaagggtatggtctttgctaactacatgctgtggtcagcatatagctgtggttttttttgttgtttggtttttttttc

SEQ ID NO: 32976 - DNA, 1027 bp, Homo sapiens
gccccgcgggcagccttgttacggctgcctgcgcaggggcccgcggaggctgggtagggcagggcgggcactgccaggcctccttcgccttcttctccttcccgccccggcgccaccccactcctcctcagcgggagaatccgacacgcggggctgcccgcttccctcgtgccggaggcatcccggcgtgggcctgagagcggcgggggctgcttgcaggtctggtgaggctgaaaacaccctgaaagaaaggtctttccctcgattctctgggtgcagcgttgctgcctcacacgcgggccacattcttgtgtgtcggtgtgacggtatgtttagttaacgactccagaacttactgtttcctgggtaggcctcttgtgcaccagaactgctggctgtattttgcaggtattagtatgcctagacggtggagttaccaaagttgttcttttgtgccaggcctcgaaatgcagtgcgatggtttggccagttccgctcaaccgatgtttagacttatgccgagaatttggattctctgtgaccatttttggttaggagttagaactgtttaccatactgtttggattggagggcatagttgagcagattaacacttttaaaaaaccagaacttaagctggccttttgcatgtcactggtacacgatacggtagtagtatgacaggcagcagttcggtaaaaagtttaccttacctaccactaatactgtataatgttgaacagttaccatatgatgctgtgatttgattggaaggcagtttggaaaaaaaaaaaaaaaacagaagcataaaaatgtatgaattatttactaatccaaaaagtaagtgaggagtcagctttcttcctgacggttttcctttcacttttcctcttattttctttttctttctttgtgacagcgtctctcactcttatctcccaggctggagtgcagtggcacgatcatagctcactgcagcctggccctcttgggctcaagcgatttccccaccttagcctctcaagtt

SEQ ID NO: 32977 - DNA, 1038 bp, Homo sapiens
aagctagccaatgcaggactgaagtccatgttttcatcttgagggcaatgggagcttgtaatgaaagtaacgtgacctgatgagatatgcattttgaaaaagatcagactgtattgtggagaatggatttgttgttgttttgttttttgagatggagtctcacttcgttgcccaggctggagttcagtggcatgatcatggctcactgcaacctccacctcctaggctcaagtgataatcctgcctcagtctcccgagtagctgggattacaggtgcctatcccacgcccagctaacttttgtattttttttagtagagatgagatttcaccatgttggctaggctggtcttgaaatcctgacctcaagtgatccacctgtctcggcctcccaaagtgctgggattacaggtgtgagccaccgcaccagacctgttctcagtattttacatgaattgaatcatttatcatcataacattcttttgagataagtattaatatccacattggcagctagggaaactgaggaacatagagttaagtaattcgtccaaagtcacacagtaagttatgcaacccaaagttgagaaagagggtagctttgggaaatcggacagggacaatgcaaattttaaggttaaattgcatttaggaagtaatgaacagtgaggatgggtgaaattgcctgacagaaatgtcatgatctgatctagtttagattacagtgaagtatttcgttagtctatgacaagaaggaatgagaatgcagagaatctcttaatcagactatgcattttgagaatgtgacttcacagtcgtgaagctgactttattctgaagggctgaatattctgaaagagagcaaatgagaatcaagtattgacaaacaccaattgcttcctccattcttttcctagagtgatctttcaaaaacacatctgatattcacatgtttaaaattcttgaaagctaatttagcatttaatatttattatgtgccagggactgggtatattatgtcaagtaagatattcatgc

SEQ ID NO: 32978 - DNA, 1408 bp, Homo sapiens
gaaatagattgagaaacaaaattaaattcagaaattagaactaagaaggcacctgtccaggcactgtggctcacgccggtaatcccagcactttgggaggccgaggcaggcggatcacgagatcaggagttcgagaccaccagggaggtggaggttgcagtgagccaagattgcgccactgcactccagcctggcgacagagccagactccatctcaaaaaaaaaaaaaaagaaggcacctgtagggataatataccttctccagccttctgttgtatatcagtagtacaaatgcaggcaaaatagtttcccaataattcccccttttcagtgttctttcctattctgactacatctaagacagaatctgcagtcattaactctccccacactcccttttagatcatgttttgcttccttagcttactgtgcctcccagcacttagtggttacagtgcttattctagaattcatatatactatagcattttttgtttcactttttattgtggaaattttcaaagtatagtataatgaatcctgtgtacctgtcactcagcttcaacaattaccagtgtgattaattctgtctctgcaattttttgacaaagacactggatcatttcttctgtagactttcccactgtatggattttgctaattgcatttccttgttttttaacatgttcctctgtcccttgtgtttcctgaaacttggtagtaagatatagagtcttaatcagattcagttcagatttttattttcttcctttctttcctttagcaggactactccataatgttctatgcaatcattagataaataagtctgattgtttctccttttgtgatattatcagatatgtgaatactgcctcaacatattaattggaggagaaaaaatttatgatctgtcattccttcatttgtttctcttagccagaatacttctataaaaagaaacttcccttcatcaatttttgtttgtttgtttgccttaagagacagtaccagtgtctgtgcgtgtagcgggggtgggtgtatttgactctttccctttaaggtacagtttataaaataaattggttcctagcatccactaaagatgatgaaatacatatttttttcattataaactcgagcatttaaacatatttgtgtttcaatccattgttgttagtgtccttatttattctcacattgttccatcttggccagtgggagcttattcaagttagctcttgagtccctttgacatgggcctaattttaattctccttgatagctccttgctttttagtacaacagcttctccaggttcatcttacacacttcctgatctggacctggaattatgcaaggagccctagaatattttagtaggaaataaaaaataccccattctttt

SEQ ID NO: 32979 - DNA, 1213 bp, Homo sapiens
tgtctttctctgccccagagacatcataaatctggtgtatttcttgtttcttagatggaagtttccagtaattctttggactttcataagatccaagaggccagagatatttttaaatatataagaaacaatgaaaataaaagaaaaaaatgattaaagttgcaattaatatgcctagagagaaataagccttgataactttcctatttttagaaaacccactttaaaagagaggcagatgctaaaataggagaacaacaagtatcgcattaacaaccaaaatccttcttccagaagccatgttgtaccaacctcaacctgtggtgtgtggttctcaaatcccctgagctcctaaaccagagaaattctgtgtcatgcaaatgaggcactcctgatagagtgaagctcactatgagcagtcagtcatcactttttgagccctggcactgtgctctgtgctacaggacacaggaaacatcagtctgtgttctcaaggagtatgctgagatcctgttaccttctctcattatactgtaaacatgatagcaagaaaagaactgaaaataaatataccaccatgcaggatgattacagaggctgagtgctgtttaagttaaacctcctagtttatggatgccccaataagccagaatgttcttagtagatatttcttctttatagaagcataaagcccatggatctaataatcattttttgcattcctagtatgtgacaactctaggctgggtactgggtaataataatgaacaaagagacaaggactctgccatcacaagcaatgagagggaaggagaaagggagaattcaaaagataagataattgcaaattgtgatgagaactatgaaggaaaaagggtgaagagaaaagaagaggggctgttgggacaagacataggtgataagagcagacttctcacagaaagcatcatgtaggatgaatgagagggaaccaaccaaggccagagtggaaagaactttccaggcagagggaacagcatgtgtaaaagcaggtcaggttgtctgctgcccaaagaaggagggcaggggtcaggggagatcatgcagagcctggtgactcctggtgccaacttcagtgttttttccaggtaaagccaaacacttgctcagtctggctactgggcagagaataggtcaagaggggatgctgcaaaagtggggccagtccagacat

SEQ ID NO: 32980 - DNA, 1072 bp, Homo sapiens
tgcttggcactgaaaataccaacattaatgagatctgatcattgcaggactgtgtattgaatgcagtggtagagatgcacaaagggcaatgtggaggcagagtgaagagccacctaaaccattccagtgaggcttaaagaatgagttagccagagggaggcagagaatagaaaagaatcttccaggtaaagagggcaggctaaagtcaccagggattttctagcataatgtacataggaaacttttataagttaaatgctggtagagttaggagttggggcaggattttgttaaaaaaaattaggttagtgagacaggcaagaactagataatggagagcttgtaagccacagtaaggagcttcaagtttatcctgtggttgacagggagctactgaagattgaaagtagaagagtgattcggacttggtcagatttgtgttttggagggctcactttcacagctgtgaggagtggatatgagggggaaaggactgaagacggggtggccaccaagaaaactgttattcaggtaacagaggaagcaggtctgactaggacaggagaacttgattgtacaagcatcagcctggcagatgccaccaggccaactgagcccctgacaatagcaaagaacccctttctgataaataagaaaagtggctgccctcatggaagactcttgataagtacttcattgatttattggctttatatcattttgtcccaaacaagtacttacggcacaaaggaagaaagaagagcaagaaaaaaaaatggaagatacacacaagataaacaaatgagtgaagaaatgatattttgaaaactgatttaccaatctatcaaaatgccaggaattcaatttttttttccatgtctctgaacactattaaaagctcctttctaggaatgacatgttgaaaatgaaaatgcctctttggaatttcttcccaaacacatcagttctagcccacatttagattcattcaatccactgctccagtttagtaattgcaatggaagcttcttactatacattttctcgtctggactccccctgtcattttttc

SEQ ID NO: 32981 - DNA, 1088 bp, Homo sapiens
tcttagtaggaataaaaatcagtgcaaggatctttacattcttgatcttttaatgcttctcatcagcagtgtatgaactttttatgtaaagcattatttacagatgtcttttctcatattaggaaggcaggggctcaaagtgaccaagtagtaatacacgtttcaaaactttaaatatgaacatagcttatcagtatcttaactatcaagttataagaaaacctgggttaaaccctctggaagtaaaataaaaggatgccattttctttttttcaaatgcaccctctgtgcccatgccaccgtctcctgttgtgtagggtctggactattttgccccatgtgccactgaaggtatcacctagctctcttccacctactgcaacctcttctgtaatctgttccagcatttgttttgtaactcagctctatgccgtctcatcaagtttttttttcttcttctttgcttacttttccatctacttctcctcttcctcattccaaatcgatagtcctttatcagcaatgtaatgctcttatactgctttgttctctctgttcttgtttcttcattttgtaaaacacaagtgatcactgcatttctgagtacctttctgattaatatgttggatattgtagagcaagtgaaaatgctcagtcatttgcaaatcttgttgagctcttctctccctccttttactgagtattctttctgtcctggatgtcacattggccttgatttaaaagaatatgaatgtctctgcattaaaaagacagcttggagccaggcacggtggctcacgtctataatcccagcactttgggaggcaaaagcaggaggatctctggaacccaggagtagttagagaccagcctgggcaacacagtgaaaccgtgtctctacagataataataaaaattagctgggcatggtggtgcatgcctatggtcccagctacaccaaaggctgagggtgggacttgagcctgggaggttgagactgcagtgagtcatgattgcaccactgcactccagcctgggcaaagagtgagaccctgtttcaaataaatacataaataaatagacaggtt

SEQ ID NO: 32982 - DNA, 1044 bp, Homo sapiens
atgtgttttaataaggttccaccagattttcaaagtctttggttaaattggaactgacatttatgctaattagctgggtttgggagtgaaacaggtaaaattgaattacaatgggctccaaactatatttatttttaaaatagtggctctgagggatatttggttctatttgtcagttatttcatatctcgctactttctatcattcccttcccgcctggtgtgttaatctggtaatctgaaatctttttgtctgcctgtaacataataggctgttttcctgtagtccatctgtctcctacacgaggtgaaagtacttttcagaaatggcttgggttgatattattaatctttataagcagagaattccttgaataatttaacagccaaatggcatgagggggacttggtataaaaatgaattttcctgtcagctttaaaaattacagcgtggcctgccttttatctgtgcaactcaaatatcaaaacaatggatgtttatgctctttatacagttttctgttttgcattacctaagacctaagacgatgaagaaacatttagacaattttggtttacttttttttttctgctagaaaaccgcaataagttaattagccaaaagaaagtccttcttgttctctgaaacaacagatgctgcctttgaccttggaatttaagggaaaatctatttttgattacatgtcttgaatttcttggatttgccagtgttagggcagcagttgtgattgagtgcttttgaaagtatatgcatgattttcaaagaaatcagtctgcacagctgttgctaaagaaatcgttgttctccgtccttccagttcattactatataaggttttaaaaattattttttccccctacttttaattggagttatcctagttacagatgtcacagcctctgagctactggtcttccacccgacaccctgcttcgttgcaaaggcctaaggttggagtatgctgcatttgattggcagggtaacattgttcctctatgctgggatggggaaatacagccagtc

SEQ ID NO: 32983 - DNA, 1503 bp, Homo sapiens
ttccatcctttcagaattttgttcttggaggagaacagcttacttatttccaaatttgtaggctttttttttttccctcccaaataccaagagtcctcaggtcattgtgttgaaacagacagaggagtgacttttggaccacagaagagtttgagagattgtttcaattggactgcctgttttcttgtttttctgttttccaggacaactttggaagaagctgactgctttgaaatcaattcggtacacttcaaaaattaacttgctccataggcatttgtggtacaccagttaaacacagagttctgtgttaggcactaaaagaatatccttagaaagctagctgataggtagccttgtgggagaaaggagtaaagtccacgagtaagtataatcaacaaggcacgatgcagggcacttcagaagacttgagttgtgtgccatgggatcaggcagtaccctacttcagtctgtagatttgttcactaacttgaaatgggagtaaattaaaattcaaactgcactcatcctgtttatgtattcggtttactgataatcacaggttagtaattcagatctcaatggctgagatgtttgggctaagtattgtcaagggattgtcatatctgctttagaactggtttacaatactacactcattttatttacattacaaaagtaatgaatgcttattgtggaaatgtagaaatatgtagaaaaatgaaaatgaaaatccttaatcactcatagtccaactgcctagagactattgctggcctttttgttaaaaatacattttcccatggttaggatcatacttcatgtaaagtattgtaactttaaaaatattagcatttttttcatgtcatcaaatattctttataatattttaatggtagaatcgaagtagattgtatgtatctactgtcctttacatgacagttttatcatgcattccaatttcttgctgttatatctttgaacataaatctctatgaatttttcataatttgtgtatataattatatggacactatttctagatataactaggctcaaaccaattaacacagcctaataaggcagaggcagactgggaggggctggaaaccggcccatgagctggtgtatgccaacaaacacaccttgcaggtgctgccagaaggcctcgtctggcagccaaggcacacaatctgaaaattacagcaacagaccggattctggtagcacttggcatcaggacatccagagagcttgtggagtttcccaagaagtctgcttagatgtcttaagactgagaaaagagggaggaagtctagtgagaagcagcctggccatcagccagcctgggattcagctgaaggacctcggtctgttcaacccacaagcattgaggggctactgtgtaccagcactgtgctgggagcttgggatacttccacaaacagacgcagatctctgccttcatggaatgcatattctaatgacgaaaagcttccatgg

SEQ ID NO: 32984 - DNA, 1048 bp, Homo sapiens
tttaagggagttggttgcctcgtttctcagaaaggaggaagaaatttctagacttcttaaaaaatcagctccaatagccaggtgcattatgatttttttttccccccagaaaaactctatattcagactggagcttgataaatgtttgttgaaatgaattgaattgatttattcgctcagcttcagttgtgtgattttgtgagcaaatggatgaatcttactgctctggagaccacgcaaatatttgccaggtgtataatttgtacttttcctctattccaagcagggggaaggccagttacctgttacctggtgtggcattgtagcaagttgcttactctttgcttttatatttcctcctttacagggatgcctaggtttgtgtgtttggggttgagggtggggagagacaatgaaatagaggatggaaagaaagaatttctgggtattgtagaggaggatgacctggctacaataccgagatgtaatctcttggataatttgcatgactgcaagttaggaatacctgtgactctctatttccgtttccattaaggatcacattattcacttttttccttacaggttttagttatataacatcagtaacccaggaatgctagagatgcctctatcagatactttcatgacaagttttagccagagttatctcattctttctctttgtcaaaatagtgaaagttagtgaaaacaggacagtgtgtcctcttctttgggtggaggcaaagctgattttatattctcttcaaaagagttgcaaattaggcagattctgatttctccccagctaacacttctggtgatttcagctggagaaaatgaatgttttgtggcctaaatgtttagtacattttgttctaccattttgtacccacttgtgaacttatgaagagacacttcaaatacttcagaacttcaaaacctttccattccctcaagaaacctatcacagaagccaatcaccaaagcctccctcctgctccatatgaatatgcccctctgagagtgcttcagggaggaggtgcct

SEQ ID NO: 32985 - DNA, 1068 bp, Homo sapiens
tttatagataaacatgtggcatggtccttgccctccaagggtttgaagtctctgggtggagagacatgaaaatagatcacttcaatgttgtattccatgcaccacagcaagagtatacagagcagagccaaatctgtgggggctgtgggaagaccaggaaagccttcatataaaggtgactcttgagtggagtcttaaaagatgaatagatgtatgtggaaggggaattaagtaggtactctagggagaggtagtgttaccaaaggcttgactgcttttgatggcctgggccagggtcaataacctgaggtgaagtagggctgggaagcctttaagacagacatggacagatggctcttctggccttgagtcttggccttgagactcattagctgtgtgagcttaagcaagtcatttagcttttctgggccttggtttcatgtataacgaagaggtctggctagagggtctccagagttccttctagatatgacatcctttaattctaagtagagcactagtctggataacctccacaagttgcttccatgaatccacttacagcctgtgcttttccaactgcaaaactgttacagcaatactctaaaccattagcaaaatgatttatacggaatgcctaacattattaaggtacccatgtggcctggtggcattgcttggtgtagttgatgtgttgaaggatgtagacacatgcacattttataccattctctcattaattcagagccgcaaggttttagcaggttctcactgcctcagtgaatgatgatacaaaatttctaatagtgatgaaaagaggatgagattttctgttagggatggacatggattggcactcgtgtgctcaattttgatttgaagtatttagaatgctttagtccaaaatactttcattccacctcatattgtatcaatgagttgccaaataacttgatgcacaaccccctcatgacttgtagtttttagatctcataacacccttaatgacttcgtgattataaggcactttcaagtaattaaaccatcaatagttactattctgggtta

SEQ ID NO: 32986 - DNA, 1002 bp, Homo sapiens
atttaacagtgagaaatgtgttacttcttttttattatttcacttgaaaaagcatctccttttgcctgatttaaacacatttcatagaaatgtaaaatggaaagaaaatagaacttggctaatttcatagctgcagctgacttaaattttaaaattttgatagtattaaatgttaacacatgagagcccctgaagctaaagttgttatttatttgcttaatttaaataagtatttgcttttgattaaggcaatgcctggaatattgttttgaatttttattgtttgtttattttctttcaggaccccgcagggatctttgaattggtggaacttgttggaaatggaacatacgggcaagtttataaggtaagtacattgagtctgagagtggcttatgtacggtttcagttcatgaatgacaaattgcagtgctgtctatactggctcataaatggctcctaacaaatttaaaatgaattaatatacttgttgattgactctccatcttttaaaatatatctgtggttatgttgcttaaactggattctgtgatttgggtatttcccttcattatatattactgtgtttgtatgtgacacatgaattctgatggcacatatttgaagctcttcaagcgttcagtttcctttacttaatcactgccagaactggtttttgaaagagaaaagaatgccatctacttcagaaatttaagctattaaactattacagctggaaaagtagatgtgttattggcctaggacatgaattaaatgagtggagtgaacagtgttggaagaaaactgggttacctcacaaagcaaaagcttaatagcagcgacgaattttaggaaataattaaaagttaaacttgagttgagactgagctgtggaataagaagtcttgcttgcctgtgtactaatttctgcttacaaattcactcaaaaagtgtttttaaaaggtattttccccaagtataatctacgaaaaatggctggtt

SEQ ID NO: 32987 - DNA, 1158 bp, Homo sapiens
aaacaccaaacagttcaacttaaccaaacatttattggatataaagtgtagtcatttcctcatttagtgagagtctttatgtattagactccccgttggatgttttctatgtttcccctcattctcatcatatctctgctgggtagattttatcaatactttggtaccattaatatgcattgggataacttgggaatcttattaaaatgttaatcctgatgcagtaggtctgggcagggcccagatttctgcatttgtaacaaggttcccagatgagttggatggtcatgggtgcagtctgagtagcatgctgtttataggtgaagagactttggctctaagagattaagtgatttttcaaagataacacaactggaagtggtaaagccttattcaaatgctgatcttgctccctggagagttgccttccaagtgcagtaagacagatacattcaaagcgatctttggaatgtactttaatgtggaatttactctaatggagtgtaatgggaggaccttaggtaggaactatgatttgaatctgatctcaaaagactggtaaggctttgactgacaaagatgggacaaaaggactttttggatagcaagaacaaaaagggaacaaggacacagaatgcgggagtgtacagaacatcttctgggaatggtgagctggaggctgtagctgatgcctggggagaggtgtgctgtagctttaaagggaggctgaggttggatgggagagcagagtagaccggggaaccactgggagatttggaggacagtgtctgtgatagcacattgtaggtgctcaggaaatgtgcactggttgattgaatgtaatctagtttttagtcatctgttgcccatgttgcaccattgagatctccacagaattctgtggcctggctgaaacgccacagaattaccccaagatgacctttactgttgtttatatagagctttcttaatagtctctttgcctttggcaatataggacatattactttttcctccctttccaaatttttttttggctaagaaaatgctgcttttgcacagaccaataatacacattcttcttaaaagaagcattgttccttcagtagcaacttgtaatgggaaaagtggaacaaagacaaaatgcaattctggtct

SEQ ID NO: 32988 - DNA, 1033 bp, Homo sapiens
ctataatcccagctactagggaggctgaggtacaagaatcacttgaacccaggaggtggtggttgtagcgagctgagctcatgcttctgcactccagcctgggtgtcagagtgagactctgtctcaaaaaaaaaaaaaaaaaaaaaaaaaaggaaaaagaaaagaaaacagatattcttaataataataagtgtaaaatatctagaaattaatgtaataagaaatctgcaggacttatatgaagaaaaaattaaaacctaacaagggacatactaaaggcctgaattaatgcaaaaatatctcatgtttctgaataggaaaatttagtaatattattcccatattaatatggaatttcaataaaaatatcaagcaggaatttgttttaggatctgaaaaaattattttaaattttatttggaaatatcagataagaatagctttttaatctgctgttataatttgtgtttttgttgcacacgtgtatgtgcatgtgtgtgtatgtctgtgtgtgtgttctgtgtctgtgatgcaatatttgccgcataaaagttttaacagttatacacagtagattttgatttttattaatataagcactctgtttcaggtaatgacttttcctaagaattacatctggtttcataaggtgttttgtttgttttactttgtgtttgctcaattatgtatgattttccttttctttctataatttgtcttgatttgtttttgctgtatcacttgaaagcagcatatatagtaagatttactttttgaacccaatgtaagaggtttcttttaaaggaggaatttaaaccatttggttttacagccataaatgatgtgtttgatctcttctcattttatttattctactttctttagtgttttctttgtttttctatatagactgttttcaaaaatccaatttgaatatatacttaaacctgtagttctctaattatgcaaattaattaaaaaaggaatcctttaatgtccccattacataaaaaagagtcaagttaaattttat

SEQ ID NO: 32989 - DNA, 1086 bp, Homo sapiens
atacagagatccgagccccagatacagggtttgctttctagattgaaagagtctgttgaaggggtttgaaggctgggtgtccctctgtgatctctgaaccaaagctcttgccagttcagtcccccaaccccctttaattagtgtgtatgtttgcaaagagtacctgggggtattcaaagcagcagggacattcctgtgactattaagttctctgtccctttgaggccaggtctgtttcttttcttttctggaagcaaggtctcttgtatctcatcacttgatacaatgcaagttgcatcagatttaaaaaaataatcccctgtccttctttcctgtttcctccgtgtggctgctgccttctataagttgctgctggtttgcaggattcacaatcaggattttgtccctgtggagattttgtttagtttgcaaggaacatttttatttgagttgcatggttccttaataactcccctttgacaaatattctggttaaaatttctatgatcattatatttacttggttgtttagtatcgcatttttatactgaattatttcaaccatgttttcaaatggacagctctcaaaattttttaagtacatttaagtgaaacttggaatgtgcataagttgtgagatcatgtgaactctgcacttcacagacttgataaagtcaaacctttatccaggggatgcttcctccacaatacatgtaaatctgaatttaaaaatatacctaagaatatgcagaaactggaactctcatacattgccggtgggtctatgaaataactcagccactttgaaaaacagtttggctatttctgaaaaagttaaacttactacacgacctagcaagtccacttctgcgtatgtacccaagagaaatgaaaacataggtccacacagaaacttgtacaggagtgttcatgaggagcatcattcacagtggcccaaaaatggaaaccacccaaatgtctatcaactgatggataggtaaacaaagtgtagtgttttcatacaatagaatactattaggcaataaaaatgaaggaagtactgaatcaggctgcagcatgcatgaa

SEQ ID NO: 32990 - DNA, 1039 bp, Homo sapiens
gtcacttgtacacttcaaaagagtaagtcttatggaatgtgaattaaagctcaataaaactcttattaaaaagtagataaaagggttaataatctctctactgaacaattatcccccataatgaatcctgtttcatctgtactcctacccaccttctcccccatattattttaaagtagcatattatttcatttataaatatttcagtagtttgtgtacttaaaaaatacataaccataatagtattatcatgcctaaaaaatttaacgtgtaataaaatattcagtcagtgctcaactttctaatcatgtttttagactgcttagcattttgttgtggagatggatcataatatatttaaccagttcctgttgatgaagcttgaggttatttctaactttccaactgataaatagtgcttcaataaacatccttatatataagtctttgtgtgcatctctgtttccttaggataactccttagaaattgaatttagaatgaaagtgtatgaatgatctctaaggctctagatattgccagattggcttccaatttcttgtgctgtaggtgtgtagcatttataaatgaacacataagactctgaaaaatcaattagtttaccaaagatcgtagagctactaagtggctgagcttacgactgactggcccaaagccactgccaatagtgactcacatagccatcatttgatttatggaccttgtcatgacatcagaattatctgttgtattatcaccctgaggctcacagacttcccagaagcctttggtttagggcacaagttgtctttcatgagcatagtggtgttttaagagctatttccaaggtatttcttccttgtaactttgttttgtaagatgaccaatgtcagattataacgtgtttttttttttttcttgcctaaaaccttaaaaacctaatatggtagctatttggggattaacagtgacattcttgtggagtgtatctaggggatgtttgtttgtttatttatttatttatttgtttgtttgagatgg

SEQ ID NO: 32991 - DNA, 1040 bp, Homo sapiens
tggtctcaaactcctggctttaagtgatcctcctgccttggcctctcaaagcactgggattacagacgtgagccaattaaatactagtccttaactgaattaggactagaccaggtcaaaccctccagcttccatttaagtttttaaaatcaaattaattccagtaatacaaggatataataaaaattattgaaggggtatgccagtgactgctggtgtaaaatttaaatgtggaaacttctgttttcaggtctaaaatgactccaggtgtcgaagatccctgatctttggcaagaagatgcaaattttaaactaatctgtggtgaagcagagagaatactgggctaggaagctgggctcgtttcagctgtgcgatcctaaataagtccattcaataaagtgttatttagaactttcaagggctgcgctgtaactgtccacgtcccctgttgtgttttctcaacacagtggtccctctagaaccttctagatcatgttgcttctctgctcactactgtccaatggcttcttatctcacaaggaacaagtaatataatctcgtctcctttcactgtttcccttgctccctgcagacactcatttccccaccggctgtggaacaccctgactactctcccaactctaggcctttgtaggaagtccacagttttatgattctagaactatatttgccataatgcaattttggtgaggactgtatagtgggatgcagcaggtggccccgatatagttaagatcagtgcgttatgccctttcgggaagggcactgcgctgcagcctgttgttttctttgtgttaaatggtcccttttggaaactggctcacttgcagatgggcgcttagtgagcacttaactcccggcaaaggcagaggccacttcgctcattcctaccaatccagacttcggcttccaagaccaacataagcctcagttgtagagacattctgctgtctctgtctaagtagctcaaaaaatccatccctcaaaatctatcaataccttctaacaacttttattg

SEQ ID NO: 32992 - DNA, 1078 bp, Homo sapiens
caggcttaaaatatgtaacaattgtatgtttcacttggttagaaaaaatgaaagtgttttctcccaaagaatgatttattaggttgcgtaatttatatatattatttattcattcaccaaatttctatcaagtacccactaaagatgtaattttgcaacaccaacaactgtgagggaagagctgttaaaggagcagagatttgtatgttactgaagttaaactggtataaatacaaattagaatgttacaactttaagatgttacatttaactgcaaagaaaatagcaatcaaatatatagctatttaacaaaaagaaatgagaaaggaatttaaacatgtcactacaaaaaatcaaccaaacaaaacaagacagtaatgcaggaaatgagagacaaaaaagctataagacatgtagtagaaaatagtagcaaaattacagaagtatcttacaaataattactttaaatgtaaatgtattgacccctctaatcaaaaaacagagattggtagactggattttaagaaaccatgatccaactatatggtatctacaagagactcactctagctgcaaagacacaaataggttgaaaatgaaaggatggaaagggtatttcacacaaatagtaaccaaaaaagagcaagagtggctaaactagtatcagacaaaatagactttaaatcaaaacatgcttacaagagacaaagaaggacattatatattaataaaaggttcaatacagcaagatataaaaattatacatatttatgtacctaataacagataatcgaaatatatgattgaaaggagaaaaagacagtctatgataatagttggagacttcaacatctcactctcagtaatggttagagcaaccagacagaagataagtaagaaaacagaggacttgaacgtacagtaaaccaactggatccaatgggcatacagaacattctacccaacaacagcaggatacacattcttctcaagtgcacttggggcattttccaggaccatctgttaggctgctaagtaagtcctaatagattttaaaaggtagatatacaaacatctg

SEQ ID NO: 32993 - DNA, 1027 bp, Homo sapiens
ttcagaggcctggataactgagaatgcatggtttatcgtatgtatgtatgcatttgtatgaattgtatggttatgggggctgtatgcatctatattatatatgtgcagaactctagagttggtgcaattgtgatttgtccgctagtttagagaatggcatcacataaacacataaactgaaacagtaaagactttagtgtattttggagaggatgcaagagcatttggctctgcgagtttctcatgacaggagctgccttcctgctgccttgcagcacatggtttggagtctggtccaaatatacatccagctgtcccattacacacaggtgacctggatccaggtcactacctgcctccagcagcagcttgcactggggcattcaatggacttgagggagcttctatgtcttcataaacctggagaagggttttctcaggaaaacaggaatttgggttgcaccagaggatctcaagagaaggatgatgggaggcaggggtttcttttcttctaggactcaggaacttgtattgttgaaataacaatgaataaggatactactactattgttaataaaaatgatacctcctgttgtgttgtctgaaatccgacatgctattttctttaacagacaactatttaaatgtgtattagtatccatatgcaataattttccatttcttttacttttctgcctgcctgtgactttacttttactatttcttttggctgtaaccattcttggtgagttcattcttctcttttcatgtacttttctacatttgggattctactgttgactaaagaatgtttagatttaaaaagtgttctttttaatgacttttccagtcataaaaatattttcaaagttaggccatgttgtatttagaaatcccagagtgacctgtaaacatttcctttggaagggaaagcctcattagcaactgactgtgaatagattctcctctcattttcttttttttttcttttttgggatggagtcttgctctgtttcccaggctggag

SEQ ID NO: 32994 - DNA, 1047 bp, Homo sapiens
ttttaaacctaattttgcagtgctgtagaaacacagcatctactgaggggtgaagtaggcctggctacaactcctctcatccactcattgatccccaggctggtttagcttttctggaactagttaggcagtcccttctttccccaagccatacagtgcattttctcagaagaggaagagcgttcttggttaggccttgacattatgaagaagctgttctccctgctagaatctccttgggcttattgtgagtcaaagattgaactcattgttgtgggttttgagatctactcttttaaaataatattttccatacataagtttccgtgtttgtaatagcccatcttaaatatatgtaaaatctcattcctaaactatagatggagcagttagggcctgagaagagtctgacggagtacagacaggcacagcactgggacagaaaactccagaggaggggcacttctgcctgctctgcttccaagatgggtgctgcagagtgtggacaattaattttttttactagaaaatgaacaagtgtttgttaatttctgtcagttctgttttgtaatctgaaatgtttatgttccagagggaatgtttgatttctcctttgtagttgtcatcttgtttaaaatctttgtaggcatctggaccaaatattttccaagatacctagacatataaaattatatagttttggtttactgtgtgcacatgtatgaattcaactgaaaatgacacttagtgattcagcaaaagcatgctggattttacatcatggtcaatatgattgacatatgttgctccagtgccccaagcctatatccctctactcccctgctgcctccacacacagtttagcatatttaaaatcagtacattctactagaaagtcttttaacctttctccacctttgtttcctgaaaagctgtttaaaatttgtagtgtatctttcagtaagttcagtgttagaattgaaaaaaaaatgaaagtttttggtaatatcaacaaatgctttaaaacaacttatagcaagtcctgct

SEQ ID NO: 32995 - DNA, 1024 bp, Homo sapiens
tgaggacaatgtctgttttattcatcctcgaattctcagtgcctagcagagtgcatagcacagggtagttatgcaatacatattggagtaaaggaatacagttcaaaaaaacagtctcattaacagatgcaaaccaactcctctcatgacgcagagaatctaagctcaaacaaattaccagagttggcagttgaagtactatatatagacagaacttaataaatgcttttctttgtcttaagcctttgatgacagtgatgtgtttttatgaacgtagataaccacaagcagatgtgtcaaagctcttttgtccaggaataaactgagtttcgtcatcatcttgacagtactttcctggatgagtgttcaggaaacatgaaaagtttttaaacaattcaacaaatgtgtaataaaagtttgttaccttgttttatttgttgttatattgtctcttggcttgagtttttatttgggaagctaatagagagacgggatattagaaaaccagaggcaaactgcttggtttattgaagcactaactgaatgaatgcaggtatacgagtaatccaggaatcccatgcattaaggaaaaatttatttctatcacctctgtattgttgttaccttgtgaacctggcttggttttttcagcagttggtaaactgataagcctgtttctcactctgtcattcatctcatcagtttaccagcccagaaatactcctttcagtctttacaaaaaaaaaaaaaaaaaaaaagaagtgcagatgcactcacaaacacaaaagttaatttattattatttttttttttttgagatggatttttgctcttgtcacaaggctggagtgcaatgacgcgatctcagctcacagcaacctcaacctcccgggctcaagtgattctctggagcagctgggattacaggcgtgtaccaccatgcccagctaatttttgtatttttagtagaaatggggtttcaccatgttggccaggctggtctcaaactcctgatcccaggtga

SEQ ID NO: 32996 - DNA, 1041 bp, Homo sapiens
ctttggaataaaaagaggtaagaggtaaggtaggagtacagaatttggggatgaagtatatttttggcactaacatcactgtgatgttaaaactatttttaaaagataataaatacccacacctctgacttactaattattttactaaatttattgctctctatgctatttatgtttattatttctatatggtgaaaatactgtaactattgcacgtcttccccaaactgtatgttctagtgatatcatgttggtaacttggaagcggccatgataggaatttctttttttgagacagaatttcactcttgttgtccaggcaggagtgcaatggtgctatctcagctaactgcaacttccgcctcccaggtccaagcgattctcctgcctcagcctcccaagtagctgggattacaggtgcataccaccatgccaggcttattttgtatttttagtagatacaggctttcaccatgttggtcaggctggtcttgaactcctgacctagtgatcctcctgccttggccttccaggaatatttacaccatcgaaattggcaaacactacagttagggtttctcctccacccggacctggttgctaagcatttctcagcacaccactggctttgcccagggggtatatccgagcttctccaccccatctttctttctcattatgaccaaagagatttctcctgcacttttctgtcaaccgtcacagtgattctgaatttggggatgtggttggggagaaaggaatacgcttagttatgcaatgttcttatctctctgtgcctatgatctggtctggtacaagtctcaactgcattcaatttaacccttgattcttccttttgtagagatagaattctccctgcaacctcctgaagagctggccttccctccttctccatcacagtagttccaaagtctggctaaacaaaatcacctgggaacttcttaaaatacaaatttccaggttctatcacatatgtaataaatttagattcttgaggaatgggactcaaaatagtatttt

SEQ ID NO: 32997 - DNA, 1002 bp, Homo sapiens
cagaccccacatttacacactgcctatttgaataagaatctctttcagtattaaatgttttgtgacacacaaatgaatttgtacacagtcttttagcttgaatttgtagacagcctttaaatgttgtttggggatctttggactaattgtataagcgctcagtctggcttctcaagaaccagtacagttaacaatccatataaaaagttggagtgctgcctgggcgcggtgactcacgcctgtaatcccagcactttgggaggctgaggcgggcagatcacctgaggtcaggagtttgagaccagcctggccaacatggtgaaaccccgcctctactaaaaatacaaaaattagccaggcgtggtggcacacgcctgtaatcccagccactcgggaggctgaggcaggagaatcgcttgaacccgggaggcggaggttgcagtgagccgagatggagccattgcacgccagcctgggcgacagggcaagaatctgtctcaaaaaaaaaaaaaaaaaaaaaaaaaaattgaatgctaaggctttgaggaaaaagtgtctttacaatgtttgtccctgatgacagaataattatgaactatagtaagcgctgtacaatgctcatttaggtttgtagacttacttataaccaggtagtggggaacccggcttcttggaagttgtatgtttacttagtgtttcttaattaaaattacaaattttatttacctttaactcttataggtaacttttatttttgttacaaaggaaaagtaggactgtcattattattattattattattttttgagacggagtctcgctctgtcgcccaggctggagtgcagtggcgcgatctcggctcactgcaagctccacctcccgggttcacgccattctcctgcctcagcctcctgagtagctgggaaaacaggcgcctgctgccacgcccggttgattttttgtatttttagtagagacggggtttcaccgtgttagccagga

SEQ ID NO: 32998 - DNA, 1031 bp, Homo sapiens
gcctgccatcttttcaaggtgggctggcaaaacagaggaccacagacagaaaaatggagtaataaagtttaaatagtaggcaataatattaatctgctgtgctgcagtgccgattaagagattgaaccaactccctgcagttctaattggattttcctgtgttttcttcaacccttagggctttaccctgataaatcctattttttcttgccatttattcttcatgaatgactctatgtaatggaattatctgtaaaaacacacaaatgcttgtactgccatagaattccttttgtggctctctttgcagattgcagacgtgttgctttctaaaaggcaagtaattaatacacagaattgctgggctaattgctgtctacatatttcacatgcataataagatataaggctataattcaggtacagggaaagcacaaccatgtgtaaataatgccctagaaaactatattatgttaggattcaaaaaatggatctacacactgttctgcataatgtctgaggtaatcaatgtaaaaatgaaagaggaataaagttttacatatgcacacatcaagtgtatttctcaaatatgtaaggtaattttcacatgcccaattcattattatttttgaaataatgtcgtcttggtctaaatttgtcttcaagtatgtgtgtgtagccaaagaatatctttgtcaggaaatgttgcacataaggatgtaattgctgtttatgattccaataacaaccacgttagctctagttataaaatattaattatatatctctaggcctataccagagtgtatgaaacagtcctaataggttcacttctgtaggagatctccatactgatttagaaccaaaattttgattttattggtccactcagtttatctgatttcatcacagaaccagtgattctgccactttcctttgttatgtttttagttttgactttgtctagtgccatccttgaaaccacctagatttttctaccagaatctgctcacatagtcccaaactcatcc

SEQ ID NO: 32999 - DNA, 1026 bp, Homo sapiens
ttaagcatatataatatgcaaataatatcagatttgattctattatttatgctcatacagtggccaaatttaaaggcaattagtcaaattatctatttaatacaccacatattttcataagtcaaataaatattagatgatgctaacattaacttctttcttcattatttgtacttgaaatatacatctacttgaattaattaagtaatgctatttcacaaacatttttgaaagatttttggaaatctaggtgacacatttgccaccagacatttatgaatctttaggaaattttctttgcctcttttgatcacagttttctcatctgtaaaataaaaggtctaaattagataaattatgagggcctttttgtgttatgaaaactacatctacctaaaaatataactttcctggtaaattatgaaataatttgaagtaaaaacaaaatagttatactaagtgacatggctatttgggtactaaggaaaaataaaaaagatatgaataaactgaagagaattgtgtttgaatcctgctgtaacttttttacaacctctgtggccttctctttaacctttctgagtctcagatccctcatgtgtgaaatggaaaaggcagtaaaattttaaatatgttttccccactatgtggcaagggtgaatattcccttggattgcttttgtttttcagtcttatatttcacaggaatttggattaacgtaatgaattcataatatttaaagttgccgtagatgtttaattagctaactgtacaggtaataaacatggctttgtgttttatacctgaagactatgtgaacctggcaggttaagtacaatgatttctcttctccatttatcaattcatgcaaagcttatgcaattggtcctcattgctcttaaaaactcacctattacataaaccttactagaccaggcctaaaattatgtttaatattagaatcactaaaagtcaacaatcgtatgcctacttgctttcattttttgtataccagtaataaatat

SEQ ID NO: 33000 - DNA, 1020 bp, Homo sapiens
atacaaaagtgtgattatttgatttggccaagatctttaaggctgaattcttataagagaataaaaaatctcaggaacttcaaattgccactccactttaccgtactgctggtctacatagcaaagaacgaagggtatatttcctggtaggagagcgtagttccctccatgctacatgtatataaatctatagttttatatttcttggtatttggtgagaagaaaatgtagtttaacatgggattgggactgtggaaaattccagaggaaattgtcaagatttactcttactgatcaatgttatcttcaggactccttcttccctcctaaggtttttctctgcaaataataattctttcagcttcagccctaattactagggcccttaatctttttcatggttttatagtccttgaaacaaacatatgcgcttattattgaaggcagcttttgtttgccagaggcaaaaatacttacagatcgtcttctttaacacatcttttcacgtctgctagacagctcagttctctccttctaactcatccctcacccaactcctcccaaattttttattgaaaactgtccacacattgctaagctcttttgttttgtttctaagaacactgtgtagtcttcgtgtagaatggcaacttgatatagacataagatatataaacatttgttaaatatacttgaccaccaactaactaaagggtttctcgatataaactcttgcttacacggtacccaattaaccttttatcacttttcaaaacatgcatagctttatggcataagctcatttatctttgctaaaagccttcataggaatctgaacaaaaatagtttctgttaaaatattcaactgtaatgtggagccttttattacattttaaacatttttttcttgttcctaggccctttaaggattagagcaaaaatgtacataaataattcatgtagcagagtataagccccaagagcctgtctcaaaaaatgatgaccagaaaaccacagatg

SEQ ID NO: 33001 - DNA, 1083 bp, Homo sapiens
gatagcaaacatagtctctttaccttacctaagattgtctaccatagcttcccttctcctatctaatttttttaaatttgactgctgcctttcagatgatcttttagctctgtgtaacctcttttatttttccttttttttttaaaaaaaaagataccttagtttaaaaaataattataaacaccttatatccaccatttaggctcagtgctcaatcacatctagccccattcctcaataaatttactgtttatttggaaaaagaaataagtgattaggtataataaaatgttacaggtactttaaaaagtatgcttctggtcacagtggctcatgcctgtaatcccagcattttgggaggccaaagcaagaagattgctcaagattgggaatttgagaccagcctagacaagatagtgagaccctgtctctacaaaaaaaaataaataaataaaaataaataagtaaataaataaaagacacatgcatacatataaagtataatttaaaaaaacagggcatggtcaattaaatttgttggggaaaaaacagaagggacaggacagagatatcttcatagatgaaattagagctgaagccaaacagattaatgggtgactgccaggcagaccatgagttagtagaggactctaagcagaggaagctgcagtaacaaatagcagagacatgaacaatactggcatattttgaaatcacaagggacattgtgggatgtggcgcagcaccttaaaattcctctgcaatctcatttctaaagttggaatgggacaagcctggaagtacagtgacctgacaaaaagttgtttgggtagcccagaaagaaattaaagtctggattaagtaacatggagacactgtgtaagttcaaggaatttttaagaatcacaattttcaagacctggtgattagttggatatagagggtaatggaaggagggtttaagaatcaatcctaaatttttagtctaagtgatcatgttcatgacagttctattaggtaagatagaaaactcagtaaaattgctccctggcacaaatttggaaataatggtatttgtgattg

SEQ ID NO: 33002 - DNA, 1022 bp, Homo sapiens
atatggcataattaataagaagtttgtttagttaatttcttatgacacatgaacaggataatgcttataggtactatataatctatatttatataaaacctgaaattattacttgtctctaaaagaggaggttttttttttaagtcatgattcttgaaatcctaggtgacagaaactggcaaaattaaaatgtttaaatttacttcaaattttttttttttaataatattgactttttcatgataagtaaaatattgaattcttaaaaatacagatttcccctatcattggttttacacacatgtatttaaggaatggttaagatcccagctattagcattaaacttccattttaatactattgcatcctgttctggtcataaacctctgcctatctctagctgctcacacaccttcatctataagccaaaggggttatagatctatttagaatagcttgcttatggattgaaacacaagtattttcatcaactagcagcattactctgaactttctaatgatgattggttttactttctactctactgaagtcacagaacaaagctgcaagatggcactggaaggggtcagttggcacccaacagtgttcacttccttacgaagagctcagagcaccagtggggttgcttacacaacattagatctaaatagaaaaccattctatgtccacccccattgaggattaaaactgggagggctaatttgtttcaagtggggaagaaacactacagactccctgctctaggctgtgtgggtctttgtcatttaactcatcatggggtctccctagaatctgacctgggtttgtttcggaatgaggctacaaatacaggtgcttgtgttggtgccctgtgtaactgtttccatccgttgtcacatttaaattgtattatgttttaatagtcatttgagtgctgtttctgtgagcaaagctgctgctcaatttgcaacacttttattaacttgtaacattttatccaaaatgggaagctatatctaa

SEQ ID NO: 33003 - DNA, 1025 bp, Homo sapiens
tcctggactcaagtgatcctcctgccctgacttcccaaagtgctgaaattacaggtgtgagcgactggacctagccaatagtgaaggctttcatttttgaagatggtggcttgaatatttccccccgtccgaatcaatgacaaactgtctttcctgagccaagcagctgttggaccagctcacagggggtctagagggtaggagctaggccttggttcttccaagaacagatgaagagaaatgcaagaccttttccccttctgctcttagggatgccttcggggaccagtaatggagaactatgaggtgctgataaaaattctgtgaatcctgaaggcagcttgccctacagagatccacaaatatccaggaggaaaatgagtgttcctagaaaaatatgcttgtctccttctccagcagaaatagccaaacaggtgataaagttcctttctaattccaagacttgaagaatgctagcttttacacatgaggagattataagattaaagaagtttctgtgactcttggacaataatgtttcatagatggtgctaaatacttcccattttatcacctctgtaagcaaataatatctagttgtcccacttttttctttaacattattgaatgaattcaggtgttgtctgtctaatcaacccctccaccccccgctactgttcatccaaagagtttagtatccattgatgatcattacttagatccattatttaattaggggctttctggttgaatatattttttacatctctaccatgaaaaaatattctgcacctattataaataatagctaatgcttccatggcacttgagtaaggtgtggttctaagcactttatatggactaatatattgtgcttaataacaacccaaggaaatagttacaataattatccccatattacagatacaaactcagaaacaaaacaatttgcccaagtcactgctactaagtgatgagttgggattccaaagaatgaattatatatatatatatataatatatga

SEQ ID NO: 33004 - DNA, 1030 bp, Homo sapiens
tagacaagattaacagaagaaatgctattgtgatgtgcgctaatgacaatttttgtactgcaaatcactacacttaaagttgtcacatattgaaagatttttaggattgtgaaatacaacatttgcattctaaagtaacctagtgggccaggtgtagtagctcatgcctataatcctagcactttgggagactgagaggcgaggattgcttaaattcatgagcttgagacaaacctgggtaacacagtgagacccatgtctctaaaaaaaaaaaaaaaaaaaaatactaaaacaaaactaacccaatgaaatctgaacaaaatgaaatataaactgtatgtttttaaggtaacaagaaagtaaaacaaatttatatattggaattctttggaattcaactaacggagctctctgttcctttgtaaattttctacctctgttgaaagagataaactttttttaatgacaatatatgattaggaaaaatgtatgtccattccattttgtggtttttctctgatctttgctgtcaaaaaacaaacaaacaaacaagcaaagaacaggtggatgattcatgtcaagtatgtcctttaaggcattatttgcattcacatttacagttcttgaaagatcatactgttttcttctttgacatcatgaagctcgtaagtcaaggtttatcacactgaaacataatgctcttcaatatttatttcataaatgtttatcataacctcttatctgccaggcatattaactagtggcatcccaaatgaagtttctttctcctctcaccctctctgacacccttcttttcttctttccttccttcccactctctttcctctgtctctccttaacatggagtaacctaagtaaaattaaatgctgacaagaaacttgatcatgggagaagacgtgagaactagagtgattttggtggagcagagagagataaacacaaagatagaagccattttccattcagttaagagagacaaccccttactaattgtgtcagggaagaagg

SEQ ID NO: 33005 - DNA, 1023 bp, Homo sapiens
atacaagaatgtagagtcaggatattatgctttgggatgcagagtcaaactaacatgtttgaaaggtatttgaaataattcttgtccatgcagttatggtaccaaccaatatatacttaggtttattttatttatttatttatttatttatttatttatttatttattattttgagatggagtctcactctgtttcccaggctggagtgcagtgggctatctaggctcactgcaatctccgcctcctggttctagccattctcctgcctcagcctccctggtagctgggattagaggcatgagccaccatgcccagctaatttttgtatttttagtagagacgggttttcaccatgttggccaggctggtctcaaattcctgacctcaagtgatccacccgcctcggcctcccaaaatgctggcattacaggcatgagccaccacacccagcctacttaggtttatttgtttcactttgttttcaaattttggggatggtttgttctgtcatcctttggacttattatttttttgaaaatatgtgtgacatttacatgattctgaattcaaaactgggttgtttttcctattttctctttgcttatataggtaaaccatttttattcattttttacctttcattattttgtatttgaacccaggtagcatggtgcttgagtctatggtcttaaacaaaatgttagacttaaactgcctcattagaaattatcaaacccttttttacaggaaagtgggtgttgttgaaaattgcatatatttgtatccagttcttctcaagatctaaacttggaaactatcattacaggcctctccataagtcccaccctctacctcctcctcccaaatttaaaaccaccaggcagtagctaaaagcctcttttatggctttttgtgttccaaaagcttatatccttaacccacatacctactttatagattcatagcatgcaagctttgcagatattcttttgaagtttgcatttataagcctttgtgtacca

SEQ ID NO: 33006 - DNA, 1881 bp, Homo sapiens
tgttttggttcgttatagcccagttcaagcttagagattggtaagtgctttttaaaagaaagttgttttgtttttttaacccccaagttggctgtagattgaatgtctgtaggttgactgtagattttattttttatatctcagcaaactagattttgttggttctacttttttctctcctcattaactatagatactcaaagcctactatacttgaacttaatctcataaattatgagaaattttaagtaaacaaaacagttgagccttcccagcctgataatcagtagcaatgtgtcagtaccaatgcatctgtgatttgtgccacattactgggctaaatttgaagaggaaagctcggtcaaacattcttccagcttgtcatcttggataggctgaatgggaggtattttcaaggtgcatggtttgttgccatgtgcttttaagtagatctgccacctctagcttgactttaggttaccataaagctgcagaggtcacttttctgatttgtcagggccgaacacctgaagcatatatttcagttttcataacaggacctctgatctttgtcctgttatattgactggtttcataggagaatatatttttggattgagttttaattcttcagtagcagctgaataataaaataacgttgttacatttatgattcagcttaatgaatgattacattattagtattcctgcctgtgttttttgtttaaacatataacgtctttcaagaatagtgtacatatctgtctgggcactgtggtgcatgcttataatcccaacattttgggaggccagggtgggtggattgcttgaggccaggagttcaagaccagcctgggcaacacggtgagaccttgtctctacaaataattttttaaaaatcagctgggcatggtggcatgcacttgtaatcctagctacttaggaggtggaggcgggaggatcactctagcccaggagttagaaggtgcagtgagctatgattgcacagctgcatccatcctgggtaacaacaagaccctgtctaaagaaaaaaaaggaacatacatacattattttagcttcttttataatcccctagcttaggaactggtcagtaaatatagagtgaataacagatttatactggaattatctttactagtttgttatacttcctctttaagatgttttgtcaaagaaattctgaatttattttgtttctctacatgttagctagactcatgtatcatttagcaacaacaaaaacttatttcatgtgatagactgactgtttacttctagctattgttggctatgtcagagagaccagataccttagccaagaatggttatcaagactggagaaactgaatatgtgtgtgagtaatcttttgagaacaggctggtattatctttttgtaaagggatcatattacatttctagaatttcagaacttatttttatagttgaagctaagtccctcctctgattgctagaaataaagctatgtaatatttttatttcagcatttggatttattataatatgtattacgatttttaagattttgtttttcattcttttagacaggtgctctagttcacagctataggggaacaggtggaatatttgaagtttgctggaatgcagcaggagacaaagttggagccagtgcatcagatggttcagtaagtatagtaaagtgtttccaaagagggtgtgggtgggtattcacatcagaatgcagcttattgttagtgataccaaagtgtttttttcaaaataaattttaaggtatgatactgatttttttttttcctgaggctgtaaacttttcatgtgcgttggattcaaataatgtaaacaaaatttaggctgtc

SEQ ID NO: 33007 - DNA, 1033 bp, Homo sapiens
aggatggatggataatgtgtaatgggccgttttctgagaagagggaatgccagatggaatgagaaggtgacgctgagtcatgcgaatggaggagataggtgggactgatgcttagagaactgtaagctcaagattaaaaactgggaattctcagcagataggtggtctttaaaatccttgggcatggccaggcctggtggttcactgttggggttcaatcaggctggtgggaaaaatattagagatagttatagaaatagacacatatcttcttggaaaactgagaagtaacttcagtaatagatctggctgaacgcggcctggttcctttacctttagttaaacaaattaaactagtaataaaggaaggcagggtagtttacctagctagcttgtttactcatataatattaagactaacctttgatgtgccatgggtgcttaagtgctttttacttgggaagtccacaatgtcagttaccctctaatggtgttgactcaagcctttgtgaattaatcttactgaataaatttgagtctcactagcggatagggccatggtcgcaactgtttacagaactctccagggagtctgtaaatggctcggacaccctcagctggactggcgaaacaggatatctgtgtgttagtgtactttattcatccattgctgggtcagggtctgcaggcagacacccacagctagtgcccccatgttgccacagctcatgcctataattaaagcactttgggaggccgacgtgggcagttcacttgaggtcaggagttcaagaccaggctggtcaacatggtgaaaccccatctctgctaaatataccaaatttagccgagcgtggcggcaggtgcctataatcccagctactctggaggctgaggcaggagaattgcgtgaacccgggggacggagttgcagtgagccaagattgtggtgctgcactccagcctgggcaagagagtgagacttcatctccaaaaaaaaaaaaaaaaaattggggcagggacaaaactgtgt

SEQ ID NO: 33008 - DNA, 1031 bp, Homo sapiens
catagtagtcttactctgttgcccagactggagtgcagtggtgcaatcacggctcactgcagcctcggcctccccagctcaagcagtcctcctgcctcagccttccaagtagctgggactataggcatggaccactacacctggctaattttttattttttagaaatgaggtcccactgtcttgcccaggctggtctcaaacacctgggctcaaacagttctcctgcctttgctaccaaagcgctgagtcacacctggccacacagctcaactttaactctcctgtttttcccctttaagttttttctttaaattagggttgacaaactttcactaaaggacttgaaagtattttagacattgtaggccataagatctcagttgccactaatcagctctgcccttgtagtgaaaaagcagccataggtaatatgcaacttcatgcatttgtctgggtttcaataaaactcttatttatggacactgaactttaaatctcatttttccacatttgtatgtcttcctttgatcccctcctcccccattgcactataaaagccattcttggcttatgtgccatagtttgtcaacccctgctttaaatgcagtctttgatatgcttctgttgcctaacccagttactcactattattaccataatctgtgttgctaattacggagatcttttgcaccttgcagcaggagacaaggatgttcaataatttcagagctaaactcaaagtattaaatgccagcctgctttggggcttcagagatttttaaattcattgattttaaggggcatttgattttaagaggtgtttgacaagaacagattttaagaggtatttggcaaaagttgcttagaagaaaattatttgcaaatcatatgccgtattccatttgttagttgagtagatgataatgggaatgatacttattcagcataacatttgtctaactcttgtaattgacagagtacttccacacacatgatctcacctggtcttcaccatgtgtactaaggataa

SEQ ID NO: 33009 - DNA, 1035 bp, Homo sapiens
ttggagagttgatgttccatgacattcagactcttaattgtcagaggatcatcaaacgttttctgtgaaatgtaccataaagcatttgcagcctggtgcaattagaggtggcattatttaatggaaagaacatagatttttgaatcagaaaatctaggtttgaatgtcagttccactccacttaagaagcattattaagactgagcaagtcacttaacctttctgagcctccttttcactgtctgtaaatgagggataataataataataatacctgtttgttatgggataaggctaaatgatatacatgaaaatactgtatagactcctataagtttaggtattgttgtcattttctcattttggatccaggtacctgagtatttgtctacaggaagtaaaaaatagactttcccaatgttgttggaatgttggtggcttagatggatttctcttttaagaaatactcaatgtggtacttttatctgattaatcagacctcgaaaatagtgctccgtccttcatgatatacagtcacacacccagacattcagcttgagtagagccagccatatttttgtgcccacgctccgtttaagcctagaacctttgcgccgcttttcagtgagtttcccgactgcagtaactaaatgatgttaaactggaacaagatacccagtggttttagtactacctgatttagctgtctctttgattttgttgtgctagaaaaaatttcagtttggagactgactaaaataaccctggttattctcaaatctttgatgacatccttttacaaacagcgagccagtggcacagcatcaactttaaaatggaaatttgcaacttcaggcattttgcttttttttcattctctgtttagtgtgcctaaacaagccaaaataaggtgcaaaatgatttttctgtagtatctgaataagtttgcaaacatcgttaaacaattcaacttgattaaagctcaccacttaataagcatttacacatacatttttgttcacctgttgtgcttcc

SEQ ID NO: 33010 - DNA, 1032 bp, Homo sapiens
aataatgagatagcagaaataatgaggcgtttttatgtcttaaagggtgccatgagatatttatttgaaattgcatccagaaataggatatggaagagagtttgagaatgttatagttctgtgaactcaggacagggttcagatagaactcagaatctcactcataacaaatgcccatagtagctttagatctgggcacttgccacttattccaaagcttttttttggttctgatctccaattatacttaaatgtggctacttttgcaataggtcctaattcagaatcaccaagtacagtaatgtctgggttgttttggggattcatcatatttatcaccacaacctacaaatgatacttattgagaattagtcattcagtatctaagaaatgcgatataaattactcttaggttataactatgtttcttgaaagatctaaagtaataccgaagaaactggaatctttatactgctgctttccctgcaatagagcactgaattggattaggagacagcagaaaaggaacatcgtggcaaaggaagtatttgtgcagggacattcaaaggactggtttgtgaagacttccaaaaagcaaaactaaaatttccgcctggcctgtctcattatcaaagactgtccaaaaacacattatgaaagtttttatgttttgataaatatgtggtttagtaatactttttttatgtaagaacttttaacatttgttctctgcatattgttcagtgttgactgtgttatctatctgcagggggaaaatcacttaaattgttttaggcttaaatattttttactgttgtcaatactataagatactatctgttgaaagtttcccacctccaaaattacataaattctcagattcatttttctcacctataaaatacgttgctgtggagaagggatttacattgtgatattcagcctcaaatatttgatggacatctctgttttaaataagccatccctcagactcatcaaaactaattaaagaaaaatatatttattgtaggg

SEQ ID NO: 33011 - DNA, 1024 bp, Homo sapiens
gcttctttgggtatgttccacatgcacatcttgggatgaatttggaacttgtgttggttcataggaagaattgcaggatccacttcagctctctcttagggatttattcttatgcttttcagttcctggaggcctcgttttttctgatttagtttcgattttttgattgaaagaaactggctcaatctagctggtgaaagttggggggaacaccaaaaaagtaggccaattacagtgttgaacaagtgtgctcagaagaatagtagagagttataattccacaaatggagtagtggctgctatggaacaaatcctcccacaaatagtaactacaatttctggacaacatatgaaaaacaaacattatgaggacaccatagaacaaacctgtttcagaagtcagaccggattggattcttaagagaatggcattggagtttcctgttattgacggatctttgcctgaggacaggttcccgttggcagaggaattagagaattgttcagaactaacattgcactgcagagtaatggggtccagcacaggaaaggaggaaatccaggaagaagatacccatagaggtggagtaccaaatgtggtttataaactctcctaaaatatggggttgacccccaaactggtaacagttcaagtatctataaaccaagaaaaaggattatcaagttgctgtatgtgtacaatggaatactcctaagcaataggaaggaaccaaggcatcgatgtctgcagcaacttggattaatctctgaaacattatgctgactgaattagtcttcacaaaacaagccatcatatgtgattctacatatatcctaaaaccagacagacctcatctattgtgcatgtggggtgggacagccaaaacgaagttatgaaagggaaagaagaagaggttggtaggtggtaggaatgagtggtgaggacagggattaagtggggaagtgcatatggcagctttctaaggcattggcaatgttctgtattctgttagggatttacgtt

SEQ ID NO: 33012 - DNA, 1145 bp, Homo sapiens
cccaggtagctgggattacaggcatgcgccaccacgcccagctaattttttgtatttttagtaagagacaggatttcaccatgttggccaggctggtctcgaacccctgaccgcaggtgatccgcccacctgagcttcccaaagtgctgggattacaggtgtgagccaccgcatccagctgaggatttctgtgttctgtagttttaaaaacgtcttagctacggtcatcaggatgaaaaatattgttatatcgtgatggtcttgtgttttgtcaaatgaactaaattttgtgaatagtattttcttgttaaaaatgcaacagtggcattttgctcttctatttttgtccataatttcactgaaatagattgtttttgtgtattgcatttatcctaatattttttagttatgtgcatttaaatggctaggattctacctgttataattaatcattttaaggagagtcattcttatctacttaaaaagatttttaagaagcctttcactgtagaatataaatggcaatcatgtgatatagcagaaagactagtggactctgtgggagctggcatttgctttatttcctgaatatactatgaatctttgacttttggcagtactcttataaaacttaggtgatggaattggactttctaaggtttattctagctgtatgtcaagtgcttatcattgttaactggaagtcagagtgattctctcttaaaaaaaatttcttaccgaaataatattgttgtgtattttggggataaataaatagaagataaatgaatttttacttttttaaagaatcaaataataacatcttacatttataaatattttctgtagttcattaccaacaattttagttttactaaattagggaggcataaaaactgattgaggtttatagaatttggtgggaaatgatgtatcagtctgaaagaaaaactattaaaagttaagaaccagaataagtggttaagatatttgtgaaaatattcccagaaataattcctattagagatggatttttttcagtatgttgataggaggattttctctgtttaaactcttctgaattcctattggggaaaaaaggttgacctcctccttttcctgttctcctcctctgcatcctgctc

SEQ ID NO: 33013 - DNA, 1026 bp, Homo sapiens
tccttcccagtgtgatttatttgttcagtaattcagtgtctactgcattttattttcaaatatgtttatatctatttctctatatctagacactaacattttatcagcatatatatcttaagaatcatgtatgttcaaggcattattcttagttctgttagggaacagcaagatgattaaatcagtcctgggtctctagaaatttgatcagagaggtatgatagaagaataaggcactatgcggttgtggaaagggagatatgttaagctggggctcatttctctctctggatggtggggtggataattaatggaggaagctgattgggcctgatctttggaggagggataggaagatttgtgagcagaaccgtagtcagaaggacatttctggtaaggaatgaggaatgtcagggcagccaaagagtgcagataacactgcacacagtgatctgctgtggtgagagtagagaatgttgagtaaaagtagaaatgcagatagacgggacacacatgttttggacttgaattcctttaatacaaatagtttcaatagtttcaatatacattgtcagactatcttaaatgcaccttaagttttgtaattcctttgtaaagtatatcactatatcttttaaaattcagatgtttattttaattacgtggtgtgctttataaatgcattgcatgatggctaggacataggtaaatgagttgactaggaaaacatctaagaaataaaaaaatatggtcctgcgtatgtttctagaaattttccagattaatttgcaggtgcagttggtataccatttttcacatatttattcacccttcaaatcctagaatcaaatactttttaaccatgtcatcaactattaaatcactattgtggtctttctccttaacgacttgtagtattaataggaaaagttaaatgaatgaatgaagacaaaggtagagaaaaggtaattagtgaaaactgagattagatacatctatgagggtgatgagagactcactgatgac

SEQ ID NO: 33014 - DNA, 1035 bp, Homo sapiens
ttccctaaaccgtttctctttctgtgaataaatgaccttggtttaatgtttagctctgactcatctgaaatctaaagtgaaatgtcaatattaacagccaccatatagggtatggcaaagagattcctgacacgtgaactgcacctggtttgggaaggtgtgatgcattcttaaaacagcatatccttcgtggattgggtgccctggaagatatgtccaggagatgcttataagatgatagtgggcctggcgcagtggctgaagcctgtaatctcagcagttagggtggcctagatgggcaaataacttgaggtcaggagttcaagaccagcctggccagcatggtgaaacccaggctcaaccgatcctcccagctattttgtctctactaaaaatacccaaattagcctggcatggtggcatgcacctgtagtcccagctactcgggaggctgaggcaggtgaatcgcttgaacccaggaggcagaggttgcagtgagccgagatagcgccactgcactccagtctgggcaacagagaaaggctctgtctttaaaaaaaaaaaaaaaaaatcaatcatagtggtttctcagtggaactcaggtgtgtctaacccagggtaacttttgtatcgtttgtggattctttgccctttgcatacctacctgaataatgatatggtgatggtgatgatagtagggagaggtgcaaagacaatagctcctggattgcatgtcctcctgttgtgtgcctggcgtgatactgccctgctagcctgtcctgtcctgtagctttctctgtaaacacatgccaggtgtggcctacttaggttttgtgaatttgtctagttgagtctgagttgttagagcagttcctttcaactgttgatttgcttgacgtgagatcaagggggtgaaaatcatacacaacacatttttttcctctttgtttgaaagatattttcctcttctggaccctatctagaagaagtattccttagacaatttccggcttcttttctctcatgaagaggagg

SEQ ID NO: 33015 - DNA, 1241 bp, Homo sapiens
aaaggtagacagcctctagataggagaagaggaaaagggaaagccattagaacaggaatgccgaattaaagaaggcataactggaggtaaagacctatactatcacagggaggagtgcatgttggaaagtaatgagaagttaaggttatcaattctgtgctccagaagtaggctctatatagttatgtttgctgtttagagatgatgcagttggaaaatggccctcttatttaaataaaggttggtgagacacctgctggagtataactagattcaccttacgcagtatttttagatgagcgagtccccaagggctttctgttagcaaaaaggaggatatcccaactctttctccctgaaatttgaagtaactaataccaagggcagtggttgcattacaataaaatgaccatgtagaaaatgggtgaggttggtatagagcactaattcaatacacaggaccaaggattctttggaatgtttcttcgtgtcgtgtggttgattctggagcttctagccacgcaagtatgccagttgatcatggaggaacattaaatggtcacagaagtataatctaaaataatctgcaaaattggtaattggtgttgttgcctagactgggatctggaccagcagtgtatcacaatgtagtgaatggtcactgtttgttcagcaaatttcaacaatttctgttgcgggacagttaagaaacaaagacagtatatgaataaccattctatgtaggtttctctgcctcaggattcaaaacaccccttcccctaaccattcatgtctatttacttatctaaacaaaatcaaaagaagccctaattatataggaatccagccatcgattggaaaaataaaagagatgggaccatattttatgacaagttgtggaaaaggttccaggatcaaattgggtagggtgtaaatattcttcacccgtggaactgctgtggtttcttttcttttaaaacctgattatcagccaggtgcggtggctcacgcctgtaatcccagcactttgggaggctgaggtgggtggatcacctgaggtcaggagtttggagaccagcccggccaacatggtgaaaccccatctctactaaaaatacaaatagtagccgggtgtggtggcaggtgcctgtaatcccagctacccgtgatgctgaggcaggagaagtgcttgaacgtaggaggcggaggttacagtgaaccgagatcatgccactgcactc

SEQ ID NO: 33016 - DNA, 1053 bp, Homo sapiens
agagacagggtcttgctatgttgcccagactggtctctaactcccttgtctcaaacaatcctcttaacctcagcctcccaagcagctgggactataggtgcaagcctctgtgtccggctcagtaatttaaccaatttcacagtacctctaaaccccaaatatggtggccttttctttcaaaacatttctagatggaccttttctgaggagttaacaattgttttagtctgggctttgataatctctttacaggtctgtttttgcctccctttcaggtaattatttttttaacttgttaacttgttttgaacacttgagcattttatatggttcaaaatttaaaaagtacaaaagtgtatacagcaaaaaacctttccacatctgtcccctagccacttggttcacctctctggagtgacgggtattattagttttttatgtgtccttccagagatgatgttactatatacagaaaagtacgtaatatgctgtctcccaatgtatttcccaaaaacgttgtagaatattatatgcactgcttttattgcctaactgtctttcctggtgatcattcccaaatcgatatctgaagagtttcttgttttgtttttgttgttgttgttgtttttgactgaataatactttattataattttaccaggcccctgttgatggagaattggttgtttctttttataatgcagcaatgaataacattgtatataagttattttgcatgtgtgcaaacgttttgatgaataagttccccacagtagaatttcacggtcaaaggatatgtgcatttttattgtatttatttattctttttctttctttcttttttttttttttgagatggagtctcagtctgtcgcccaggctggagtgcagtggcgtgatctcggctcactgcaacctccgcctcctgggttcaagcgattctccagcctccatctcctgagtagcttggactacaggcgcacgccactacgcccagctaattgttgtatttttagtacagacacgggtttggcgtgttggccaggctggtct

SEQ ID NO: 33017 - DNA, 1068 bp, Homo sapiens
gataggagtctcactctttcgcccaggttggtgtgcagtggcgcgatcttggctcactgcaacctctgtttcaccctcccgagtggctgggcttacaggtgtgtgccaccatgcccagctaatttttgtatttttagcagagatggggtttcaccatgttggccaggctggtctcgaactcctgacctcaaatgatccatctgcctccgcctctcaaagtgttggcattacaggtgtgagccaccacacctagtgcatagagtgttacttctgtgcatgtatgcgtatattattatgtagaataacatgtagtgttacttctgtgtgtctgcatatgagtgtattattatagtccaactccagagagaagatatgtatgactgttaatcatgcctagtatagattgtgtttattgggcacacacctggtgtaaaaagtgagcagaactttgatgcaatgtgcaatgaaagctcaggatgtatatcttgaaactatgccatattgtcagggggtggtaaatacagataatgtcaatccaaggattgtggattcgtttatttattttatttatttattttttattttttgagacagagttttgctcttgttgcccaggctggagtgcagtggcgcaatcttagctcactgcagcctctgcctcccaggttcaagctattcttgtgcctcagcctcctgagtagctgggattacagatgtgcgccaccatgcccggctagttttttgtatttttagtagagatggggtttggccatgctggccaggctggtctcaaactcctgacaggtaatcctcctgccttggcttctgaaagtgctgggattccaggcgtgagccaccgcacctggccgattcatttattttaagtagtgaaattatatgattgtatttatctcagagcattcattctggagggtagtatatgtattgttgaggtgagggtgaagggcggtgtgagcagttacaggcatcaagaacagtaagaaagctattgggtggaaatctgaattcataaggctctctgtgatctgcccctgcctgcctctgatt

SEQ ID NO: 33018 - DNA, 1034 bp, Homo sapiens
ctcccagacagggtcttgctctgtcacccaggctgggagtacagtgatgtgatcatggctcactccagcctcaacctcgaggctcaagtgatcctctcacctcagcctcccaagtagctgggatcacaggagtgtgccaccaccccaactaatttttactttttatggagatggagtcataccatgttgcccaggctggcctcacactcctgggctcaatcagttctcccacctcggcctctcaaaatgccgaaattgcaggtgtttgccattgcacccagcgaatgcccaccttttatagagattccttttctggctttatccttacctttaagctgccaccaatcagcatctctgttcacagggtcagaggatggggtcatctgtccagaatgtgggtaatgcagtgccctgatgaagtaccatcattgtttccttcttgtagttgtgattagtatataacttggaacttctctagtgtggccttgaaaagcctttcatgtcttaaacgtgggtttttttgtcagtctgttttactttcaacctgatcaaaattctttagaatttatcatcatccagtgacatctactcgctttgcaacagtgctgttgtttcattttatctttgagacagggtcttgctctgtcatgcagtttggagtacagtggtatgatcacagctcactgcagccccaacctcacaggctcagttgatccttccaccttagcctccctagtagctaggagtacaggtaccaccaccattcatggctaatttttatttttttctgtagagtcggggttttgccatgttgcccaggctgttctcaaactcctggactcaagtagtccacctgtctcagcctcccaaagtgctgggatgacaggcctgagccgaggaccctggccttttatttcattttaatttaaatcttttcccttcattttgcgtggggccttgggaaggaggagcagtagatacatttgtctgccttgaactgtaattggctaatttatgactgtaaatgttcccag

SEQ ID NO: 33019 - DNA, 1133 bp, Homo sapiens
gcagccgggggttggggacccccatcatcaactaagaaaatcaaatgcaactgtttttaatactgcttttgatacacactggtaatgttaagctatactgaaacataaatacttgaaaaatacttcatcaggagaggtggttcaatgtgaaaaatgtgtggctctcagtcacagatttggctttcttcccagctttgcttttatataccactgtggcccttcacaagtgactcaactttctcttcaccacagcggtgctatctataaaataaaggagttgaacagcatgtttaaagtgtctgattctgtgattctatgtgtttttattattactggcttttctgagctacctcagaaacaagtatattatgtatagttataaccttatttgtaagaaagaatgttttaagttttgaacaactcaccttccaatacagtgaggtccgatctcagattctcacatgttccagtttgtgtcttactttttaaatgaaggtaaaataaaaagctttgtgactgtttctccttattaatacctcactctattaccttccaggcttaccttaactggaattatgtcagcgtccttagataattactttctgttagagcctgctcagctgcatggcacctaaacagaggcctacacaggacatatttttccacacacaaggtcattttgggagttgaggttagtcaggtagagctgggaatactaccaagaaatggtaagaaacattctacaacatcaaactatgtgacatggaaaaacagtacctgaatctgaggacttcaaagagacatcgtattttgttttgttttcctaggtaactcagtctgtagttgctgaaagaggaggaaaggattagacactggtcagttttcagttttagtgacctgatagcttttggtctctggatttggcatgcatgaaggcatccatcctgcttggagcatttcatagtagctgcacattcctgttgtctggcttattttgccgagttttaaggaattgaggactctgtactctgttcaaatatcaacttctttgacaccacactgtttgctcctctgttgtattcttgaataccattccatatgtctctctaaggccagtttgttaatttaaaaaa

SEQ ID NO: 33020 - DNA, 1033 bp, Homo sapiens
atatgattcttaactgggtgatgggtcttagattttttttttttttttgagtcagagtctcactctgtcacccaagctggagttcagtggcatgatcttggctcactgcaacctctacctccctggttcaagcgatcctcctgcatcagcctcccgagtagctgggattataggcatccaccatcatgcctggctaatttttatatttttttgcagagatggggtttcaccaagttggccaggctggtctcaaactcctgacctcaggtgatccacccgcttcagcctcccaaagtgctaggattacaggcgtgagccaccgcgcctggccaattagtgccttttatgtagggtttgacattattagtgctgagttcagaatcttttacttgcatttgagtcactgaaaagtgtaattaacctaactggctcataatgtaaataaaaatgtgagatatgtgtgggaaataacctgtttgctgactgcttgtagaagtctttttttcagtcagggttttggggaaaagagaacttaaggggtagcatgtaaactagctaaaagaaacacatgggaaagcaaggagtcaaggactggcacaggggttatctaagatgataggcaaaacagtcagagaaacaggaaaacaaattagactataacaaatggaaaattatgctgttaagcatttaccaaatttccaaaacggaaacacaacaaacctaggtgtgtttgtgtacatttgtgtatctaagattaactggctttgttttagtacttgatataaatttttttacatttctagagaatgttttagatctttattttttttttttttgagacagagtttcactctgtcacccaggctcgagtgcagtggcgtgttctcggctcactacaacctccgtcctctgggctcaagcagtcctcgcatctcagcctcccaaggagctgggacctcaggtatgcactaccatgcttggctaacttttgtatttttagtagcgatgtggtgtcaccatgttggccaggctg

SEQ ID NO: 33021 - DNA, 1029 bp, Homo sapiens
atcccagctgcggaggctgaggcaggagaatcacttgaacccgggaggcggaggttgcagtgagccaaaatcgcaccactgcactccagcctgggtgaaggagtgaaactccgtctcaaaaaaatttttgctttccggagtggaatccctacttttctccaggcaacactgctctggttgacaactgacaactgctttatcagtcacttcaaatatatatgttaaattttacacaaacgttaacatggattctcactaaaaatccatatggcacaacacagggtatgtatacatgcagaaataactgaagggttatcaggaacttatgcacacacattttctgtactcttcatttaaaaacatgcttttataaacctaaatgaattttattacttaattttattcagtgaatttagaaaatactcgttcaaaggagtatagaattgtacttttctacttttatggatttagagtcagtactcagaaacgtcgacgttctgaatgacagagcatggatgagttacatttattggtgctaatgtctttaggttgtattctgaagctgtatgaggattctgaagttatggtgcctcaattttgtaaggcatacataagaagtaagatacaaatgataaggaattttgattgctcttaaatgtaaatttaagagttttggagggaaaatctgaacagctgtagcttaggaaccctgaatgcttctcataaaggacagtacttagaagaatgaccattatataaagtttcttatatcccattagagaagaagtttggataattatattgttttaaaaaaatttacatgccataacatgttgcctgcatgaagttacactatttgattgaagattaagcattaggcttctttccgtgacagtcttaaattaacatccttgccaatgatgaccactagtcatgtgtttctagcacaggcctctccttgattgagagttatttgttgcctcatctcactaggcagagatccttccttgaaaacaggtctctctcacc

SEQ ID NO: 33022 - DNA, 1072 bp, Homo sapiens
ttttgtatttttagtagagatgggatatcaccttgttggccaggctggtcttgaacctctgggccttgttatctgcccacctcggcttcccagagtgctgggattataggcgtgagccaccacacctggcctgaaattgttatttcttatttttattttgagacaaagactcattctgttgcctaagctggagtgcagtggcatgatcttggctcactgcaatctccacctcctgggttcaagcgattctactgcctcagcctcctgagtagctgggactacaggaacgtgccaccatgcccggctaatttttttgtatttttagtagagatagggtttcgttatgttggccaggctggtcttgaacccctgacctcgtgatccacccgcctcggcctccccaagtgctgggattacaggcgtgagccaccgcacccgcccaaaatttttaatatttatgtatagaatgtaagcttttcagcatgattttgaatcaaacaaaatgagttagattgaaagctctgctttctgagagcttagatttgtaactcagaattagtgtggactgtaaggatcatgctgaaaggttaatacattttggtaaacatagagtacccagattcaggagatttatgtgaaatgaataggtttgagggatgagggaggaggaatacctgttgaacatttaaactgtgaagtttgccacctattttcccctttattgaaggtttcaggaggtagaatttaaaaaaacaaaactctgggctgcaagggtcagagatggtcattacggtatcttaatagagtaatttcttttttttgacggaggtttgctcttgttgcccaggctggagtgcaatggcgcaattttggctcactgcaccctccacctcccaggttcaagcagttctcctgcctcagccttctgagtagctgggattacaggcatgtgccaccacacctacctaattttgtatttttagtagagatggagtttcgccatgttggccaggctggtttgaacctctgacctcaggtgatctgcccaccttggcctcccaaagtgctggtg

SEQ ID NO: 33023 - DNA, 1067 bp, Homo sapiens
gcaaatattctaaatgtaaaactctaaggaaatttcaattaaaataataaattagttagggatgcttagctcaaaactcttgattggttctgcactggtctattaagaagttcaagcttcctgacatgtgaaggcattcttgcatggccctgcctccttttggagcttcattttcttcactgtattactcataggtcactgtccattgagatctttgtctagcgcccatgtttgatgttttcttccctctctgcttgtgctcatgctgccctctttcccttccatgactgctcatgcttctcctctctttttcatctggggtatgtctcatttttaagacctactcctgccctcccatagatgcccatgtattgctcataagaaatgctgcttcagcacagaaataaggttcatttccctttgcatacccagtatctagctctgtgcctgacacatagaacatgtgtaataaaagttaactgaatcaatgtacaaagagatgaacaatccacaaacactaaagcctctgttgccttgcttttactacccctagtaacagcaatggtggttacttcctgctgagatgcccactcatgatgatgacaaaacttgtctctttgtggatggatgaattatgttcttttgttttatgacccatatgcacacctgacaaatggtgctagtaatggattttactcgtgttctgcgtcatgaactgccacttgtgtctgtatctgctagattacttgcccattcctttgttcttgccattgtgtcctgaaagaatgggatgagcatgggggcagaggagatgttccagaagccctgttcagtgatccagaagaagtcttcaccttttacgtggtgttttatacaaattctctagtgttttgctatggtgttttgctggctgatgattcagtgaacacttgacaatcattgcttgtgcagtatgcatgtttttaactactgatttcgaggctgtcaaggggaaaatttcttttgaatgaactcaaaagagttcagtaggtgagcttgattctgcagctgctagaacttgccacttc

SEQ ID NO: 33024 - DNA, 1037 bp, Homo sapiens
aggttcatccaggttattccatgcagtggttcattcctttttattgctgagttgtattctatgctattgtgtaccaaagggaccttgtcccacccagcacatagctggagctcagtgtcagctatgtaaaagaataactgactctacaaacaacttgctgtgtcaaacgtcttctgcaggtggggaaagttgaagctggttatttccataacatttaaaacaggtaattgttttgaccttctgattgaaatccactgccatgaatccccttaaatgaccagtcacctcatttgaatgatgaagaagtagatcaaataagaccaaatgatacaacaactgcatttgcatgctgccatgatcaggccaaattttaaattggtgatatagttgaaaacttcagtttttaatgtcttgattacactgcaagattttcaccccagcaatggagtttaacaaaaaatttgaaatcccaggaaatgaaattgcattaatgatggactttatgtataaaaacctgatgagaggatctcagaacatcttctccctaacttgcacttctaataatattagtatcttccatttctattgcacttgaaaattataaaaggtagcttcatacatactgttgtgcttagtattgaattaatactgtgaggaaggtggggagcacagggtggtgctggtggtgggtgttattgtcatttccctggacacataagagaacagaaccacagaggtgtcatcttatttgtccaggactgcacaactacttaattcataagcctggttagaactctgatcttcattctactttcaccccatttcttatggataaataaacactttttagaaaaggagaaatctgtgcttttttatttggagactatttccatcatttgacctttacaatcccaatgtcaaaatatcccatatgtgtatttctgtagtaatcacttgctgaaagtcatgtttgtataaaacaaaatctctatctgaattgtttttccccaaacaaatcttagagatacttagaataa

SEQ ID NO: 33025 - DNA, 1034 bp, Homo sapiens
cactgagctttaatttcattgccaatgacggctgcaaggcagattgatgcccaaacatggagtgcacaatggcacttagaggctgcgggagaggaactttagtctgttcatagcccataacccagaatgagggccaaacgtgctaaacaagctgtctgtaaagctgcagggtctatgccatcccaaccagatggaactggtctagaagctgggagcactcagttcctagcccactgatgttgctacagtagtgtgaccttgagcaagtcacttcgccttcatgctttgttacagcaaagtatcatctataaacgtcagattagagaatgtgatctacctacctcccctgttgtgggggcgcatgacataacatcaaatctcaatgattcatccaagtgcaccacaaatgctgcctcctctgtggtcattcaaagggcacctctgattcctccaactgaacagagtctttccttttgaattctattggcattttaatagcatctttctttggacacataataaatagattagcaaacatttattagatgtgccaactttattctggctactattctaagtacttcagtggtagttgggggtggagtagtgagatcaggtacaaagataaataaccaagttcttgaaggtttggtttaaagataatatgaactaaaatgaaattagtatgtcaaagagatatctgtctcttgtgttcattgaagcattactacactagctaagactggaattgatctgtgtccatcagtagatgaatgaataaagaaaatgtgatatatatatatatatgtatgtgtgtgtgtgtgtatatatatatatatatatatatatatacaatggaatattattcagccatgaaaagggggcatcctgttatttgtgacaatatgaataaatgtggaggacattatgttaagtgaaatgaaccaggcacagaaagataaatactgcataatctcacttatatgtgaaatctaaaaacattgaatttatagaagcagagagtagaatggtgg

SEQ ID NO: 33026 - DNA, 1058 bp, Homo sapiens
atccaagcctgtccaacttcaaaaccaacgttctctcattggttttgaattttttcaaaatttaattttttttcagaatttaatttttgctaggcaaatgaagtaccaaaactccatcaaagaagtaatggttaagcgatggcaacattcagcttatttcttccattaattcttcatgacacaaaatttagagagagagggaaaatgagggatgatagaagagtgtggcaggatgagaaaaagacaagaaaataaaatataatggtaagaatatgaacagatggacccaaacctaggctttgctccttattatctaagtggccttgggcaatttctaatgcttttttacatttgtcttttcttccgtaaaattagcgtgataataacagtatatacctcataaagttcttgtgaaggttgagttaacttatgtgatatactttgtgatgttacagtgcaataattttataccatatatgtgcgtatgcaacagtacatactatatgtaacgtgaatatatgtgagttaatacatatatatgttaatacctgaatatatatatgatatacatgtgagttaatgtgtgaaaaatgtctgcaacatgggaagcattaagtatatgctattaccacttaaaaatgaattacatatatattagatttgaaagataaaatcggtgtaaaggttcacacagttaaatgtattcagtagacattcatagatgtgatatttaattttttatggagaaaggcacaaagaaaagagtgagccatggaaagagcactagctatgctattaactcatctgtaactggggtcgttttgcctcgtggtctcctattccttatatgtaacatgtgggattgaaaaagatgagtctaaggttcctttcacctgaaaagttttcttatgttctactttggaaagttgaaatcgaggtctgttcctgcaacttatttgacttataatctgtctttggttaaatgtaatttatattttacattttgtttatttatttctttttttttttgaaaaattgcaagtaggtttttttatttt

SEQ ID NO: 33027 - DNA, 1070 bp, Homo sapiens
agtaaacatgtgccatggtggtttgctgcacctatcaacccatcacctagtaattaagcccagcatgcattatctatttttcccaatgctctccctcccccaacctcactccctgacaggccctggtgtgtgtagttcccctccctgtgtctgtgtgttcccattgttcagctctcacttataagtgagaacatgcagtgcttggttttctgttcctgcattagtttgctcaggataatggcatccagctccatccatgtccctgcaaggaacatgatcttgttactttttatggctgcatagtattccatggtgtatatgtaccacattttctttatccagtctatcattgatgggcatttgggttgattccatgtctttgctgttgtgaatagtgctgcaatgagcctaccaaccaaaacaagcaaacaaacaaacaaacaaacaaataaacacaaaaacaaaccaaggaccagatggatttacagctgaattctcttaataactcttaataaactaggtattgaaggaacatacctcaaaataataaaagccacttatgacaaacccacagccaacatcatactaaatgggcaaaagctggaagccttccccttgaaaaccagcacaagacaaggatgccctctctcaccactcctattcaacatagtatggaagttctggccggggcaatcaggcaagagaaagaaataaaccgtattcaaacagaaagagaggaagtcaaattgtctttgtttgcacatgacatgatcctatatctagaaaaccccatcgtctcagcccaaaagcttcttaaactgataagcaacttcagcaagatctcaagatacaaaatcaatgtgcaaaagtcacaagcatttctgtacaccaacaacaggcaagcagagagccaaatcataaatgaactcccattcacacttgctacaaagtgaataaaatacctaggaatacagctaagaagggaagtgaaggacctcttcgaggagaactacaaaccactgctcaaggaaatcacagaggacacaaacaaatgcaaaaatattcatgct

SEQ ID NO: 33028 - DNA, 1075 bp, Homo sapiens
gttataatcatataataatgtaataaatgtagataaacatatttgacaaaatttaacattcattcatgataaaaactcctatcaaattgaaaagataggaacatccttaatatgataaatggtatagaagaaatacctatagtaaacttgatacttaatggtgaaatgttgacagaatccattttatgagcagaaacaaaagtaaagatgtccattattacctgttttattcatgatttactgatttactagcagtataacatatgaatgaatagtatatttactgtaaagaagaaataaaagcgtattcaccaatgatgtaattatgaagaaaatacaaaagaatctatagataaattattaataagaaaatttaggctgggtgaggtggcttgcatctgtaatctctacactttgggaggctgaggtgggaggaggatcacttgaactcaggagttcaagaccacagcaaggcaccatctctaaaaagaaaattagccaggcgtagtggtgcatgcccgtagtttcagctgcatggggggccgaggtgggaggattgcttgagcccaggatttcaaggctgcagtgaatcacgattgtgctactgtactccagccagtgtgacagagcgagacccttttgcaaaaaacaaaacaaaacaaaaaacaaacaaaaactagtatagttgctgaaaccaaagtgatatgcaatagtcaattgcctttttatatattagcaaaaatggtgtaatttaaacattacaaaaaaaaagacagtgctcaaaagtaaatggaacaaaaccaaaaattgacaaatgggacttaattaaactaaagagcttctgcacagcaaaataaataattaacagagtaaacagactacctacagaatgggagaaaatatttgcaagctctgcacctgacaaaggactaatatccagaatctatcaggaagttaaacaaatcaacaaggagaaaacaaataacccattgaaaagtggacaaaggacgtgaacagacacttctcaaaaaaaagacacatatatgcaagccaataaacatgaaaaagtactcaa

SEQ ID NO: 33029 - DNA, 1050 bp, Homo sapiens
aagtttctttttttgttgtatttctgccaggttttggtatcagaatgatgctgaccttatagaatgagtttgggaggagtccctcttctccttaattttttggaatagtttcagtaggaatggtaccagctattccttgtacatctggtgaatctgtctggtcctgggttttttttagttgttagaatatttattattacctcaatttcagagttcattattaatctgctcagggattcagtttccttcttggtttagttttgggccagtgtatgtgtccaggaatttattcatttcttctagattttctagtttatgtgcatagtggtattcataattctctgatgactgtttatatttctgtggtgtcagtggtaatattccccttgttgtttctgattgtgtttatttaaatcttctctcttttcttctttattagtctatctagtgatctatctattttattaattttgttcaaaaagaccagctgctggattcattgatcttttgaattttttgtgtgtctccttcagctctgattttggttatttcctgtcttctgctagctttgggatatgtttgatcttggttctctagtttttctagttgatcttggttctctagttcttctagttgatcttggttttctagttcttctagttgggatgttagcttgctaacttgagatctttctaactatttgatgtgggcatttagtgttttaaatttccctcttaacactgcattagctgtgtcccagagattctggtatgttgtatctgtgttctcattaggttcaaagaacttcttaatctctgccttattttcattatttacccaaaagttattcaggagtaggttattccatttctatgtaattgtatggttttgagtgaatttcttagtcttgatttctaatttgcttgcactgtggtctgggagactgttactattttagttcttttgcatttgctgaggagtgttttactttcaactgtgtgatcaattttagagtaagtgccttgtggcactgagaagaatgtatattct

SEQ ID NO: 33030 - DNA, 1022 bp, Homo sapiens
tttggaatagtttgagtacaattggtatgagttgttctttaaatgtttggtagaattcagcagtgaagacatggggtcctggtttttttttttttttttttttttttttttttgcggggagactattacagctttgatctcattactttttattggtctgttcaggttttggatttcttcatgcttcaatcttggtaagttttatgtgtctagaaactcattcatttcttctagattttccaacttattggcatatggttgctcatagtagccactaataatcctttgaatttctgtggtatgaattgtaatggctcctttttcacctctgattttatttatttgggtcttttctctttttctcttagtctggctaaaggtttgtcaattttatttattttttcaaagaatagactttttgttttgttgatgatttgtatcgtttccttcatttcagttttacttatttctgatctgatctttatttttttttcttctgctaatttttggatttgttctgctcttgtttttatagtcttttaatatgcatcattaggttgtttacttgaagtttttctttttttgatgtaggtgtttgtaggtatatatgtccctcttattattgcttttgctgtatcccttaggttttggtatcttgtctttccattatcatttgttgcaagaaatttttcaatttctttcttaatttcttcatttacccactggtccttcatttacccactggtcattcaggagcatattgcttaatttccatgtgtttgtattgtttccaaaatcccctttgttattaatttctacttttattccactgtggtcacagaagatgcttgacattatttcatttttttgaatgttttaagacttgttttatgacttaatatgtggtctgtccttgagaatggcacatgttcttaggaaaataatgtattctgtaaccatttgatgaaatgttctgtaaatctttattaggtccatttgctctatagtgcagattaagttca

SEQ ID NO: 33031 - DNA, 1260 bp, Homo sapiens
aaagaataattcaaaagctttctaattttttttcctacttcaattaagcttcagacatcagttcacatctatggcaacagtttttcttctttgtatgatgccaggatgaaaatgtactatttttgcaacaccactttcttatacttttatgtcacagatttttaaaggtatcaatcagattaaacaattgaaaaataatatattatttttcatgtatgcaatttcaacaggaagtaagataataaaaaaaattaaagaaatattcctaagggtgttatttttcaaagtgaaactatctcagaattgagaggtatcctagatcaaaccatttggtttagaaaaatggcaacataagtagaaatacatgtatttacatagtgtgtgtatgtatgtatgaatgtacattgtatatccataaatggcttgcaaatttctttctttctcccttcttcacctctttatttcttcctttctttctctcttttataactatctgtacctatctatcatctatctctctgttatctatctatctgtcatctatctatctatctatctatctatcttagttttatgttgatttaatagaacaccacagagtgtgtaatccatgatgaatagaaatttatttggctcacaattgtggaggctgggaagcccaagggaatggcaccagcatctggtgaaggtcttggtgcaaaatgacagaaggcagaagggcaagagagtgcaaaagcaagcaagcaagacagggctgaactcacttttataataactcactctcataacaaatccactttcttaataatgaacctactcctgagataatgaaattaatccattcatgaaggcagtgccctcatggcctaatcacctcttaatggtcctacctcttaatgtcccacctcctgatactgtcacaatggcaattaaatttcaacatgagttttggaggagacattcaagcaatattattttaccccttgtcccccatgactcatgttcttttcacatacaaaatacattcattccatcccaatgccccaaaactcttaacttattccaacaactcaaaagttcaaaatccagagcctcatctaactcagatgtggatgagatcaagacacaattcatcctgaggcaaattcctctccagctgtgagcttgtgaaattaacaaactacgtgcttccaaaatacaatggtggggtaggcataggatagatattccaaaagggggaaataggcaagaaaaaaaagt

SEQ ID NO: 33032 - DNA, 1044 bp, Homo sapiens
tagtttgctgagaatgatggtttccagcttcatccatgtccttacaaaggacatgaactcatccttttttatggctgcatagtattccatggtgtatatgtgccacattttcttaatccagtctatcactgatggacatttgggttggttacaagactttgctaatgtgaatagtgcctcaataaacatagatgtgcatgtgtctttatagcagcatgatttgtgatactttgggtatatacccagtaatgggatggctgggtcaaatagtatttctagttctagatccttgaggaatcaccacactgtcttccacaatggttgaactagtttacagtcccaccaacattgtaaaactgttcctatttctccacatcctctccagcatctgttgtttcctgactttttaatgatcgccattctaactggtgtgagatggtatctcattgtggttttgatttgcatttctctgatggccagtgatgatgagcattttttcatgtgtctgttggctgcataaatgtcttcttttaagaaatgtctgttcatatccttcacccactttttgacagggttgtttgtttttttcttgtaaatttgtttgggttctttgtagattctggatattagccctttgtcagatgagtgattgcaaaaattttctcccattttgtaggttgcctgttcactctgatggtagtttcttttgctgtgcagaagctctttagtttaattagatcccatttgtcaattttggcttttgttgctattgcttttggtgttttagacatgaagtccttgcccatgcctatgtcctgaatggtattgcctaggttttcttctagagtttgtatggttttaggtctaacatttaagtctttaatccatcttgaattgatttttgtatcaggtgtaaggaagggatccagtttcagttttctacgtatggctagccagttttcccagcaccatttattaaatagggaatcctttccccatttcttgtttttgtcacgtttgtcaaagatcagatggttgttgatg

SEQ ID NO: 33033 - DNA, 1048 bp, Homo sapiens
ttgcttgattttttagcagtaaaattcttcaataggaagtgattcattgtacacatcctgtcctgtaaatggtcaattcggcaaatgcctttgcttctctttttaaaactgtcaagtttctctgactatgtattttcccccatcatctctgttatgaattatgttcccccaaaagagatgtccccaatatctcagaatatgacctatttggaaataagatcattgcacatgtaattagttaaattaaagtgaggtcatatcaaggtagggtaggccactaatccaatatgtttggcatcctgataagaagagggaagataatgtgaaaagagacacacagggagaaccctatgtgaccatagaggaagagatcggagtgatgcagctacaagccaaggaacgctggccaccactagagctagaaagaggattctctccacagtctgagggagaatagcctgctaacaccttgattttagacttctagcctccgtaactgtgagaaaataaatttctgtttctgtaagacacatagtttgtggaactttgttaaagtaaccctaagaaatgaatgcaataatctttgccagtaatatactacatggaccagtctaactacagtcatgtgccatacaatgatgttttcaacaatgttcttataagattataatgaagctgaaaaattcccattggctagtgatgtcatagccatcctaatgttttagtgccatgtgtgactcatatgtttgtggtgatgctgatgtaaataaactggctgctctagcagttgtataaaagtctagcacatacaattatgtacggtacatcatacttgataaataaatgactgtattagtccgttctcatgctgctaataaagacgtacctgagtctgggtaatttataaaggaaaggggtttactggactcacagttccacatggctgtggaggcctcacaatcatggcagatggtgaagaagaagccaaggcgtgtcttacatggcagaagacgagagaggtgcaggggaactgccctttgtacaccat

SEQ ID NO: 33034 - DNA, 1081 bp, Homo sapiens
cactcacataatagcccattaatccataccaattaattcatttgccctttattccatgatccagaaatggattaatttattcatgaaggtcctcatgatccaatcacctcttaaaggccccacctctcagtattgccacattggggactaaatttcaacatgagttttggaggggacattcaagccatagcaattccctcattcactatttgctggagtttgtgtagtaaaagcaggatcaatatttggttctttccctttatttacaagttttcagaataatgagttggtttcttatcatccctcaagagtatcaataatgactccccacttctttcttcattattgagatggttaattttatatgttaactagactaggctaagggatgttcatagggcttgtagaagattatttctgggtatgtctgtgagggtgtttccagaagagattagcattttaattggtagactgagtacagaagattgcgcttaccaatgtgcgtgggcaccattcaatctattaagggcctgaatagaaagaaaatgtggtaggagggtgaattttgccctctgtttgagttgagctggcacattgatcttctcctgtgcttaacattagcactcctggtttggactagaactacaccactagcttttctgggccgccagcttgcagatagcagattgtgggactcctcagcctccataattatgtgagccttcataattatgtgaacctccataataaatctctttctctatatatctctttagttctgtttctctggagaaccctaatacaagtatcattgggaactcataggatttaagtgaatttgatgtgttttaatccattgcagttattattcttattcatgtacaaatttccccatctttggtcagcaagcccttcttgactcctaggtcctctcgacttgacctcagtagtttttgatagctttcctgctatctgtcaataaaaagatttttcaggtttatcttttatattcccttctcatgtatcaaaatttaagaggaaaatacaaacatttcttaataattttcctgacaaggaatgg

SEQ ID NO: 33035 - DNA, 1048 bp, Homo sapiens
tggcagcttctgtgccatccattcccctctcagtccatgttattgaatgaaatcccagacatcatgtcatttaatttgtgaatactttaatatgtatctgtaaaagataaggattcttattagaaatacataagcccaatactgttgccactcttaaaaatctaacagtagtttcttaatatcataaattatactaataatattaaaattcccaattgtcttatgaatgtcatggatacatttttctttatttccccctcaaaatcaggatcccagcaagatcctcactgctaattggttgacacatttttaaagtcttttaatctataggttcccctctgcgtcccttttttcttgctagtttttgtttgtcctctagagttttccaaatctgattattcttgctgaatttctgtgacgtagttcagtagttcactatgttcctctgtccttggtattttctgcaaattggtagttacctctagaggctttatcagattcaagttagattactttggtgagactgcctcacagattggactgtggtcattcatcttccataagaagactcagacacagaatatctggttcttcctctcactctctttctgaaaagggcaacaattgatggcaatcagtgcctagaccctttagttcattagggattgtagaatagtaatattctaattctatcatttttacaaatttactgtctagaatacttttttattttttatttttatttttttctataggtttttggggaacaggtgctgtttggttacatgagtgagtcctttagtggtgatttctgagattttggtgcacccatcacccaagcagtatacactgtaccaaatttgcagtcttttatctctcacccccttctatcctttaccccctcccccccgtgtccccaaagtccgttgtatcattcttatacctttgcatcctcatttggctggaatatttctgtaaagagaaactttctatattcatttgttttctgttgcttataacagaatgactcgaatcaggtaatttataa

SEQ ID NO: 33036 - DNA, 1046 bp, Homo sapiens
caatattgtgaaaatgaccatactgccaaaagcaatgtgcaaattcaatgcaacccccatcagaataccatcatcattcttcacagaattagaaaaaaaattctaaaatttatatggaaagaaaaaagagcctgcatagccaaagcaagactaaacaaaaagaacaaatctggaggcatcacactacatgatttcaacctatactataaggccatagtcaccaaaacagcatggcactggtataaaaatagtcacatagaccaatggaacagagcagagaacccagaaatacacccaaatacttacagccaactaatcttcaacaaagcaaacaaaaacgtaaagtggggaaaggatacccttttcaacaaagcaaacaaaaacataaagtggggaaaggacacccttttcaacaaatggtgctgggataattggctagccatgtataggagaatgaaactggatcctcatctctcaccttagacaaaaatcaactcaagatggataaaagacttaaatctaagacctgaaaatataaaaattctagacgataacattggaaaaactcttctagacgttggcttaggcaaggatttcatgaccaagaacccagaagcaaatgcaacaaaaagaaagataaatagctgggacctaattaaactaaagagcttttgcatggcaaaaggaacagtcagcagagtaaacagacaacccacagagagggagaaaatcttcaaaatctatacatctgacaaaggactaatatccagaacctacaatgaactcagacaaatcagtaagacaaaaacaaacaatcccatcaaaaagtgggctaaggccatgaatagacaattctcaaaagaagatatacaaatggccaacaaacatatgaaaaaatgcacagcatcactaatgatcagggaaacacaaatcaaaaccacaatgtggtaccaccttactcctgcaagaatggtcataataaaaatatcaaaaaacagtagattttggcgtggatgcggtgaacagggaacacacttctacacagc

SEQ ID NO: 33037 - DNA, 1050 bp, Homo sapiens
tcattttacttctttatgtattctgtttcttcactaagactccttcctcaatattttcatttgtttcaagtgtgtttgttattactcattgaaacatttttatgactgatgctttaaaacatttgtcagataattctgccatctctgtcatctcacagttggcatctcttgattatgtttttcattcagtttgatatcttcctgtttcttgatatgacaggtgacttttgataaaaatctggatattcatggtattgtaagaatgtgtggatcttatttaaaccttctgtatttgctggctttctgaaacactgctttagcagagaaagggcagctgagccttgttactgccaggtgggggtggaagtccaggtttcccacttgacacctgttgacacttaaggagagggctccttattactgctggtcagggtgaaaattctggctcccattagatctcttctgatacctgcctatctggaaggtgtaggagtgccttgttactcctcacatagtcttcactgacactatgggaggaaggtggcctcattacctctggacattggtgaaaattctgattcagtggtttgcctcctctcacattcaccagtggggatggtagggagctcattactggccagtggggataagagttcaggctccccacttggccttctctgatgcaacactggtaggggtgttgggatacattattatagcctggtgatggtggaaatctaggttccccattcagcctttgttggcacggacaggattggggtacagtttttttctgttgtgtttggctgcagtaaaacaatttttatctaaacactttctgtcttgcttgcctgctcctttcctggtcctttggctagacagcatgcattttggggctttaagaaaaaaaatctacacttggtgtttactgtatggctgtcttctttagctctgagtctgggatatataaaaacagaaagaccaaggtactcaacatgtcattcctcaagtcttgagtttcctagccagacctcagggtctgccttcttt

SEQ ID NO: 33038 - DNA, 1048 bp, Homo sapiens
aatgaaatttgaatcacaacttaccaaaacctatgggatacagcaaaatcagtgctaagaaggaattttatagcaataaacatctgcatcaggctgggcgtggtggctcacgtctgtaatcccaacactttgggaggccgaggtgggtggatcacgaggtcaggagatcgagaccatcctggctaacatggtgaaaccccgtctctactaaaaatacaaaaaaaattagccaggcgtggtggcgggcacctgtagtcccagctattcgggaggctgaggcaggagaatagcatgaacccgggaggcagagcttgcagtgagcagagatcatgccactgcactccagcctcggtgacagagcaagactccgtctcaaaaaaaaaaaaaaaaaaaaaaaaaatctgcatcaaaaaggtagaaagatttcaaatacttaatctaatgatgcacctcaaggaactagaaaagcaagaacaaaccaacctcaaattagtagaaggaaagaaataataaagatcagagtagaactaaatgaaatagagactaaaaaataaaaggaagcaacagaatgaaaaattggtgtttagaaaagataaacaaaatcaataaaccacgtgttagactcaccaacaagaaaattgctgggcatggtggccatgcctgtaatgccagcactttgggaggccgaggcagcaggattgcttgagcccaggagttcaaggccagcctaggcaacacagtgagagccatttctacaaaaaaaaaaaaaaaaaaaaaatagctggatgtggaggcatgagcctctaatcccagctactcaggaggtcgaggtgaaaggattacttgagctcaggaggttgagactgcagtaagccctgattgcaccactgtactccagtctgggtgacagagcacaaaactgtcccccaaaataaataaataacaaaaatgtgatctgatgagaattgcaaaatttcgagatagtaagaaaccaataaatgaaaaagatatatcatgtcttgtgataggaaagttaatttatagattt

SEQ ID NO: 33039 - DNA, 1031 bp, Homo sapiens
actaacatagcaacagaaaaccaaacaccgcatgttctcactcataagtgggagttgaacaatgagaacacatggacacagggagggcaacatcacacaccagggcctgtcagggggttggggggtaagggagagatagcattaggagaaatacctaatgtagatgatgagttgatgggtgcagcaaaccaccatggcacgtgtatacctatgtaacaaacctgcacattctgcacatgtatcccagaagttaaagtataataataaaaagaaaatgtaaaactgaaaaaaaaaagttggaaagtaaaattacatttttttacttcccagtcgtggctgttttttgtatttggttttgtcaaaaaattgtttgccatagtattactagatcatcctttttttatggaacaaaactaaaagctcttcagttgtgacaattatctctagaagcctttcaatagaaaggagatttagatatggctactttttttttctttcaatgtcttctaggagccagacactggactatgtatttaggcatttatcatttaatttaactcatccgatggtacaaaagataaaataagaatgaagaataaaagataagttctgaagacactgagagtgctctttgggcttcatgaactcttgagattgaggttgtagttcccaaaattcagtgtgcattaagatccttggggtgcctgctcaaaacaggaattttttagcctcaccctaagtgatttggtttaagtaaacctgggatggagttcagagatctgcattttgaacaaacaacagttaaccttgatacaggggacccacactcgttagagagaatgttttgttttaaaagtaaagaaaatgaaaataacatgttcttttaatgcttaaattaacttattgctggaattattaaaatgagaaacctccaaagttttggtactttaagtcagatttattcatttttgaggtggtaagtcttgaacctgaaagagaagccactgtgagggaaagggattataaactca

SEQ ID NO: 33040 - DNA, 1634 bp, Homo sapiens
gttgtttcttctgagtcagtgatatgtgatcttcgttggtttcattttgtgaagctcagtctgtctctgtaacatactttaggatttgcaccttgtgctccccaggaattatgttagtgtccttttctatgctgtcttcaaggatggacagaggcctaaaccacaacaacaacaaaaattagaaaaaaaaatacttagatttcggtaatcatccataggaactcatagcatcagtctcttttctctgtgaataatatctttgtgtaagttgtcataaaaaatcaacgttagaagatgacaattagaattcttcttaggtattgagggtaagaagttgtaaagaaagaaaattcgtgtttcaactaaaagattggattgcatatacctttgaagtggttttgtaaaaaaagttcagttactaaactgagtgtgccctgtaatccttttgagtgcactgaagatgctttgaaaatactttgttggtcttcacattgtgcatcatgtcctgcaacttgtaaatatgtgcatgttgtttatgtttgtctgcctgtctcttattgcactaaattctgcaaggtgaataatttttttataccatttatttggaaaaagttcctcctccaactcttcttcactgaccttttaattagttggtaaacttagaaaaccaggtaggatttttgaagccctgagtttaaaagaagaatcgtggctatttgacatcatccttacattcccctgacttaaaaagctaacaagaagcacgagatcttccacctcattttagaaagcttttctacagaactatatgcttgcttatagctacctatctacagtttgaacagggagaaagggagatatgtatgtctggttacatcttccttcactcttgaattggctgggacagcaagcaacaacagtttgaggtccagtgacctacgtaaaatgagtgtcgtttgtgtcaggggacacatgtaactgtgcaacatggtattttctacagggagggctaggaagggtggttttggaacctaacctactttgtgtcttcattgtcagaactaaggttggaaatgccctttaaagaacttggtgaggcatatgctaggacaatagagctgctttagaaagaaattgagacatgttttgtcaggacagataaaagtttaatgcaggcttttgaacagatgttttaaaacaaatttgaccttaccaactatttttttcttctagccaaatcattgtacaggagtttcatatatgataaaaagtgttttgttattgtttttgctttcttggcaggggagaacccctaccattgtgagcagttactgtcactctggctgaatggacaaatagctgtgtaaatagcttctcataaaacgcttctactgatagctgtttgactttttcttcccgttatgaatgggaggaacatttgtaaacttcctttctgggtagctaccaaaaaacgtactggcttatggtcccatgtgaccttgtctccgttaagcccagaatctgagtgcctttagcaagtgttagcatttcacagagagaagagagacagaattattgctattaatcaccattcataaataggagcttggaataacaaaggtctgtgtgaattc

SEQ ID NO: 33041 - DNA, 1078 bp, Homo sapiens
catagcatgtgacctacctaccccatcagaaataactttttatcttgctcaagttctggtcaactagtagcctgacggcttagaactttgactatttaaaagtttcattttcttttgcaattttagttttatgtactgttaaagaattgtactgaattctttttagatcacagtaaaaataggttggcagagatttcagtttcccagggcttaaccagaaccgccacctcaatgcattgtcagtagaatacattattagaaactgttaaggtctttcccgggacatttttttctgccattttcttttgcaattgtagttttatgtactgttaaagaattgtattgaattctttttagatcaaagtaaaaataggtcagcagagatttcagtttcccagggcttaaccagaaccgccacctcaatgcattgtcagtaggatacattattagaaactgttagggtctttcccaggacatttttttttctgtatcatgtctccccatcattgaagcgcaaattttcttgaattcaaatactcccaatgagcttgtatacttccaaacagctaaacttgatttccagttgtggatttcacacatataattgccgccttcttccctcctcttttttcccccctagttgaatcagcttgtctaacaagcccattttcatgccccagctgtgctgtgggttttccaagcctcatatttgaatattcaatgagtttaagatggatatgatttcaaaaaatagggccgggcgcggtggctcacgcctgtaatcccagcactttgggaggccgaagcaggcggatcacgaggtcaggaggtcgagatcatcctggctaacacagtgaaaccccatctctactaaaaatacaaaacattagccgggcgtggtggtgggtgcctgtagtcccagctactctggaggctgaggcaggagaatggcgtgaacccgggaggcggagcttgcagtgagccgagatcgcgccactgcactccagcctgggtgacagagcgagactccgtctcaaaaaaaaaaaaaaaaaaaaaaaaaaaatatatatatatatag

SEQ ID NO: 33042 - DNA, 1089 bp, Homo sapiens
tagaagccgtgggtcatggaagagaaccatggaacccagtgactagtgttcagctcaattaggatgaacccgggcacttagccgtgtgggaacaatggcaagcctttagcccaattgggagcagcaatgggcgcctcgctggatcaggagcacagtggacaccctgctggatccggaggcatggaagtcgccggcgggtctgcgatggcggcaagcagcagtgttggatggtgagcgaaagctctgctccagccttagcaaacacggaccagaagaatgcagttgcaagatttaatagagtgaaatagagtgagaacagagctcccatacaaagggaggggacccaaagagggtagcctcatattgaattttttaatttttaaattttaatgttacatttcaaacattaacattttacataattacagtacaattgtcaaaatcaggaaattaacacagatttaaataaataagacttccagattttttattctcaattcatagcatctgttttataggatattaagaacctgaaatcgcggactttgaggtcagactagtatttgatgttgtggtcttactactcgctagatgtatgatatcgaaaacatttcctaacccttctctgcctcatgaagaaggagatgatgatgaggaggatgatactaataatatctgcatgttagtatgtgtggggcatttagaatagttcctggtacctgagatagtccttgacagtgttgagtggtcccaaggtgcagtggaaccagattgtcccagctctgcattggacaattgtggcattggccgagttttatttttattttatcaacattttagtttgaattattttagacttacaaaacagttccaaaagtagtacaaataattcctgtatgcaccttattcagactccccaaacattaacattttacataactacagtatagttgtcaaaatcaggaatttaacacagattcaaatgatattgtttaatctatatactgtttacatttcattaattgtgtactaatggcctttccctggttctagttatttaatccaggatgaaattttgcaggtagtttt

SEQ ID NO: 33043 - DNA, 1117 bp, Homo sapiens
ctaagtatgttatcaccctgtggtgttgagcatatcgtcccaaaaacctgcttcagcaagcagttcttggccaggcatggtggctcacacctgtaatcccagcactttgggaggccgaggcaggtggatcacgaggtcaggagttcaagaccagcctggccaagatggtgaaaccccatctctactaaaaatacaaaaattagccgggcgtggaggtgggcgcctgtcagctactcgtgaggctgaggcagagaattacttgaactcaggaggtggaggttttggtgagctgagatggcgccactgcactccaacccgagcgacagagcaagattccgtcccaaaaagaaaaagcagtttttgccatcagcaaggatatctcctccactttaatggacaggcctcatttttggcagctatgctgtttgagatgtagactgaatatccaaggttcctccctagctcaagtttttacttgtgattacacacaccacattgaattccgtcttcagaggcaaagatttgggcttcatatctcaacagcaaaagggcctgttcagcaattcccttcattttagactcatatgacctcagcgattgcatgatagtagtaaactagtctcctggaaataatggatgtaggtgcttctagaatatgttacagaatttcagacttaacctattaatagataaatggatcttgacttaaggtgacaaaatgaaacttttattattgcttaaaaatgctgtgccaatattgtataactagctcctctaatacttttggtattttggatttaataataagaccttaagcattttaaatgtgaacatgttcagggaagtatgctttgatgtaaatgtctcagatctaagttgtaacacaattgaatacttgtggcttattcttggtttaacttaggaaaactggttaaacaatcccccatttgggcctgtcatcattttaatagtgacgatgttctttctgaaatcttcagggtcggagtcaggctgaatttttttaaaaattaaatattatgttcaaattctttcctttttgccattgtgaaaaagcaaaattttaaatgatttctcctgttagaatttttaaaaatac

SEQ ID NO: 33044 - DNA, 1047 bp, Homo sapiens
gcacaaaatactggtttctaagtggttttgcttcaaaggatgtctagatgtaagtgattccacttaaagccaaaataaaaattcctaaagcagttcttaaaggagttagagagctatattaaacagtttttctgtggtataataatgtgtctcttactagaagtcccccacgaccaagttaaagatacttttcctgttggattctcttttacaaataagtctaaatgactgataatagaagattgttagtcttgcttgatggtaaagtcttggattattctgatatatagacgtgcattgttttgtaacttagttacttttcagataggtctgtgttaacttttgaacatgtgtaacttaacctaaatactcccaaactttacctctaaatttttgtttttatgttgtgaatgtgctaatatgtgcatcaactgtaaagatgtatcagttttattaaaatcagttgacaattagaataataaagtggataaaggcaaattaagatataggaccaaaacagaatattgtagatggcagttatgaatgtatatttatattttgattaagatttctattaactttttggctgggcagagtggcttacacctataatcccagcaatttgggaggccaaggtgggcagatcacttgaggtcaggagttcgcgaccagcctacccaacatggtgaaaccccatctcttctaaaaatacaaacattagccgggcgtggtggcacattcctgtaatcccagctactcgggaggctgaggcaggagattcgcctgaacccgggaggcagaggttgcagtgagccgagattgtgccactgcactccagcctaggcgacagagtgagactccatctcaaattggaaaaaaaaaaaattatatgaacttttgctattaatgtttatttgtaggctatttatatcacttcataaagaacagttctttgagaaaagaataaaggaatgtattcatttccagaaaaagagggttggggaaagtttgccatgtaggttagtcagaagaaagcaattctattat

SEQ ID NO: 33045 - DNA, 1031 bp, Homo sapiens
gcagcttctacaagatgacaatacacattaagccatactggggactgtcattaataacaagtcatacagagtaatttttagctatttttaaaaatcaaaattatacttaaaggaatccagttgtcctatatagcttgttaccaaaacacagcagttgcttcatccccaacccatagtttctgctccccaaagtaactacatttagtaatttacctacccctcctctctccccgccccctttgttttgttttgttgggacagggtctctttatgttgctaaggttggtttcttcccgcctcagcctctggagtagctgggattacaggcttgaatcacctcacctggcttacttacatatctctaaataacatgcctgtattgctgttacttgtttaaaaaaataaaaattcaggtgttatctgttgttgacctattatcatggatgagaagggttgggttttaagctgctcctgccgtagccatgttcttcccaaccagtttttcccatatgatagattttgtttagaaccacattcactgtttacataattccgactttttaaaaagtcatttgctgctgagccatgagatgtgttatgacttcttttgccatgcagcttttttgtattttctagagttaattttttggtttatattcttagtttctatgtgcttctcactaatgaatcttcacactttatgccagttttgatgtgtctcggagcggatccattttcgttcattgtgctgggtatttagtgagcctttttgatccggaaactcattaccctatagaacagggacatttgggggtgggggcttgttgaattttatttcttctctattatcatcattccctttttctagatctcccattatgttgaaaatgggcttcctggactgatccttttgactttttttgttttttaagaatttttattttacttaactttattttattttattttatttttttgagacggagtcttgctctgttgcccaggctggagtgcagtggcatgatcttggc

SEQ ID NO: 33046 - DNA, 1047 bp, Homo sapiens
caacatagacaaatacagcagaagaagcagtgagatatacatttgtctcaggtgagtggagggatgattttgagtcctgtcctatgtccccacgcctgtgaagataagctatcaattcacattgccttggtgaccttcaacagaactgctttagggtagagatctcggggcccacaaggatttcttcaggggccaagtgtgagggaggtgtgtagcttttcatctttgtagccatcttatctaggaaccataatgggaggcaggtttgcatgacccagcttgacttttcctttaggcttagtgagtctggggttccaagatttattttcctttcacagatgtctttatgtgtaaggatttagatgttttatctgatcaggaagattataaaagtgccagtttagtgatttttaggaagtgattactgcatgaacacacgttcttgaactttcctccaatcacacgatgttaaactgcttgtgtaaataagagcttagaccagtggatctcaaactctagagagcttcagactcaccgtgaagacttgctaaaacacagattgctgggctctaccctcaaggtttccgagtctgtagtcctgggaagggatttataaatttgcatttctaacaggtttctacgtgatgctgatgctgctggtccccacactctgagaaccacagattgaaactgtttggttaaattagtggttatcaaccctggttccgcccttacacacttgaagagtcaaggccttagggtgggggatgggccacagagtcaggtgctgctaatgaggtggggcaagtatttaaatcttcaggatgtggatgtagtttgagaaagcccttcaaataactggttgttttcttctattctctctccccctttgaaaccactctcctctacccctcaataggagagtcctggtgcaaatgaaacagtgctcatggattgttttagtcctctcccagaaaataaaacacagcctttaccaacagttgccccaatgcttcttaaggagttcagtagaggaagaagtagtta

SEQ ID NO: 33047 - DNA, 1047 bp, Homo sapiens
cttaatttatttgaaaatagccttcctcgtcaccctctaacctcttgaagttcttgcagtttttttcttgcatacgacttatctgtacttaaaattatgttattgatgtgctgtattatttatctcctagacagatacagaacaaagcactgtggcaataggaagttttgttttgtttactaccgaatctctagagcctagaatatgtttggcacatggtcgggactcagatatttgttgaatgaaggaatgaatgcatgaattaatatttgttgtatcttagctaatgccgtttcaaatggagaagacggtttccagagaatcttacagcgttagtgctacgtaaggtgtttggtgatgctgctacagcttctctgaaagctaacaagttaccaactttgagtgttttcacgttatcacctttcttttgtatgccctctggtggagtgatgataataagcggcaagtgagtagaataggtcaagaagaaactaaaatacaagaacctagatcacaaactggataattaacttaaaaaaaatagatttgaaaattttaactttagttaagcctcctgaataattacaatacgattagaaagaatgaaaagaaaatgagccacagatttgaagagagatctggcttaggatgaaaaaataacctattgagcacacccaaaatgtttggatctcttaaaagaattcctgcttaaatatacttctgtcccttgaagtattttaatatttttccatctttagttcaaagacctctttctctcaactgtagtaataatttcagtgaacctttattgactaccatgtgtcggttaacgtacacaagtggtgaagccagtgttcaaactccagcagtggaggaccagagtcagtgccctaaatcttcatgcttcactaccacctttgtgccaaggtcgtgtggatggtacagggaccggagaatttcctttggagcaatagttatggacagaaaaatgcttggtaagttcacagtgtgtgttcctcagttccattttccagtatgtttatagag

SEQ ID NO: 33048 - DNA, 1008 bp, Homo sapiens
tccaaatttctgggataacaggtgtgagccaccgtgcccagcccacatgttgcaaaattgactgctctttttacctgcgcttgcacccattagcaatgtaagaaggacccaaaaatgttaccttaaaatataattgtgtaactatgttacctctgaaattataaggtagcagcttctataatgcagtattaacaatactttctaaagcattttcaaaatttattgtggccaagcatggtggctcatccctgtaattccagcactttgggaggccaaggtgggaggatcacttgagcccaggagttcgagaccagcctggacaacatagtgagacccagtctctaaataagaaaaaaaaattaattcttgtgcagaaaccctgagtagctttttaaaatgttatcgatgacaaaatgattatgtttattatgataatgtttattgcttataaaatccagatattataaaacttttacttgtttatgtgtgttcaattgcaggttttttcttagtttgttgcctaagagtacaccaaatgtgacatcctttcaccaatatagattacttcataccacattgtcaaggaaaggactagaagaattttttgatgacccaaaaaactgggggcaagaaaaagtaaaatctggtgagatacttggatttgtcaacattagatatatttatggaacccccccccccgccccgcccaaccatcgttctaggattatatatccagtttaggaattatttagatgtttcctttttcagttttctttgagactgtctactagagaaaattaaagggacaatataatagtagagttaattgttccttggcagattggcaagatggttagataaggaataggctgaaattattaactaaagtaaggtttagggcttattttagattttattttttaatgataatttaaagtttgtttatttatttagagatggagttttgctcttgttgcccagactggggtgcagtggcacaatctcagc

SEQ ID NO: 33049 - DNA, 1042 bp, Homo sapiens
tcctgtcaagccccaagcccacaacttgtcccggctccctccggatcccaccaaggtcaccctggaagcgtcctcccttttctcgccccgcacccgcttcacgcccgttctccctaggccagcacccaccagcagccttcggaaagccacgagtgaggaagcccccaaatccgaggcgagtgccaaggggccggccagacagagctgccaccgcagtaaccgaaacccgccgcaacaaactcatggccgccatggctactacgggcaggaggaagaagggaggcgggtcacggaagctgagagagccaatttaccaatgaggacaaaggcaggatgtggccatcttaagtgagggcaagttttctattctcctcaccgccggcttgagacgccggaagtgacgctatcgttggcggaaacgcgttttgccagttatgcgaaaacatggctgcggccggtttggcccttctttgtaggagagtttcatccgccctgaaatcttcccgatcgttaataactcctcaggtccctgcctgcacagggtaagtgatgtataaagtaggtttgcccacctctccaactttggatcttgtttggttgccgagatgccgagatgccgagaacaactcaagaatggaacggccgcctggatggcagagccggagcccactttggtgaggagtgagtgaccttggagaagtcgctcacctccgacatttctattccttcctcattttgttgctgcctgctgtggacaagacagtatatggggtttgtagatgtccagcatttgttgaagtaaatacatctataagtacagaagcatcctcttgggctgggtgaggtgcgaaaaactttaccgaagatgtttttgttgtgatactcaagtctgtgtcaagtttggatggattaaaaaagaagagatatttgtatttacaggatgtgttacaatgaaagtaactggtaacttagtaacttcttttatttatttatttttcttggtcctggatccagtgaagtatccatttattacattggttgc

SEQ ID NO: 33050 - DNA, 1031 bp, Homo sapiens
tgctctacctccttctgatttagccattttcaaaataagtgagttggagactaaggattagggtccacaggaagtactgcagaattctggaaaataacaaaaattatgaaatttaaagatccagtgcattatgaatacacataattgttgtatttcactagcagtaaaatgaatgaacttaaccaaagaggtctgaggacctgtttatattcgcattctattaattataccatgagcaaatgttgtgtctactaaatgcactgttcccattgcccggaaatttgaaaccatcatacaagggggtccagtatttattccagagacaaagattggtaatctctcattagtttcaaaattccccatattactttatctttagataagtatttccttggtacttgatgactttactgtttttaatttgcattttatatgacagctagtcccaagcattatttgaggtgactaaataataatagtctacattaactgagatctcattccatgccaggatgtatgggttctgcatgcattttataattaaattctctaacaatgctgtaacacagataatgtgagtattcttataaccctcatttcacagattaagaaattcaggtgcagaggggtcaaatcatacaatgaggaaggttaaggagcaaattcctattcaggtctggttaactccaaaacccatctgctataggttctttttagcataaagtgtacatgagatatgggaggggagcactaaaaaacagaagaaaagctctttggagaaggataggatagcaataacttaattgctacaagtacctctgctatatccagctccaagtttcctgacagagctcaaaatatggaactgtttgattgggaaatcctcttaatctgacaaataaaaatataaaatcatcttttatttagaataaatatttagaactgtttctctcctgcccccatatggtaaagatattggatatgaaaagagttcacatcttttataaaatattttgcaaaagatatagaag

SEQ ID NO: 33051 - DNA, 1025 bp, Homo sapiens
caacagaaaattgcacagtcaatttctgctggctggactgaactgaagatcaatcctcacaattcagactgagggttgagacaaaactttaaggatacatcttggaccatatcgtatttcattcttctaatggtggtttgggcttgtcttctagtctgggccgctctaaacatttataattccaacattgtggatttcatcttatatctgtggaccatcctagtttattctcccataagtcttagaagctttatggtgattattttgaggttttcattctcgcataaagcacaatgctgtcttcatcagaaaacagttggcataagaattaaacatatgaacatcacaaaacaatttataaaaacttcttaaatatacgctttgggctagttgcaaagactatgctaatagcacttccagtgagagtgatatatttaagtgtactggatctggaatggtgttttggtttggggggaattttttttttttcctggcaaatcacatgtgttgttgatgtgagtatctgatgaaaaaacaatgtcagaataaccgacatgaaaattttttaggataacttggtgcctacctgaaaaatgtattgtgttttagactcttgatttcaaaaggttccacagaactagtctgcgcttaccttacccatgtttatatatagctgtcctacagggagcttttatttagaaaatgtctgcataatgttagattcttctcctgtctacattatgcactacataattggacttcattatgcttttgaaatgcttatctgcctgtcacataagttaaactatttaatttgttttgaatgttttggattgctacacaatacaatattctaaatttaggcatgagggtttttttgttttgtttttactttttttttgtcatcgcactatggaacacaaatggaattctcttaatttataagaagatagttgcagttaaattttgaaaatggttgtaatgagccatgaagttcaatctttataatataggtactgctcttt

SEQ ID NO: 33052 - DNA, 1048 bp, Homo sapiens
gtttcctcataagcaagagaccatacttttagttaatttagatagtagacgcgattaattactgtgtcagtagtgtctaatacagtttaaaatgattgttatgctgattactatacattcttatttatccactgaagctgacttctactagtgaaagtgttgatagtctagtgaattatgtaattaaaacgaatagcctgtttcttttaaaagtaattatttagaacatttaatcactctagacctcttcttcccgcagctaacccccatgcgtgtttatatttatgtaatataaaaagactgaattcgaactatttgatttttaaaaaagtagttctaggaaataaatgtaagccctcatgggaataagtaagttattaatttatagtgaaacagttaatcttttataaacttaattttacgacgcagatgtgacagcatagaaaaactaaaggcccagatacccaagatggaacaagaattgaaagaaccaggacgatttaaggatttttaccagtttacttttaattttgcaaagaatccaggacaaaaaggattaggtaagaatttttaaaaattatatttggtgtttcagatatattcaaatacattgacagtgtcgtttttgtaatagaaagttatgtgttttgagcataaagtcatgaaaataccagttattgaaaagtaattagaaacaggaaatttttaatcagaaaataccatgcacattgagtaagtttaccctgggtactatatgtgaaccactgacttttgctttatgaaaactacagtcaatatagaagatagttgttaaaattccactgacagttatttatttatgcattcatccattcattcattttttcattcatgaccctgaagatattttaggatcttaggatctatagaaatagcactataagatttctgagtcatagaatgccagataaatttattcttttttgttatgatttatttgaaaactataaggatgaaaaatgaagtgcttatcattcatagtcttattatccagaaataaccactgtaa

SEQ ID NO: 33053 - DNA, 1028 bp, Homo sapiens
atattctgttttatgcattttacagccttacaactattgcatttctttgaaaacttgataatacctaggtagttttaacattggaatactgaagattatattgcctgatcttatttaattattactctagtttattccctttaaataagtatttaaataaatggcatatattacatttgagtgctgaatcattgtagctgtcacatggttttgctcttgggaagttccccactgggtttgtagtagaaacagagaaaaaatccatctgttttttcttccacctcaattttctatccaccctctcatcccctataaaatcattcttctctggttagtcacctttttctcttccttgtgttgataaaaatttaaatctttagtgccatactgtcaaaatcagaacactgcctggtacacctttgtggcttaggaaaaggggatgggagtgttacagctcccctaaattggtcaggtatactccagctttattctaggatagcctttgagactacagaattgaattcccttagtagggaatcaaatgttacaatgtattctaggaacagagagctgacagagaagtggtaagagtgcattgtaagtgtaagaagtggagggtacttatcagactttataggaatgggattgtcaatatcacttggcttagctggagtccgtactgtcagttcttggcctggtagaactcagtagcctttatggtgttggaagtgggtaggtacaccctgtttcttcaaatatgttgatattgccctatatagtggaaatttataccaaaccagttaaaatagtttacatttggcctggcgcggtggctcatgcctgtaatcccagaactttgggaggctgaggcggttggatcacctgaggtcaggagttcaagaccagcctaggcaacatggcaaaaccccatctctactaaaaatacaaaaatcagctgggcgcagcagtgcgtgcctgtaatcccagctactcgggaggctgaggcaggagaatcgcttgagcctggg

SEQ ID NO: 33054 - DNA, 1903 bp, Homo sapiens
tgctttgtttcctagggtggtctcaaactcccaggctcaagcagtcctgctttggcctcccaaagcactgggattacaggcgtgagtcactgctcccagcccagctatttcacctttttatccttcatgtgtttactggagaagcacttttaacttccttcaagaacttttcctttgcattcacaacttggtggtttggcatcagaagcctaacttttggcttatctcagcttttgacattccttcctcactaaacttaatcatttctagcttttgatttaaagtgggagatatgtaactcttcatttgaccacttataggccattgtagggttattaattagtctaatttcaatattgtattgcctcagggaatagggagacccatagagagggagagagacaggggaatggctggtcagtggagcagtaagaacacacacaatattgattgaggaagttctctatcttacatgggcgcagattgaggcaccgtaaaacaattatagtagtaatatcagagatcgcagatgactgtcacagatataataatttaaaagttttaaatattgtaagaattacaaaaatgtgacatagagacacgaagtgagcacatgctgttggaaaattatgcttgacatggtgttgccacaaactcaataggtaaaaaacatagtatctgcagaatgtgcaataaagtgagatgtgcctgtaacatgaatcatttattaggtgtatatagtcttaccatttctaaagcattttcatatttgtttaataattgttacatttttatacccatttaatggctcagaaaatcaaggctcggagatttagtgagtcaagatgacagaggtgatcaggtggcagattccattctcaaccaaaaacttctctttaccaattcattgcattttttttttcttgagatggagcctcactctgtcacccaggctggagtgcagtggtgcgatctcagctcactgcaacctccacctcgcaggttcaagctattctcctacctcagccccctgagtagctgggattacaggcacgtgccgccatgcctggctcatttttgtatttttagtagagaccgggtttcaccatgttggtcaggctggtctcaaactcctgacttcgtgatccccactcctctgcctcccaaagtgctgggattacaggcatgagccgccgcacctggcctgcatttttaaaattataatactgcagcctttttgttgagggaaaaatacgtaaaatattcgacaaccttaaaatatctaaaactcaagcctggatgtggtgactcatgtctgtaattctagcactttgggaggcccaggcagatggatcacttgagtccaggagttcaagaccagcctgggcaatatggtgaaacctcatctctacaaaaaaatcaaaaaattagccgggcgtggtggcacgcctgtagtcccagctacttgggaggctgaggtgaggggatcacctgaccccaggaggttaaggctgcagtgagctgtgattgcaccactgcagtccagccagggtgacagagtgataccctgtcttaaaaaataaatcaaaataaaaataaaacccctgaaattccattttaaaaaagaaaagtttgaaattcatctttattggtactagcttgacagatgcttttctaacaaaatactttatttccaagaagttcaaagttgttgattttcctttgaatagttggttgtctttaggttgagagtgagattctttatatctcggttattaaataaatgaatgtcttctaatttttcttcattttttccctttttccataaagatgtagccatagctgtaacgtataaccatgatgggtcttatagcatgcaggtaagccttactggttttgttct

SEQ ID NO: 33055 - DNA, 1050 bp, Homo sapiens
ctccactaaaaaatacaaaaaattagccaggcgtagtggcgggcgcctgtagtcccagctactcaggaggctgaggcaggagaatggcgtgaacctgggaggcggagctcacagtgagctgagatcgcggcactgcactccagcctgggtgacagagtgagactctgtctcaaaaaaaaaaaaaaaaaattgtgactaaagggatctaaaattataaaagtcctggaagaatacctagaaaataccattctgaacatcagccttggcaaaagatttgtgactaagtctccaaaagcaatggcaacaaaaccaaacatcgacaggtaggacctaattaaactacagagcttctacacagcaaaagaaccatcaacagaatgcacagataacctacagaatgggagaaaatatttgcaaattaggcatctgacaaaggtctaatacccagaatctatagggaacttaattaaactagcaaaagacaatcctattaaaaatgggcaaaggacatgaacagacacttctcaaaagaggacatacatgcagccaacaaatatatgaaaaaaattctcaatatcactaatcattagagaaatacaaatcaaaatcacaatgagatccatcttgtaccaatcagaatggccattattaaaaagtcaaaaacataacagacagtgaggctgtagagaaaagggaacgtttatacactgctggtgggaatgtaaattagttcagccactgtggaaatcagtttggagatttctcaaagaacttaaaacagaactaccatatgacccagcaatcccattatcggatatatacccaaaggaatataaatcattctaccaaagagacacacacactcatatgttcatcacagcaccattcacaatagcaaagacatgcagtcaacctaggtgcccatcaacagtggactggaaaagaaaatgtggtacatatttactatggaatactacacaaccataaaaaagaaagaaatcatgtcctttgcagcaacatggatgcagctggaggccactatcctaagcg

SEQ ID NO: 33056 - DNA, 1056 bp, Homo sapiens
ctgcatgactcatggtgatgctgagtatccaggaggaaatttccagaagaaacagaccgtcagtcacgggcttccacttcacagacctccttatggccaagatgagcctcatgttttaacaaaacagttcttgggattgaatgactcacatttaccttgtgctaggttctaaagattgaatccacattttgttactaatgattttcccgctaacataaggatgatgagcagggcactatcatacacactggctgagaactggaactgtttttgggaaggtggcatttgtctcattccctgaaataccttaaaatgtcctctacaccaacccttccgtctaccctgctcacatgtacagtgacggggaactcaccaccttttgaagaggcagttcattttctttgcaaagctctctcctaacttcctccgtaaattccagccagcatggccacatgggtcacgcctggtgccttcacacgtttgaggggtcttcgtctctttttaaagcttagaggtacaagctcaggacagtcttcagtaaggaaatttgtggatttccctttggatctttcttcctctccagcccacaagtggctctagtgagacgagcatttaagctgcaggtggtggcactcgggtctcagagccaccagacgtgcaggtgggacagtggttccagctccgactgcctgtcagcgtccctcccaggtgctagccctggcaggcacagccctcccctcatgccagcaaaggaaatgctcttgatgagaggctcgctttaaagaagcccaaagcgtgtgcttatccaaggggttcagctattcctgacttcacggcttgcatgtttgatttttctaagagaaaagaggctgcctgctgggtgtctgtggaaatgagattaaaaactgtacaatctcagattttactaaaatgcaaaaatgtagtttcagtttcttaaattataagcacgagtcttctcacgcttgttttctccagtctcttggtgctaaggacttcagtgtggtgcagctgccgccacacctcagaggcctgttg

SEQ ID NO: 33057 - DNA, 1032 bp, Homo sapiens
ctttgggaggccgacgcgggcagatcacgaggtcaggagattgagaccatcctggctgacatggtgaaacccggtctctactaagaatacaaaaaattagctgggcgtggtagcgggtgcctgtagtcccagctactcgggaggctgaggcaggagaatggtgtgaacccgggaggcggagctttcagtgagcggagattgcgccactgcactccagcctgggagacagcgagactccgtctcaaaaaagaaaaaaatgaataaacaaacaaaaaacgctgcaaagctaggtgttttgagattcagctgtttttcttaagtaaatacaccctggtttgctataagcctttgattagtttccagagttctgaaaaggttgattctgacattttttgccagttctttcattgctcttatgaaggagagttttcagagctccttactttgttatttttcactgacatagtccagtgcgttacacaggtgtgagggtaggcactaggacagcagtgccttcctgaatcagtagtgccaagcttgtccaagagttaccgagtcaggaagaagcaggtgacatccctcctaagtggagatatacaaaacttaagctcttctatttctcaaaggaaaaggagagaggaggaaaccattattctttgttcatttgcatgctaggtgcatgtactatcttatttaagcctcactacaacctttatgaggtaggaggtattgtcctcattttacaaatgagggaataaagtgccacaggccacaaaactgctaagtgacatacttaggattcagacttgaaaaggccattctcttttcaccatgttttccatttgctggttcactgtgtgactgctacatttcatcatgttttctcatttcatcgtcactcagcccttttttttctttttatttatttatttatttattttgagacagggtctccctctgtcgcccagactggagtacagtggtgcaattttggctcactgcagacttgacctcctgggctcaagcaatcct

SEQ ID NO: 33058 - DNA, 1894 bp, Homo sapiens
tcggagaaatgcctgtttctccaaatctttttcccatttaaaaatagctatttatctttttattgagttgtaaaagttatttatatattctggatactagacccttattaagagatatgattcacaaatatttttcccattctgtgagttgtctgatcactttcttcacagtgttttctgaagcataaacattctaattttgctgaagttcattttatctatttttttcttttgttgcttgtacttttaagtgtcatgtcaaggaaaccgtgacctaattcaaagtcacaaagatgtgtacctatgttttcttctaagagctttaaaattttagctcttaaatttaggcatttgattaattcggagttaatgtttgtatttgagatttgagataggggtccaaactcattctgtgcttatggctatccacttgtctgagcaccattttttgacaagactattctttcccctagtgaattgttttggaaccttagtcaaaaatcaggtgaccgtaatcgtatgggtgtatttctggactgtcaattctgtccattgatctatatatctgaccttattctaatactacattgtctttattcctgtaggtttgtgttgtaaattctgaaactatgaattgtgagtcttccaactgttaatatgaaatattacattgatttttcatatgttgaaccaagctggcattcctgtgacaaattccacttggtcatgatttataatcctttttatatatggctggatttggtttgccaatattttcttgaggatttttgcatctcttttcataaaggaatattgatagttttttgtgatgtctttggttttgatacggaggtgatagtggctacatagaatgttccttcctcttctattttttgaaagagtttgagaaggattggtgttaattctcttttatatttggtagaatttcccagttgtagtaagttgaatagtgtgcttccccaaaatttgtgtccacgtagaaccacagaatgttactttacttgaaatagggtctttgcagatttgattagttacagagagatcatattacattaggatgtaccttaaatccattgactcatgtccttataagaagaagagaggacaaagaaaaatacagaaaacaagaccaaagagatggtggcagagattggagtgatgcacctgtaagccaaacaatgccaagaattgtcgagagccaccagaagctaggaagaggggaggaaggacacttccctagacccttcaaaaggaagcatggccctgctgacactttacaccttgatttcagacttctagcttccagaactggaagagaatagatttttgttttaagccaccaagtttgtgttacaacagctgtaggaaactcaaatactagtgaagccaatgagaaacataggcacctaacacctaatctggctctggggttttctttgtggtaagttttttgaattactaattcagtctctttacttactcttggtctgttcagattttctatttcttcgagtcaattttagtagtttgtatctttctaggaattttaaatttcatctaagttattctcatttgttggtatataattgttcattgtattttgtagtaattctgatttctataaggttcgtagtaacattctgctttcattcctgattttagtaatttgtttttatttttatttttcttttttagcaaatctcagacctgtatgagatgacttttgtaatttgagtctttttttctttgtcactgtagctaaaagtttgtcaattttattgatcatttcaaacaaatccaacttttggatttattaatttttctgttatttttctattcatttacgtatgttcttcattctttccttctgctt

SEQ ID NO: 33059 - DNA, 1048 bp, Homo sapiens
ccaacacggtgaaaccccatctctactaaaaatacaaaaaattagcttaggcgtggtggtgcacgcctgttaatcccagctactagggaggctgaagcagaattgcttgaacctggaaggctgaggttgcagtgagctaagattgcgccactgcactccagcctggacgacagagcgagactctgtctcaaaaaaaaaaaaaaaaaaagtaacgaaattaagatttctttagggtggcaaggttttgccttcactattttcaaagcatttcactattagtttatacctcacattctttgaaggtggtcatgattttatgccatttaacatatgaagaagcctagcatcagagtttaaaaccttttctcatgctggtgaatactttcttcaaagaagctagaggtaattaaaaatcagaattctttccccctagtctttttcttttttgaaatcaaatcagccatttggcatgaagagcgtagcagtagagagagatgcttgtgatctgtcttgcaacttgaatgtaagctgctttgaacaacataaatgtgaatggtcatgctgcaggtcttaaatctttattgttagattatccaagtgactttaacctcaggaaatgccatttgaactgtcttgtgtcacctcagacttttcttgtaggaaataattattctagtaatagtgattctagctttacaatgtctgtaagtggtgcttaatcaattacctatatatgagagtctcaagaataaactgtttatttagtatgtcttgtcttcttcctggggtgccaattagtccagctttccttgctgagcactcctgattgcttcttgtagactgcaaagtgaagttggctcagcttctggttttaatcagtgatagatttatggggtgacaggtctactccgtcccactttctttctttggattggagatgttttccgaatgggtttttttttttttcgttttatattttgaaagaacttgacaagtttgacctagagagtttttaaagctttgtgagaccagtgtgcctctctgcttt

SEQ ID NO: 33060 - DNA, 1023 bp, Homo sapiens
ctatccagtggttggttctgtgtggagaatgtgggctgcctgactataaaacatgtgccttttccactctaccacgtatttattatgtctgtgaccaccagtgatttttgcagaagaggaattcctcttatgtgcgaggcattttcttctggtttttcatttttgtagcctgaaatttctcacatgtggtgatgcaattttctgtctgttttagattaacaagtggtggaataacctaagtgatggccagcggactgtgacaggtttgtgttagcttacacgttttaaccattcaagggaagagaaatcaaaccaaaaggtacagtatgtcacaagcaatggctcttgtaccatgctcaccagtggtttagaagacagtctctgtactgataggctaatgtaatagtatataaagtggtgaggtataaaggtttacatgatgctctgggtccgttactttctaattttgatttagtatgatactgattgatcagttttgttgtagaattccagcttgtggaatagcttattaattattacttcccttattaaagaaactaatggaaacattaagtaccttctatattcaggatgctgtaatacacattctgtccctacttggagttgcttacagagtagttgtctccctttttacagataaggaaaccggctttcagagaaggaacttttgaaagtcaaactgctagtaagcaatagagcagagtttcaaaacccaagtctgtccattcgaaaaccagttttcgctcttctcccccatgctatttataaaaccccatttaaatgtaagcatgacatgcatgtcaccatgataactttttttctttgtaaattgttatggaaagacagatttggctcttcaagttaacacctctgcaatatttcatggagtcagttatttgagaaacttgaaaatagatttttgccaggaagagtggctcatgcctgtaatcccagaactttgggaggccaaggtgggcggattccttgagctcaggagttcga

SEQ ID NO: 33061 - DNA, 1081 bp, Homo sapiens
ttcccaagggttgtttctcagggagatacccttcacttccatgcaagcctgttcctttggttgtttgaactctcaagttccaaggcaaggctttgaagacatgagagtttcttggcaagaagatgttctctgcggtagatgaaactttagatactcttttctgacggtagcaatgtaagcctgtgacagtctctactcctagatacatgcggcgctgtgagtgtgggaagtgggcaggctttggcattctgcaggaggggtctggaaggaaaacacgtagtgagcatctgtactggaggtcagcatgccctttgcttttcctacctgctttttactactccttagaacaaggggctacgtgccagtcagttaaatgtcattaggtccgctttaggctggctgagggggaaaggcagtttagcatgtaatttgtcatgtggaatattgggtcattgataaggcccctggacctcttgaggttgccccacactcccgtgaccccttgatgggcctgagattgggctgcactaatgagctaccttttgcccttcagcttccttccactgtatagcctgatgtgttttgctacgtgagtgtacgccctaggcttgtctccctggtcttgatccagtgtctcatctttgcacctctctcacaactcctatcagagtttgtttctaatggaagaggttcacatgataaagaacaaaccagccagtcctcacatcaagatagagatgaaaaatgccaccttggcatgggactcctcccactccagtatccagaactcgcccaagctgacccccaaaatgaaaaaagacaagagggcttccaggggcaagaaagagaaggtgaggcagctgcagcgcactgagcatcaggcggtgctggcagagcagaaaggccacctcctcctggacagtgacgagcggcccagtcccgaagaggaagaaggcaagcacatccacctgggccacctgcgcttacagaggacactgcacagcatcgatctggagatccaagaggtaagtggtccgccccctgcctccctgcccgcaccccaccaccccatgctgatctg

SEQ ID NO: 33062 - DNA, 1509 bp, Homo sapiens
ggcggcctggggatgactttctctttgctcttttgctttatctcctatttcacctttgatcctgttttaaccacgggctttctctctctctctcagccccgcttctcttcctgagtctgcagggagattatgttgctgccttgtgacagaatacatttttgtggtagctgattgtcatgattaaaatgtagtttacaactttacattttaccacaggaaccttcagaaagggttgggggcccctgaaaaagaaagttcttattcacaaattgcattcagggatcattttcctgggtggaaagaaaggcttttgctctcatcattttctgtatcctgggaggctccttatacagggtaaatgtgtagttccctaggaagggtattttttcccagaaggtgaagactatgtacataattttaaaggagagacttgtgtgagtggtggcaaaacctggagacaaaaagtggtggcaggcggggagctaggtgtgcctttcccccgaggagatgtgtaacgaggacgtgtgcccttgttaagactagagagactgtggcaagaagagctgaatgaagttgggccagacgctgcttccctgcgaagggttgtgtggatcttctgccgcaccaggctcatcctgtccatcgtgtgcctgatgatcacgcagctggctggcttcagtggaccagtaagttctaaccatcctttccgacagtctccaggggcccggccacggccagctctaacactcttattctgttgcagaggttgtgctcagctttgggctaggtagcagtcttagagatgccttcaggtctgttgaaaggggtcgatggattttggcaacagctggaaggatgaaagggcagtgttgccagagaagaaatggaactggcttgatttctgggtgggggtgaaatggaactgactccagttctgcacaggactgtgcttctcggttgtgtgttaacatgaactgacagtcggtgcaggcagatgtgtcttgcagtgctatgagtgggtgagagcacgttgtgtggcccgggctggtgagccagcaccgggaacataccaagtgcctggaggcagttatcacatgtttggcaggtctgtggcaaataagccctgagaaaactagaggactgtcgaggattttagagtctgacctggagtccgtttaagtttggcttatagtgtgactgtgtggcaagtgttggggtggcagccgtggttttccccagtctgtactgatgcagagtagacaagagagcctttgacgttcactctgtttcctgggcacctgtttcttacacctgctgtgctgccttacacttgagaccttgattaaatctattctctacacatttgccttgaggcatcggagcagtagtactgcttgtactgtgcgttttccatatgtgggtaagctggaggttcatggttttggtaagtatgtgcctaagatgcatggcaattaggtaaaactaatttgcagttttgtttttgttttt

SEQ ID NO: 33063 - DNA, 1662 bp, Homo sapiens
cagtttccttagctgtaaaacagggatactagtacctacctcaaagggttgttatgaggattaaattagttagtatctgtaaaccatttaaaacagtgtctggcacatagtacatgctatgttggtttgttataaatttgtataaattttcttaattacctttaagtgaaaagcttgcctttataaatgcatactagtcgtgagatttggctgtacacaaggaagattgctatagcttcctttatttcttgctaatgtcaagacaacctgaggtccacaaaatagaagtgaaagtactaaagttaatagcaattctcttttgcaataatactggagcacatatcctgtaataaagttaattggggcaaactgggtagaagtctaattgctaggagctacatttttttaatcctgtaaccccagggatagaatttatcctaaataatctagaaggagaaaaataaaactataattgtatattatactattaataataagcaaaagctgggtgtggagactcatacctgtaatcccagcactttccgaagccaagaatggaggattgattgcttgagcccaggagctcaagaccagccttggcaacatagtaagaacccgtctctacaaaaaataaaaaaattagccagacatggtggtagtgcatgcctgtagtcccagctactctggaggctgaggtgggagattgcttgagccagggaggtcaaagctgcagtgagctatgattgtgccactgcattccagcctgggtgacagagcaaaatcctgtctcagacaaaaataataataagcaaaacagctagagaatctaaacagaagtggaatgggtaagatcgcctcagtggtatatcatgtagcattaattgatgatatgtagaatgtaagggaaagaaggtattttgaaggtgttttcattgacgtttgaatactgggtgccaaactctctactatgccagaggccagggatataaacaagaggaagacagcttgccctctaggagctcttaccagaagcattgggctgtggtggtataggtacagggaagacataggaggaaggaagtaagttccccgaccttgaaagagtcagggaaaactaaaggaaagaagaaatcgttgagacagaccctaagatttattggctaagtaaattgggataatatagctaacatgtattgaatgtttattatatacccaatattttgctaagcacttttaattatcccattaattcctctcatccctatgtggtagatgcatgtatcattgtaaaaatgagtaaactgaaacttaaatctgtatctatcttctaaaattcatgtttgaaatcactgtatttactatggcttccagctgtgggaaaattctgcctgtggagatcttcatactttaaggccataagaaaaaatagttttgttggagtaagagaattattttctcttgtttttattttttatttatttatttttcatgttaacatttgaaagttcttgccaacagctgaatatctgttgcttattgttttgagagacctgtctctgaaggaggtaggtgcaaatatggagtaggacagtggttccttcaaaggagaagatcctgtatcatatcctgtatttccatcagatatttcattttcctgacttg

SEQ ID NO: 33064 - DNA, 1034 bp, Homo sapiens
tgggtctgtgtgttctctcctgtatctagaacagtgcctggcacatagtaggccctcagtaaggactagttgaatgaatggatgaaaaaatactgtattttactttttcagtacaagtccactactcgaaatatattattatgttagctacttggttacttcttatttttatttatttatttatttatttagagacagggtctcactctgtcacccaggctggagtgcagtggcatgatcttggctcacttcagcccgatggtcctggctcaagcgatcctcccacctcagcttcctgagtagctggggctaacggtgtcccttttttgtatttttttgtacaggcggggtttcatcatgttgcccaggctggtctcaagctcctaggctcaagcgatctgcccgcttgagcctcccagagtgctgggattgtaggtgtgagccgccgcgcccagccacttggtcacttctttagctttatcttcccttctcttaatgctaatttccttacgcaaaaaagtttccttttcatgtttgaacctctcttccctttgatacatttctgcttgttgggtgtaaatggaggctgtcccccatcatagctggactaagtatgctatataatttatgtcatcatttttaatgtaatttttgggaggttaattccagatggattaatgtatgatatgaaacctggatatcaattaattcatctccaatctggttagttggtaggaaggtaggtagtaggtaggatgtgagtgactgtctctgtcacccaggctggggtgcagaggtgcaatcatggctcactgtaccctcgacttaccaggatcaagcgatcctcctgccttagcctctcaggtagctggaccacaggtgtgcaccaccatgcccggctagttttaaaaaatgctgtatatagatgggttctcactttgttgcccaggctggtcttgaactcctgggctcaagcgatcctcccactttggcctcccagtgctgagattacaggtgtgagccagtgcacctgg

SEQ ID NO: 33065 - DNA, 1060 bp, Homo sapiens
ggcagctacacggccacgcagggtgggactgctctgcctacgaacagcactgtgtgcgaacacagggccacggttaagcctcccggctgcctcccccagggaacacgacccctgagaagattccagacagtctcgcagaggcacggggaaggatggaacagagccgggagctcggtgggaagaggggcagcccgcaccgcccccgggatgtcaccggcgcttctgggaaatgtagtccttcgccgcgtccgcagccctgggcactcggaaggaggactacagttcccttcagccttgggaatgctttgtgcagcgcgcttgcgcggtgtggcggccgatgccgctataaaggcttgttttgctgcagggctcatgctcgggagcgtggttgagcggctggcgcggttgtcctggagcaggggcgcaggtaggtgatggctgctgccgcacccctgccctccagctcggttgtcacggggatcacccctttgcatttcctcggggcgtggcgggatgtggccagggctgcgagcagttcgggggacactggagacttggggaacggcgtatggcctccccctggtctcctgccgccgcctcctaggcctgtgagcccggggtctggtgacggggtcgtgtgctggaagacaggcaggtaggatcgggatgagcgggcagggacgcgggctacgtccctggccgcggccgccagggggcgctgcgcccgcgggccgtgggtgtgggtcgcgctcgcctgggcaggccggagcgggctgtgggaacgccctagggcccgggcatcccaggcgaagcgggtctgagagaaacgcccacctgggaggctgtgcagcgggtggctcggggcaccctgctcaacccgcagcggagccgccagcgaccttcgaagtaagtcatccccttcgtttttgcaagcgggtaaatggaggtacgtgacataagcacgcgcagcaaagccgtggctgtgccgggaacgcagcccagatctctccacggtcatccagtgctcttttcgcttctgccacacagagccgcgggtggc

SEQ ID NO: 33066 - DNA, 1044 bp, Homo sapiens
cgtgccctttcccctgggctccaccacttcccctcacctcccctctccctataacctcaactcctcatctttctggtttggctctaacaaaactgaagaagttggaatcctgtgagaagcgcaagctgaagcgtgtccgaatctccctggcagtaagtatgcctgctcttctagcatctcggcggcaccgggcagggagggcagggtctaggctggataaactccagagcccctagctgccagcctccctccctctctactagagtgacgcggacctggaaggcgagatgagccctgaagaggtaaggtgccactggactctggaccctgtttcttcctggttgtgttcaatcatcatgttggctgctgtccccatgggagggaccacggggttggaaaaagggcaggccagctttcagggaggtgaggtcagctacaggcaccttctccctaaacctcatagtctcttcccctcagattctggagtgggaggagcagcaactagatgaacctgtcaacttcagtgactgcaaaattgatcctgctcccttccagctggtggagcggacctctttgcacaaggtagggccagcagcctggcccagggctggtctaggctctcaggacacagtggggatcttggtccccctacaagtttggactcaggccagtggggaaggagggaggagaagggagttggctcagtgcggagatgttttttagacatactgcttggatgatgggaggtgggagcagcctcctcctgctctgtggtggagccaggcatcgtttttcctctgctcagccttgccctcgagggaactctggaccaacgaagcaacaaagacagggattgagctgggtggaagccagaaggccaggccagggtcagagctaggcgggaggccaccacagcccagcaaggttgatacgcccatgcggaaaaaaacgggtgagaaacaggcaggataagaaaatgcaataaacaagccaacaaacatccaagtaggggtggggagactgcagagtagagataaacaaaga

SEQ ID NO: 33067 - DNA, 1032 bp, Homo sapiens
ggaaaacatgaacacagtgagttcaaagttccctataaggtggctgccagggaatcacctgtggttgaagagcaggtgtggcaaacttaggattttttttccccattccactaaaagcaatcgtgtgcatttgttggttttacctctgtcttcgtggaaattcaacttcactatctacttccccttcttcctcttctgaggagtcatctccactctgaggagaacaaggattaagagttttatttattttagtgtcactctgtctctctcaccccatccccactaactgtaaaaaatgtaattatcatcaaaagtcattcatttagtagtagcttgctgaatgtcatctttaaacatacatgtcctcattattcatttagtaacttttccagggtacctatgatggcgggcctgcatgagatgctggaagacgtgtagaactgagtgaaattttctttgtcctcagagaggtgatggctctattaaagtgtccagaggtgagtgatggagagggaagttggagaggaggtcttggatttggggtcagtctcttgtaatcattgtcactagtggttccaggctctgttatagaattgatctttgaaatcctcaaagccgaacaattactttttccctttttatataccaatccctttttcactaatattatgtagttagatagacatttttgagggtcagactatatcctgtttgtactgtatgcctcactccattaatacaatactgcatacaaaattggtgttatccctataaatatatataattattgtttgtcaattaaaagaaagtgcttaatgcatttttattgagtcagcatgttggcagcaataagggagctctggctgggacacctgagtccccgtgattgctggggctccatggttgatctggaaggcggggtaagtgtcctgactgaggtgatcttcctttacagagaactcatctcacaccaagggcataggagcagccacacttaagatcaactgtccttaaccacagcatcatgatacg

SEQ ID NO: 33068 - DNA, 1022 bp, Homo sapiens
gtttagcaccaacctctcactttttagataaggaaagagactcagggactagtccaaggacgtaaaacagaaagtagcagggttgggatgctaacccaggtctcttgcttccaaactagggctctcctgtctgtctccgcaacgtcgtatcaggtcatctgtcattgggagtgtatgtgttcccagcagatcagatgatgggcatatttataaacctactctgaaaagaagacacagcgagtgactttcatgggcactggactgatctgaactcatgtttccatctgcttttccaaatccccaggtcgctgtggttcccctccgacctggcagagctgcgggagctctctgaggtccttcgagagtaccggaaggagcaccaggcctacgtgttcctgctcttctgcggcgcctacctctacaaacagggctttgccatccccggctccagcttcctggtcagtgtcctgccctccctccaaccctgtttccttatctgtaaaatttggatactcccctgtaacctcatgggattgttgtgtggggatgattaaaagtgacagtgggtgtatcggggctggcacacagtggccctcagcacttacggagggattgagcaccgaagtgggagacactgacagcttccttttgtactgcttccctctcccaccccagcctgtttctctcctctaggctgaggctggacctgctcaaacagtttccttgtcggaaactagaagaaaagcaaacatgtccaagagaggcaggggaggtgtgtggggctcggggtcaggggctgactccttgaggctgccctgtgtctgtcttctgtcttgaactgatccctcttcagggcagagagccagctgctgcttggtgggggctccacatccagacctgagggtgaaccctgactctgcctgctgtgctcttggggaggatacttaatctctcacctgtagaatggggcaaggatggcatgactcagggatgtagtgaggattacacaggacatgtagtca

SEQ ID NO: 33069 - DNA, 1130 bp, Homo sapiens
ctgtggctcacgcctgtaatctcagtactttggcaggcagattaccttaggtcaggagttcgagaccagcccgggcaacatggtgaaaccctgtctccactaaaaatacaaaaattagccaggcgtggtggtgcgtgcctgtaatcccagctgcttgggaggctgaggcaggagaattgcttggacctgggaggtggaggttgcagtgagccgaaattgtgccagtgcactccagtctgggcaagaaagtgagattctgtctcaaaaaaaaaaaaaaagatttgaaggttgaaattattccttgatacatgggctacaggatggatgttgttagcagacatgaaaacattcatctccttgtacagttcttgggtgaccaggtgcgttgtcagcagtaataatttgaatctcaatagggggcttaaaatattcagtaaactatgctgtaaacagatgtgctgccaccaaggctttgttgttctatttctagggcacaagcagagtagatttagcctcattcttaggggtcctaggatttttagaatggtaaatgagcattgccttcagcaaagttaccagttgtattagcccctaagagtcagccttcctttgaagctctgaagccaaacattgacttttccgcgttagctataaaagtcctagatgacatcttcttatagaaggctgttcgatcaacattgaacatctgttgtttggtgtagccaccttcatccaggatcttacatctttcagataacttgctgcagtttctccaacagctcctgctgcttcaccttgcacttctgtattacaggcacagcttctgtccttaaacctcatgaaccaaccattgctagcttccaatttttcttctgcagcttcctcacctctctcagcctttataaaattgaagagagttagggccttgctctggactaggctttggcttaaaggaatcttgtgattggttttattttttatccagatcactcaaactttctccctatcagcagtaagggtgtttgactttgtcactgttcctttgttccctggagtagcacttttaatttccatcaagaacttttcctttgtattcacttggctgtttggcacagaaggcccagctttca

SEQ ID NO: 33070 - DNA, 1923 bp, Homo sapiens
cccccggggcaggggacattgtttcacacttctctccactgtcatccccgaggtatgtatgctaggagcttggggaagagtgaagagttaagcgcttaagcaaagccatgtggttccaagccccctgcagtgtttaagggcatggcctcagcttccctcaccctctctcctcaggcctcagtcccagcctccccactgggagccaggcaagcccaccctctggattcctccctgaaagcctgagcactccctgtgaaagactacatgctcacggcatttctctctcctcctcctcttcggtctcaccacaacccaccctatcaaaatactgcacctccacacagccgcttctctttcattgggaaaggccagcacctggcctctttctctttgatgcttttgtaaattgagttttggggagagcgttcctggtctttgtcctaaaccagtgaagacaaacagtgtacttggtgtaagcagacactgaaggtttgtctaagctgtcagcctgctctcccaacacctgtgcctgtgctgagacctgatggtccaggaaagggcagctgccacactgtggatcccccgccacccacacacgcaccccccgcccagtgccctttgaaattctcacttgagtcttctgcagtcagagtccctggccacgcccctgtctgctgtctcccagctcagctcctcagggccctgggaatgtgtctgaacagcctgttcctacaggagttcagtctgcagggagctgcctgcagggacagtgctaggctgggtgaggggacaggtgggggttcatgtgtgtgctccagctgttcagggtagagcatctgggctcagttcctccctccctcccctgtccctcacactcatgccctcctagccgctgtagaacgggggcgggagcagcacgggagcccaagtgtagcatctgactctgcacggcccccagttgctggcgccctgcttctgcttcctggcctgtccgtccagcagtgaactggaagctgccggagtcccatccccttaccctggaccttggggtgggagtggaggggggacctctgccacttacttccaggcagaaaagggcctggagtaacgtgcgggggtgggtagatgatgcttgtctgagcattccacccttcatccccaagccccagagcctcccctgccgtttgtcctcagaactgggttccttttttcccctgtcccttcctctcccttctctcccttgctgcagactgcacagcgcaagatcagggaaattgtacaacaggtgaagcagcaggagcagaaataccctcagggagtcgcctcacagcgcagcaagtgaggctcccacaggcaccagcaaaacaacggatgaatgtagcccttccaacacctgacagaatgagaccaaacgcagccagccagatcgggagcaaaccaaagaccatctgaggaatgagaagtctgcggaggcggccagggactctgccgaggccctgagaaccccaggggccgaggaggggcggggaaggtcagccaggtttgccagaaccaccgagccccgcctcccgccccccagggcttctgcaggcttcagccatccacttcaccatccactcggatctctcctgaactcccacgacgctatcccttttagttgaactaacataggtgaacgtgttcaaagccaagcaaaatgcacaccctttttctgtggcaaatcgtctctgtacatgtgtgtacatattagaaagggaagatgttaagatatgtggcctgtgggttacacagggtgcctgcagcggtaatatattttagaaataatatatcaaataactcaactaactccaatttttaatcaattattaatttttttttctttttaaagagaaagcaggcttttctagactttaaagaataaag

SEQ ID NO: 33071 - DNA, 1159 bp, Homo sapiens
gaagtgatttcgttcatatgaaatgtccagaataggccagtccctagagacagaaagtagattggcagttgccagagaataggaggagttggaactaactcccaatagttatgaggtttttatctgggggaatagtgtggaaatgttctgaatagataatggtgatgattgcacaacatactgaccactgaaattgatatatttttttttttttcagtttttatttttttgagacggagtctccctctgtcacccatgctggagtgcagtggtgcgatctcggctcactgcaacctccatctctcgggttcaagtgattgtcgtgcttcaacctcctgagtagctggaattacaggggcatgcccccacacctggctaatttttgtatttttagtagagatgggttttcaccatgatgaccaggctgatcttgaactcctggcctcaaacaatctgtccacctcgaccttccaaagtgctgggattagaggtgtgagccaccacgcctggactgaagtgtatactttaaaacggtgactctcagattatgtaagttatatctcagtattttaagtaaagaaaaaaaaagaacattgtaagctgtggttctttttcactaaaaaaaaaaaagaaagataggttcttggctcctctgcctttggagttagacatcaaaaagaaagattatgttgaatgtagtggcttacaccagtaatcccagcattttgggaggccaaggtgggaggatcacttgaggccgtgagttcaagaccaacctgggcaacatagacctcatctctaaaaaaaaaaaaaaaaaagaatgaaaacatgagctatgatcgtgccactgcactccaacctgggcacagagcaagaccctgttctccattagaaatttttttaattaaaacaatatcaggctcctcaaatcccattaccaccaccatcacctccatccttactaaccaggggtatgaccctgtggtgatgggataagaatcccctgaacaaattcagtcaatcaagcaaatctttataggtgataatatggaaataagacatagagttgcatcccctcacccatccccttagccctgacacacagaaagctccctagaggaggcagtcttgtgcaaaccaccaaaacatgaatgcccat

SEQ ID NO: 33072 - DNA, 1035 bp, Homo sapiens
ttgtagtgagctgagatcgcgccactgcactccagcctgggcaagaaagtgagaggagatttggagcttggtgggcccagcccctatgtttcacagatgagggaatggaggcacagcgaggggaggaattttcagagccaggactagaaccaacgtgcctccatttctgctctgctgctgttttacttatgacccacttgccgtggaggaagcggtcttgaccacacatactctaactcaattgtcacttccagctgactacccttgtgagctgagaattagaaccagagatacctttgctgcaagctcgactccaatttaacaccttggtggacctgcccttccttccctttgggccctaggtgggttggcagagcctacacatccctcttcctagagcttttgactccctggttatttcctaaaacttggctcaatgagaggaggcccatcacagctggtgctcaggacagggacaggcagtaactactggcctgtgtctgactgtccctgggtggccaaaaacccaaatttgatactgggcattacagtcatgacttcctaagaccagggtggaggcagcatggcatcagacagaaccaggggtaacggcagaagcaagacctggaacctcctgctggtatgcttgccgtccacttagacaagaaagaggggctggggaatgcagccgagcatcagcgttttcctctcctgtgaaccacagattgcccctgcggaaggcccagacgtcagcgaaaggatggtcatcatcaccgggccaccggaagcccagttcaaggttagtgccaagggacacctcagccctgcaggctctgggcacagagcagccacctcagaggcacattcaaggctcttctttggaggcccagcctccatttccctccctgctgctgcccaccaagctcaggctcaccctgtcatccctggctgttcttctgcatgtttgccctctgctgggaagccctctttcccttccctctcatggaaaagtagatcatctgttggtgcccagtt

SEQ ID NO: 33073 - DNA, 1023 bp, Homo sapiens
ctgaggcaggagaatcacttgaacctgggaggcggaggttgcagtgagccgagatcacgccattgcactccagccttggtgacagggcaagactctgtctcaaaaaaataaaagtaaaaaaatcaatctggtttttgctagattccctttgtctcaacaggtccctgaaaacatctgtctctaaagcaagatggatgatctcactaactccagagattctcccacccctagtttctactttgccagtctttgggggccacaatgaggggcacatttgatgctgctgggcagggagagagcctcacactcatccatgggaggagagcgcccagaggaggtgggctgagctaagatctgggtgatgcactccaagagatgctttggctgcaggtgagagctgagctcccgtcacctgcctttcctgtagaacaggcttccagatgctgcacaaaattcattcagccagtgacacctaattccagatcctgactccagccctgcttaccctgtgatcttggcagttatctctgggtcccatctgcttcagtcataagatggggtcctcattcctgcccctttagagggagtgtgtgcatggaatgacattccaaaactgcacaagtgcacaagtagccctccgacttctggactaggctggccagtgccaggcagtagagccctcggaggtttctttcagaatctgagcaaagcagccacaagtcattacgaagtggacggtgatggcagaactgatttggtcagcgtgaatcatgaatcagccattcgcccttctcggtttgggtggtggtaggagctgggaaccacacagccatgatctgctctctcttgcttactcagagataaggaccaggtttaatgccaggtatggatctcaaagtagagtcaagggatcctgccagaagtctcaatggccaggctctgtgtgatctgccagagggtgtcagacccctggacacactcagatccgtgtttttcggccgaggccctgccaagaaatggctg

SEQ ID NO: 33074 - DNA, 1045 bp, Homo sapiens
ctttgacagctaattttaaaaatctctttcttaccctgagttcctaggaagtctaaatttgatagtatttatgtgagaagtatttgaacccagaataggagccacactgtggcttgtctattcccggcctcacatgagttttgtaaggaaatggcaaatcatagttcaaaggaattatttctgccatgagacctgaaggaacgattcttcaggcgggaggagggctgaagtgctcttttcccagactagagttttgtgcagaagagttgcatgaattctcccccagctcttcatggcccaggacacggacctgcagagaaagctctggagctgatgttctttccagggggtccttagaagcagagccaagagagagaaactgcttcacccaccttcctgcaaaacttgagcttgccaagagactgctgatctcatagcgccctcttgtgggcatgaggggctgctgcagcccctttccaagtcaaagcaaggctctcactacagccgtgttaagtggagctctgtcgccggcaggcgtggctggtaacctacagcagccctggagcagctcctcaagttgttcacatctctgccttctcattccaagctcaaaaagggcaacggtttcattttgtccctaatgggtcataaggcaaaatcctaaccttcaggagattcgggggatggagggcattgcctgtcactgtgagatttgctcagggatcctcaagtgaaagctgggtcaccagactccaaacctcagccacgtctgaccactgttggaatcgtcttcctggaggactatcttgcagggtgggcctgtgggaattggttccatggtgcccagagctgttcacttcctttcctggaacagcaatgtcagtgttgacccagccttgtgtaaagcacagctagcaattctgctgactcaggtcagcgttctgcctgtaagaatatatcagaccgggcgcggtggttcacgcctgtaacctcagcactttaaagggaggctgaggcgggtggatcacttgaggtcaggagttca

SEQ ID NO: 33075 - DNA, 1026 bp, Homo sapiens
agtgatgctccctcctcagcttcttgagtagcagggactacaggtgcacaccaacacgcctgtctgtttttcccccccggtatctataagtttttttgccttttataataatttgcctttacccttggaattcaggaatctgaatctgagtgctttgatctaaagatccgtgtttttctttggctcaggagaatgttttccttccataattaattttagcgttgcttctctcccatccactttattttctccttctggagttcccactccagaagaggaaagttatagcaaacctcactctactctttgtgtctgtccacttcccactctttgtcttggttttgtgtggtttaacagtctcgtgcattgatgggcttttcagcagtgtcttccctactatttgtacatcctctactgagtttttacttaaccatgtttttcatatccagggtcactctggttctctgattgttcatttctcatagcagtctatatacaaattattgaagcactgtcctgctgaatctcactaggagatcaaatcacaattttgtaaaaagctctcccttctccctccattaattcactcgggtcatttgcttgtcttgtgcagctgggcttctctccttcatgctggtgattctttatatatgtctaatggattttaattgtccatttatatatttaaatgcattcaacagagagcataattacaatccttaggggagctttttcttagcatgctccccagaccccacctgaaccagtgagttcagaatgtcccaggtgagcgcagcagtgagtgcagtggtttagatcttgggctgcagaggcagacacagagatctgtgttagcatctcagctctacctcttgctggctcacgagttcctagctccctccagcttctaaggttgtcccatgagaacacacagagcaggacaggcagctccatgtaaagagacactttgacaagctggcatagagcagtgcaccttctgcatcttagaaagctatgtccacaaca

SEQ ID NO: 33076 - DNA, 1051 bp, Homo sapiens
atatgcattttaaatattcacagatttctctccaccagaattcatgcagaaaacttaaaaattaaggtagttaaataattgatattttcctttggagtttctgacctttgacgtcatgctaaggaaaaaagccttcttccatccaagactgtaaaataaaatatcctcccctattttctttttctttaagagaccgtgctatgttgcccaggctggagtgcagtagctgttcacaggcacaattatagcacactacagcctcaaattcctgggctcaagcaatcctcccacctcagcctcctcaataactgggactacaagcacttgctaccgcacctggcccgtgttttcttacactaatttttagttgttggttttgggggattgtgtatgtctgcaattcatggagaatttatcttgacttatactgagatacagatctaactttattttttttgaaatggatattcaattttcccaaaatcatttattgagtaatccaccattttatcgttgaacttaaaatgctaactttgaatctcatcgaatgccaacatagaatctcattcactaaatcaaatttctggcctctattcccttccgtttgtctctgtctacacagcagattctgtgtgttttatactatttgacagttttaacagcaatgttattttttcctcaaagaatgaactggaaaggtggccaacttttactatgcttgggaaaatcaaagaaaagattggaattttctcttccttgaagaattggtaaaaattcaatcaaaaaacatgtgggcctaccaacttttgtttggagaaagactgattattaccttttcaatttcttataagtttttaacttcattttgttgatttatattttcctatgaaaatacacatttttttccacttaatttttctttttatgtgtattgatataaagtgatacaaaacagactattattgccttttaaatatccaaacttgtggttatttctctcaatttctttttttaaaaatatttatttatttatttatttattgagttggag

SEQ ID NO: 33077 - DNA, 1035 bp, Homo sapiens
atgaggtgtgatgagaagagctagagcaggagactgcagtggtgtcttctccccatgtttggatatatttgtggaagtatcatctgacaatctcattttcttcctgtgggttcttgacatcttgtggtaaacatctctttctgtgaacacctggaaaagctacagaagggcctgagtgattcatacatcttcacctgagcttaccacttaggttcattcatgtctgtgccaaagtcacgcactggtaggtgaataacaaaattactacatcttatagacaaaatgaggtaaagatgaaggatacgagcactgctattccaaaagttctaaaaaaaagaaaaaggcaagttacagtgtgaatgtagacaaagattagaaaatgttaggaaattgcttcatgttcagggagacaaagatggaagcaggttggacacagcctggaatgggtgaccacgttcctctgcctctgaagagctgtgtggctaaacccacccccagtctgtgtgaccatccccatgtagaaatgtaagataagcaagcaagcaagatgatcacaaagccgacaactaaatagtaaagagacaaagttgtaaaccatcccgaacctggctaatggagtttacgtatgtgggaatttacatcatgtgaagaatctgatctctccatggatagagttggaaaacactgttaatccaatttgttttaaacagtcattcaacaaatatttattgagtacttactatataccaggcactgagaacacgacactaagtaagacattctctgtttgcaaggaaattctagtctgaaaggggaagaggtaactaaacaggctattcacataccatgtaatgagtgctgtcttagggaaacaggaatgctggagagcacagacagggcatttgagctgatctttgggatgaaagaaagcttcctgcatgaggggtaatctatgctcaggtgaaacccacaggtcagtaggacttagccaggtgagaagggagaaaagcacttccttgcctaggaaataaatag

SEQ ID NO: 33078 - DNA, 1051 bp, Homo sapiens
agctttgtaatatattttgaaagcaggaagtctgagcccttcaacttccttattttttgaaatcattttggctattcaaggtcccttgagattccatatgaatttttctatttcttcaaacaatgcccactgtgattttgatagagctcatattgaatctgtagatcactttcggtagtataaacatcttcacaatattaagtattccaatccatgaacacaggatgtctttccatttatttgtgcctttaaatttctttcaggaaccttttgtggttttcagtgtacaagtcttttacctccttggttaggtttattcttaagtattctatactttttgatgctattgtaagtggcagtgttttcttaacttctttttcagattgtttattgttgtgtatagaaatgtaaatgatttttgcatgttgattgatttttgtatcctgcaattttgctgaatttattctaaccttttttgtaaaatctttaaggctttctacatataaaatcgtgtcatctgtgaatagagatcattttatgtctttctttccaattcgaatgccttttatttcttttttgtacctaattgctctggctaggacttccagtactatgttgaatagaaatgggcaggagtgggcatccttgccttgttcctggtcttagaggaaaagccttgcattcagtctttcatcgttgagtgtgatgttagctgtgggcttttcataaatggtcttatgttgaagtaatttccttttattcctaattttgttgggtgttttttatcatgaaagggtgttaagtttgtcaaatgctttttctaatgacatgatcatgtagttccccccccttctttctgttaatgtgatttattgtattgattgattttttaaaaaatgtttatagtaatggggtctcactacgtttcccagcctggtcttgaacccctggcctcaagcaatcctctttcctcagcctcccaaagtgatgggattacaggcataagccactgcgcccagctccccattaattgtatgctgaacaaaccttc

SEQ ID NO: 33079 - DNA, 1069 bp, Homo sapiens
tgcatagtgtcctcaaggttcatgttatagcatgtaacaggctttccttcctttttatggccaaataacattccagtgtatgtatatagcacattttgtttatctgttcatctggtgatggacattttgaggtcttctgcttcttggctattgtgaataatgctgctatgaacatgggttttcaaatagctcttcaagaccctcttttcaattcttgtggatatgtgccaagaagtgagattgctgggtcatatggtagttctactcttaatttttgggggagccttcatactttttcccatagcagttgctccattttccaaccccaccaacagtgcacaggggtttcagtttctccacattctctccaacacatgttattttctgttatttcgataacagctatcttaataggtatgaggtgacagctcattgtggtcttgatttgtatttctctgatgattagcgattggtgatattgagcatctttttatatatttattggccatttgtatatcatctttagagaaatgtctattcaaatcctttgttcattctctaattgagatatttgattctttcgttatgggagttgcaggagtcctttatgtattcttgatcattaactatatattagtccagttggtgctactgtaacagaatactaaagaccggataatttataaggaacaaaagtttatttggctcacagttctgggaagtccaagagcgtgatgtcagcatctggtgagggttatcctatggtggaaggcctgaggcagaagcaagtgcaagagacagagagaagaaataggtccaaactatccctcaacccactaattcactctgtgataactgcattaatccattcatgattaattaattaattaatgcaggtgattaactcatcacctcctaaaagtcctatctttcaacactgttccagtggcagttaaatttcaacatgagttttgaggggaatttgaaaccatagcaaaccccttatcaaataaataattggtgaatatttctcccatcccatgggttgacctttcactctgttgattat

SEQ ID NO: 33080 - DNA, 1074 bp, Homo sapiens
cttcatttaccaaactggcttcattactgagttggcttagtgcctttgtcctacagcactcctgtaagaaccgttcccttctaaatgaagctgcaaataattaaaatttggcacaagaccccctgcactgcttgcctccttcttggagaatggcactgattgcaaacgtgctgatgacgcctccttgtctgtctgtgtccttgctgtacatgggttggtgtgacgctttcttggggctagggtcctatccagatgaccttgtaatcatggctcctgattcttttcctacagggtagatatccatagaaaagagaactctggagctgcagagaagcctgtcaccatccatgccaccccagaggggacttctgaagcatgccgcatgattcttgaaatcatgcagaaagaggcagatgagaccaaactgtaagtttgcatgcaatgcccagatcactcaacagagaaaaagagtagattctccctcatttaacccaagaggttttttttaaaaactccaaatctgttactcagtaacagaggcagggagggattgtgtttaagaaatttgttcccaagtagaatacagtgggaagtagatcttttgcatttacatatggctgtctcttcacttgcatgtctctcggtgattttgatgcttctatcacccattgatagtaattattgggaggaacatacagactcatgctgtccaatagaactttctgcaatgatagaaatgttctatatctgcactgttcaatagccacatgttgctattgagtatttgaaatgtggctagtacagtggaagaactgagtgttttatttttttactcagagtttggtagccatgtgtatagctaatgcccattgaattggacagtgcaagtgtagaaagtatgttgtcaccaaagctatcatttattgtcctggaaaagatttctcccaccatgcttctaaattgtttgcactcttaacattggattacatttccttaagtagtagaaactagtttacacatggctgctttattcttcttccacttttttcttctatctgtccttcctcctcacta

SEQ ID NO: 33081 - DNA, 2289 bp, Homo sapiens
agctgcctaacaacaacaggatagaactgttgggctattgttttgtcctgttacatgagtgattcctgattcagcaggaaaatattttcagtagagttttaggcaactttatagaactttcatgcccagtgaaataaattatttgaatggagcttagctcgtcacagaatcaaagaactgcctgatttcctgaagactaacatctttgaagaacagagcatatgactaagaagtgagcacagaatctgagaatcctaatggatagctttattcaggaggttcaaacccagccctttctgggagtctacagccttatctgtagcactagaaagcagcaaatatgaaacctttttagcattctctgtgtcagcactgagagaggacagtaatgtgctacacctcccctgttttgcactgtgaggacttctgtgggttaagtgtgaattaaagcgtgctatgaacactccaggccaaggccagagctgggctcgggtttattacatgtaattctcagtggcagctctttctgagcattacatacaactccctgcaacccataaaggctgcagctgctttaaagttatttaacaaacagtatttttaacagtagtccttaagcttttcggggtctcaggtccctttgcaaatcttgtaaaataacaagaaaaattcacatttctacaagtttgaatcattttggaggggtttatagaattcttgaagctcaagcatgggtccagtgtaaagaatcgtatattatagagttttattattactttggacagcaggtttatcataattttcttgaattatctttaacttaatgttgttgttaactccaaactcccaacagcttaaatcttttaaagggaagaattgatctagtcacctttgttttgggaaacatatatttttggtgtttaagtttactggcttggattgagaaagttttctctggcatttgaatttatttttaatttctaactatagaagaagaggcaagaaattatgatctaagacaagacaactcacaagagtaatcccttattagccaatcatagagtttatactttctcttttagccaagtaattagaattgtcagttttatttattagatttaacccacacagtcaaagagttcagtcaaagggaaacaaaaatagtgatggttcaaccttgtcagtgaatgaataatttaaattaaaatattttcttattgttttatatgtatatccaattatttaagaattaatgcaaattataattaaaactcataccttgatagtgatgtaataaattgatacaaacttctaggagaccagtctgaaaatatgcattaaaaagcatcatgttcttttactgcattacttttcttctgtgattttagcctaaagaagtaattcagaagaacacacaatccagtgatgtttgcaacaaaggtgatttttagcaacactatttagactagcaaatagtgggaacagcctacttaccaacaattggggaatggttaggcaagtcatggtacatttgactcactgcaattttatatagacattaaaaatgaaaaatacaaagaaaatgtactgatacaaaatactcatataaaagtgtttataaaatatgtggaaaatatagttctgagttgttcatacgattgattacaaacgtgttatatacaattgattacaaattactgtgaactcagatgaataaacgtagagatgcagataactgtggagccagtgtgatgagggttttatgcatttttctctaaagtttgtctgtttacattaagccagagggtgacagcactttttcctatgacagtgtagtttttgccttttccctagtcaacacagacacagaaaccgccgttgtcaacgtcacatatgcaacaagagaagaagcaaaaatgtaagcagatttgggcttatttctgtttaaatttatttgtttttatatttgaattccattgagttctgtgtttttaaatgttttctaaaaagatgcagatctttgagctggatatgtgccacctttgacatacccatggagctccacggcatctgagccacctttgacatattggtagagctccagggtgttcctgccatctttgacatgtcagtggagctccaggacattcacaccgggatatttgtggattgtgtagagacttgaaaaatgttgagccttggcatcaaaaccaagatgggagctgtgtcttgacatgatcgggaatagagggcaccatacctgtgacactgtgtctcctagactctgct

SEQ ID NO: 33082 - DNA, 1078 bp, Homo sapiens
tattttttgtacatatgatcttgccttcccattctgacatggaagctttctcttttaggtgttggatggacttttggctcaatatgggacagtggagaatgtggaacaaggtaataagtgaggaagccttttgggttttggagagagatattatctgttatttcttataggttaggtcaactccagggagaaatagtaagttcatatttctttgaaataagcttcctagagtatatgtatttacatctatgtaagatgtatcttacatagatgtgagagatatctgtctctttctatgtatgtctatgtagtttgccttttcgaggaatattatttacaagctgtttctcatatactgtgcagtgtgctcaagcactgacaaacgctgtcaggctagggtaagcttaattcacttaggagtaattggatttacacggttgctactttcctttccctggataagaaaaacagatccctaatgtcttggactgagtgttacccaatgaataggactcctataccaataatcccttgaagtgcttgtgaattgcagactcctagggcttactgtagacctgctgagtaagagtcttgcagggaagagctcgtgaatctatatttaaaaaagcacccgaggccaggtgtggtggctcatacctgtaatcccagcactttgtgacgcccaggtgggcagatcacatgaggccaggagttcaagaccagcctggccaacatggcaaaaccccatctctactaaaaatacaaaattagccaggtatggtgacgcatgcctgtaatcccagctacttggaaggctgaggcacgagaatcgcttgagcctgggaggtggttgcagtgaaccgagattacaccactgaactccagcctgggtgacagagtgagactttgtctcaaaacaaacaaacaaaaaccctgaagtgatttttgtgtacactcaagtttgagaacacctgtctcaggagcagtgctgcaaatgcccagaagatacttttcttcctgccaacctcttttttatcttctaaagcatgaaatactatgatttttaaaaggaaaacag

SEQ ID NO: 33083 - DNA, 1049 bp, Homo sapiens
ccccgcaaggtggtacaccacatctcttttctggcaaccccccaaaatgagtatttataggatttcagtgtcaagctcttctattaaaacaacgtctctaacatttaaatgctttatttccaggatatccagcatgttctcaaagataaaaaaaaattacataacttatactgttcttttttctgtctaattttaattgcttaagtaaaaacaagaaacaatctaagtcattcaaagctttcagaccagcaggatgtcttggggaaagcctctgaatgaaaaggcccaaatgtccattagtaggggatggattaaatatacttcaggatacctatgtagttatgaaatagagtgaggaagctctctaactctaccttgaggaagatctcaagaatatgactgtcaggtgaaaaaagcaagatgcagagaatgtgtagaatatgcagatacttctctaagaaaagggtgaaaatatgaatatatattcacatttgctattatttgcataaagaatctgaaggatacgcaaataacatgtagaaagtatttctggtgaaagagggggtggtgagacttttcacagtataactttttatagtgttttaacttttgaattaggactgtagtacctattcagaaataaaaatatttttaaatggcattttgccttgttaggtaagggggcaactaaatctgatcttgttgaagcccactatatgacctcacctgtcctgtttgagcctaggtacactttggggtcaggtcagttgcaggccaatatattttgaggaagaaggggataattgtataaatagaatctgtatgatgacttaaattctaactactttggtaggaaattgaaaagatgagtctgtatttaaattattattattattattattttagcttgttgggatttcttgggtttttcatttgttttttgtttttttccaaagtaattgaaaaccttaaaacatgctcatgaggccagtgtggtggctcacgcctgtaatcccaaaactttgggaggccgaggcaggcggatcact

SEQ ID NO: 33084 - DNA, 1068 bp, Homo sapiens
atgtcaaaaagaagtgaggaatcaggctgggcgtggtggctcacagctataatcccagcactttgggaggctgaggcaggtggatcacctgaggtcaggagttcaagaccagcctggccaacatggcaaaaccccgtctctactaaaaatacaaaaaaattagctgggtgtggtgacgggtgctggtaatcccagctacttgggaggttaaggcaggggaatctcttgaacctggaaggtggaggttgcagtgagccgagaccatgccattgcactccagcctgggcaacaagaatgaaactccatctcaaaaaaaaagaaagaaagaaagaaaaaaagaaatgacgtatcatcagaagactgtcctgatggtgggatatagacagccacagaacagggtcgaattacacttgcaccgcacatttcagagctgtagagttctcttttctgaggatgaaaagtcaataagaagaaaatatcttctgagaagaaagttagtgctgctggctgtgcttacctgcctcccggtgtttacctggcgtgtactgactctgtgtggggcgtgatgattcgtgtctgagtcttggtgaaaggtttatcaccctcgtggtttaactcaggaaataggaagtctttgccatgggttcttgccagcctgtccagcctgctctcttgcctttccttggaagcattctctgctcctctcaaatcagaggacttgagattcctcaaattcctgttctggctgccatgcctttgtgtgcctcattcccttagaatatctttcccgacccctctatgctctcacttttcccattggcgtattctgccttccattcctcagagcgttgctaaggtgttgcctccccctggttccttgccaggtttcccctcctgtctgtcttgcccctcaggcaccctccatcatggtgcaggcttgtcccttggcagtgcggcatgtgaggtgcactccctgcccactagcctcctggttgggagcaggtggttcatgctgtctttctggtatctaacatagtaaatgcttggtaagggtctgtggaataagtg

SEQ ID NO: 33085 - DNA, 1029 bp, Homo sapiens
tttgacttgctgtgtggcctttgtttcctcatccaacgataatatctacctcccaggaatgctggagagttcagcaaatgttaagaactgttctctgaaggctgaaagataggtattgggtctattacaatggcagagaactcaaagcactttataggaatctaatttgtgttttatctttgtgaggtagataagtggcaggtgttcctgtgcccactttatacctttaggaatgtgcatttcaccatctcattttagcagttcctactgcttcccgcttccagacccacaggaaatttccatctgaatggagactgaaaacattctgatgtgtacccagcagggtttgtaatttcattcattccccagtttgtgtgtcttgtttcatttttggtcagggatggagaggccctcctctgaccgtgggtccattcctcctctgaccctgggtccattccttattacctgttgggttccagtcccttttctcaatctttcttctctttcacctctctgtagcatttggcactaatgatgatcgcacctttccaaaacttgttcgtgaaattatactctcagaattctgcatctgtgactggctaaccctggtcccgctcacctgttctcctaaatacaggcatgatctgagaggtgatctcatccattttcaaggttttaaccaacaccagtgttcagcttctagtcctggattaagtaattaatttattaatttattttttgacagtttcaccctgatgtgcaggctgtagtgcagtggcatgttcatggcttactgtagcttcaacttcctgggctcaggtgatcctcagcctcccaagtaactgggactacaagcacacatgcccgactaattttttaaaaaaatttttatagagattggggtctcaatatgttgccaaggctggtctagaactcctggcctcaagcagtcctcctgctttggcctcccaaagtgttgggattacggatgtgagtcaccacagccagcctagtcctgaatttgtaact

SEQ ID NO: 33086 - DNA, 2010 bp, Homo sapiens
gcctctgcactcaatctgatgcaatacattattttggttgaaaaatatgaaggaaatctgggttcatccagatatgtaattggcaaagagtattttaatagccttttcagataattatggatattcttctttgatactacaacaaaatttgacaagcagtagtttcttaaaggttagttgccatgtagtatctgaaagcatatgaacgttaatattctgttacattaaaattttttactaatgcagggttttgtagcattatacattagtcatttggaaaatattgagtcactgggttattcagatcttccggatgttgatgttgcaccatacaataccaaaaaattacattcatcactatcatgacgagtattgggaagctgcaagctcataatagtaaataaaagtattccaaaattctagttcttaagaggtcaaattttatcattggcaacaaatactgtgagttgttttatttgcagtgacaggcggactttattcatttcaagaaaaatgtgtgagagctacccagatctgaatggtcatcactgtctgtctgttctgtcaagtacaaatgacatacccaggaagaaagtggccatttcagctcccaattcaaatgatcacacagttgcctttcctgagacatcttacttcaggatgcagcaatagtgttttctgcatactttccattttgtcacaccaaatattttaaaagatctgcattccagggtcaaaatttttgtggaaaaaaaaaaagcagtaatctttactgctttgtcaaggacagttttaagtgaagctggctttccctcctccactaagagtacacaacagtgagcgtacgacttggtgcagtgtggagccactgccttcatgcagcctcaggcactggcagttttacccgccattgcttttgcaccatgagtgaaaatactaacacgataaacaaggcaaataacatcttggtatgattaggaaaatgggttttacctaataacccctgaaagggtcttgaggattccaagggtgtgcaggtcacgctttgagaactcgtggcgtagtggttaagagcatgactcggggttttgattgcctgcgtttgaatcctgctcctgctgcttatgagctgtgagcctttgggaggttattggaccttttcgtgactgtgtactctctgtaaaatggatgtcataatagtacctacctcactaagcaaatctgttcaatagttaaaccataaatattaattagtattttgaaaattataagactcacctagttttttgattttgtgattggctggttgatgggctggggaaatggccaaagccctgcttgccttgaagctgtctcctctgtcagtcttccaggatgaatgagacgtccaccattgtcattttacctttatggtggtaaagtacatgttaactgagttaaaaaacaaaaacacaaaaagcccatatcctagaagggtaacatgtgagtgagcgacttaacagggattggtgaatctggttaacctaccaactcttgccacccgagtcaaggcgctgatgggctggaggagcggagagcgcctgatgaagggagcaaggggaaggggcccaggagcagcaagggtctggcgccgtgggaaagctggaaggcagtgtgagagtgtggatcagagggcgctctagggtggggtaaagcgggcagcagtaactttgcctctcataggctggggttggtcctggtcaattctttattttgtgtgaatcgcaaacatagttcaggtatacgtaacggaagtgcccctccctatgcattctccagctgtagggtacagtcatctccggggcattatagtaaatctcattagttcagacctgattaatgttgaactcacgactgttgagatgtaggtagtgcagtatacagaaaagaacaagagctctggaatgaggcatgtcagggctggaatcctggctccatcatagactagctgcatggccttgggtaaaagat

SEQ ID NO: 33087 - DNA, 1053 bp, Homo sapiens
ttttttaaaaaattacattttaatgtaaacatcagtttatttaaaataactatattttctgaatactaaacattactaaccatcagagaaatgtgaattaaaaccacattgaggtattatcttataccagtcagaatggctattattaaaaactcaaaaaaaacaacagatgttggggtggatgcagagaaaaaggaatccttataccctgttagtgtaagtgtaaattagtacaacctctatggaaaacagtacggagatttcttgaagaactaaaaatagaactaccatcatctcactcctgggcatctacccaaagggaaccattgtataaaaaagacacctgggctggtgtcttgggaagccaaggtgggcagatcacctgaggtcgggagctcgagacgagcctgaccaacatggagaaacccggtctctactaaaaatacaaaattagccgggcgtggtggcgcatgcttgtaatcccagctactcaggaggctgaggtatgagaactgtttgaaccctggaggtggaggttgtggtgagccgagactgtgccattgcactccagcctgggaaacaagagtcaaactccgtctcaaaaaaaaaaaaaaaaaaaaaaagacacctgcgcttgtatgtttatcatcgtaccgttcaccatagcaaagtcgtggaatcaacctgggtgcccatcaactgatgattggataaagaaaaggtggtataaatataccacggaatactatgcagccatacaaaggaatgaaattatttctcttgcagcaccatttgtatttcacattatcttatgtgaaataactcaaatactgcatgttctcactcatagtgggagctaagcagtggctacacatagacataaagatgaaaatagcagacactgggaacacaaaggggaaagggtgggagtggggtgagggctaaaaattaactattgtgtacagtgttcactatttgagtgatgggttcagtagaaacccaaacttcattatgcagtatatccacgtaacaaacctgcacacatacccctgg

SEQ ID NO: 33088 - DNA, 1031 bp, Homo sapiens
tcatgttacaacgctgtcttcgctattacagtgtgagggagctgctgctcttatctccactctgcagaggggagattgaggcacgtcggagttgagtaattggccaaggtcaaatggtaagtgggaaaacctggatttgaacccaggcagcctggcatccaactccaaaatccttgacctctatactctagtgtttctgacaggaggagggttttggagttaggttttagcctgagtctcataagatctgtccaaagaaagttgagcttacaattaatttccctgctgtaagcaggaaaattaaaattatttttttccacgttactgctgccttaaatactgtagacaagtttcagcgtacttctcacttcattggaaacctataaagataattgccaggtgctaacacacacttgttaaaaaccagctttcactcgtttttaacaatgcaaaagtgagcagtttctcatctgcccagtgtatgattctttgctcagaagaagtagaatggatgaacagagacgctgaacgattgtggaatttttgattatgctttaatagggaggtaaggaaaatgtatacaggatttgggaactagacaacgtgagtttgcatttgggctctagcattatgatctctctgaccttgggcaagtcacttcacctctgagtgtgtttcctcttctataaaatggggttgataagttgcccaacccgccctcacagagctgttgttggaattgaatgagataaagtatgtgaacacgtttcacctatgtaactatgtgcagatgctcattactgccatggctagggagagaggtgccggagcagaggtgagcagctgcctagaggaacttgagcaggtttccctgggttactgtattcctaaggaaatgtgcaccctcttgtggcgaagtaagggggttaagggttcttgtgaaaaatacttcagtgttgttactgtgggatttttttggtcaccagaaatactttcccagtaatgaatgtacacactctttctaaacaaat

SEQ ID NO: 33089 - DNA, 1053 bp, Homo sapiens
tggaactcccactcatggtgggtctaccaaaatcccgtactcattgggcatcaaatgagctcacccatgaagccagccctgactgttgtaatttttgtaatgacagtggccagttactgttgtcaccctttccatggctttttgttctgggttgagttctccttatctgtaatcccatgggacctggaatttttctctgttcagagcgaattccaggtttttgacaatgacaaatagcagttattcatgggacagggtgccactcaccactgatacccattcattcttttatcttgtgtctattggtcaaattagcccatggatcctgaataggaaagaaatgaatctgaaaggtcagctttgagatttatgaagttcaataaaaatcaaaattgacaaccagtagcttcaaaattgtacttctgcttgcagcaaggtattctgcatatggttctgttggatttataaaattatcggtaggctggcaagaggtttgaaaatcaataactcgctgaacttatctctgagaggatttttatatgctattggagtattttacccttgtgcctttgacagaacaatttctcaagaaggaaatatgcggccgggcacagtggctcattcctgtaatcccagcactttgggaggccgaggctggtggatcacgaggtcaggagatcgagacatcctggctaacacagtgaaaccccgtctctactaaaaatacaaaattagccgggcatggtggcatgtgcctataatcccagctactcaggaggctgagcaggagaattgcttgaacctgggaggcggaggttgcagtgagccgagatcgcgccaccgcactccagcctgggcgacagagcgagactccgtctcaaaataaataagtaaaataaaataaaaaaagaaaatatgcaaacatttcctcaacttgcagctactcttgacagtcccttgagtgagtatagaccacaaagcttggtaattaagagcataagtccagtttgggcagactcaagcttacatcctggctctaacctttactaggta

SEQ ID NO: 33090 - DNA, 1033 bp, Homo sapiens
gtagctgagattacaggcgccggccaccacgcccagctaatttttgtattttttagtagagatggggtttcaccatgttggccaggctagtctcaaactcctggcctcaagtgatccacccgccttggcctcctacagtactgggattacaggtgtgagccatggcacctggctgataattccaattttataaaaactaagaaaggaaggtgtcaaattaatagtagtttcctctgatgggattatgggagattttaaacctccttttctgatttcctacaatgaacatttataccttttgttctttttttttgcagactatatcatacacaaaagtacacaaaacacatatatacagtttaatgaatgagtataaagtgaatacccatgtagctactacccagatcaatcacataaaagcagcattactttttatcactggaatactaacaataaaaattttattgaaaaatacttttcctgagttcctcacttggctatggtaggaataaaataagactgtataggaaagtgctttatttttcaaaccttaaaatttccatcaaacattagaagttatctctcgtctctcaggtgccaaagatgacaggtgcacataagcagtaagtcattgccagagtctggggctgcttgtgtcatacagagatttgcactaaaaaatgtatcaattgtgccacttgcactatctgcagtttttccctcccaggaaaccctttaggtgtagacttagacactgggagaactgctaggactgactgggtgttaaaaacctctttcctacattttgtgcggattacctttgattttctatgatccctggattgttgcgtgtggtggaaggaggttgtgttaattcgttgatttcaccaaagccagaattccaagcaggagtttttgtttgctttgttattgaattatctagtcttttacatcgtgatttgaggtttggttcaaaagaggcaatggattggtcataatttaataattttatctgatactataactaaagcca

SEQ ID NO: 33091 - DNA, 1026 bp, Homo sapiens
gtgatatttcaacctgttgggcagcagctatgctgtgcactgtgaccagagctgtttgtttggccagctactgcaggcgctcattgcagcagccagtgttttgtttgtgagtgtcttctctatggtttcctgcttcagtgaatagaagtgggagttgtgggggctgagggaagaggacagacagaagacggttggactcatttcctgaatcatcttaggcattcttgccgtctcttggttccatcttggctgggcagcatttcccactggtttgtcagaccaactttcccagccacctctgggggtgggaaggaaaaccacaccttgctctgtgtcagccagttaacaggcagagttttgttcagtaaatatttataaaacctctctactaacctcgaaccctgcaactctgtacttttgaaaagtttattctctttccctggcctcccaagtaactatttgggcccagcagtatacctcacacggacagcactggtaccccttcatctgcaggccaggtaccagagaagcttgtgcttcctgatcttaaccttgaacttggtcgaccattcctctatttaggattgcagagagttcatgggaaagggtcaggggtagattgtctttcacagtttttccctttaatctgtcaagttaaacccgtgtgatcagaggaagtgcaaagcagcgtgtggaggggaatgaggcctccaagtgcagggaggcatgtctcctcctggctctgccgcacaccagcagcaagggcatgcctccacacgatgttactttctgtgaaatagaaataaaggccctctggtcctttcggaaataaatttagaaacaacctaaacatcgaacagttgggaattggttaaaaaaactaggtttatctttattaagcagtgttgaatttttaatgccgtatgaaaacatgatatgctgagtttaagaaaaagatacaaaatgtggaaaatgtgattccaattttttcttttttttgaaagagtctcactctgtctccccgcc

SEQ ID NO: 33092 - DNA, 1054 bp, Homo sapiens
gcacacacatgtaataccagctactcaggaggctgagggctgagacaggagaatcgcttgaacccgggaggtggaggttgcagtgagccaagatcatgccactgcactccagcctgggtgacagagagagacactgtctccaaaaaaaaaaagtttaaaattatgctcttactacctttaggccctggggaatgtgtgtaaagtgtactcaggttgtatttaatttcattgacaattaaatttcccattaaaacaaaattagggggaaatgtttcagctgtattggagtataaaagagaatggctttatggaccacctgctacctaatattacagtgtgaagaaatgaagagaaatgctttttaagtaatttaaatgtttttttctctgattaagaaagtctgttcacaaatttattaggtaataattcctctagctttatcatccaatgattctactcctgcaatggcctgttcctgcacatggcctagtgatggagtgtaggggttgtaaatggatgtgtcattgtgctggaccctaagtagacataacatgtgcgagagaggaaagactccaaggagttaaggaaattattgtccacctatgccatgaaaccctttgtagccactaaaattaatgttgtagaagaatatataaagacttgtacaatatactaagtgaagaagattgcagaagagtaataaacagtatggtcccattttcataaatacctacacaactaatagcattcatcagattattattgttattattattattattttttgagacagagtctccctcgttgcccaggctggagtgcagtggcacgatctcggctcactgcaaactctgccttgcgggttcctgccattctcctgcctcagcctcttgagtagctgggactacaggcgcccaccaccacgcccagctaatttttgtatttgtagtagagacgaggttttaccatgttggccaggatggtctcaatctcttgacctcgtgatccgcccgtctcggcctcccaaagtgctgggattacaggtgtgaaccac

SEQ ID NO: 33093 - DNA, 1004 bp, Homo sapiens
gtctggagggcagtggccctcttcccacagctccactaggcagtaccctggtggggactctatgtgggggctcctatacaagctttcctgtacatcctctgaaatctacgcagggggtgccaagcctcattcattcttgcactctctgtgcctgtaagcttaacaccatgtggaagctaccaaggtttatggtatcttgcactctccaaagcagcccgagctgtacctggggccctgtgaaccgtggctggagctggagcagtggagatgggggttgcagcctcctgaggtggtgcagggcattggtgccccaggcctggcccactaaaccgttctttcctccttaggcctctgggcctgtggtgggaggggtaacctggaagatttctgaaatggctttgaggcttttttcccccattgtcttggatgttagcacttggctcccttttagtcatgctaatctctgtaacaagtggctgctccacaacctacttggattctttctctaccatagggcctggctgcaaattttccaaacttttatactgtgcttcccttttaaatataagttccactttaagtcatttctttgttcccaattctgattgtagtttgttagaagcagccaggccacatcttgattgctttgccgcttagaaatttcttccaccagataccctaagtgtcatcactcttaaattcaaacttccacgtatccctaggacatgaacacagtgcagctcagttctttgctaagatgtaatgcaggtgacttttactccagttcccattaacttcctcatttccacctgagacctcatcagcctggacttcactgtccatatctctatcagcattttagtcacaaccatttaaccagtctttaagaagttccaaactctccctcatcttaatgtcttcttctgagcctccaaactcttccatcctctgcccattacccagatccacagccgcttccacgtctttctttatctttatagcag

SEQ ID NO: 33094 - DNA, 1025 bp, Homo sapiens
atgaggtcacattcctgcttaaaaaatctttcatgactgcagacagaaaagactgaaaggaaatgtgccaaaatattagcaattttttttttctgagtgatgagctttctggtgataatttttatttactttatggattttactcctttccaattacttatataatagacatataatagtattttttaagaaaagtgttatttttataataaggaaaagtaccatttaaaaacctttagtggctcccatttgccaattaaaaatcctctctatgacattcaaggttttggcaatactgctacaatccttctgacctcaccctcttctctctctgccctcactccaagaaacagcagcagaacggagttacccactgtcaccaaatacatttggtgctttgcctttgctcatgccccttctccacccgtcaactttccatccttcaaacagatttctccttctttagagactgtttcccataacatacatcctgtaaaagacttaaaaaaaacacgcaaaaacaaagaacattcttaatcccacttcctggagataaccactgttagcattttgatatatgtctttgttctgcagctgagagtagtctagtataccttggctgtctgttacagattttatattctatatggtggtgttatttatttctgtcttatctccattctggattttaagttccttgacagctacaagaatggctttacatttttgtagcctccacaggccttgagcacagtgacattcacataatatgcattccaaaatcatctgctgaatcaaacaagggagataagacaagcttgtaacttaagcacaaaccatagtaacaaacataaacatgctggttacattatgaatataatgctgagtatatccataaatgcttaagtcgcaggagaaatacaaatgctttaaccttggagtgtcaggaacaattacatgaccagggacctactaaggtagggtaattttggtacagtacatggaggagattcagccttgaagag

SEQ ID NO: 33095 - DNA, 1049 bp, Homo sapiens
aatttgaagcttccttcagtcctccacagaattagacagaaaatttatatcatttttatatgtattaagtatatacatattcaaaatataatttaaatatttaagtagtattaaaggaccttttaaaaatacttagattgacttaaaagggttaacatgcagttctttatcattatcatattctttaccaagttaaactgaatcccacagaaaaaaatctatcctgaaggtttgtagttcatcatcagccctcgggttagctcagcatcgtgacacctctaactacatactcatgtcgcccaggttcttcactgtttcacttacagggatgccatgcatctggctgaggatgttttaattaacaatagagatactcttgggaaagttctcaactttcctttttcctttttctgtaggaggtaaagagctaaataaatgtttatatagtgtcatgatgccactaagaaaataacagcccctttgtctcttttccctcaatcataaggaagttatgacctgaatagaaagacaaagcagtacccttctgtgtttttctcaagtgagaacatttttttcttttgcataaagtcacaaaagtgtatataagggctgaggatctggtaattgtccacatttcagatttttttaaggaaatattcctagaagtataattggattaaagagtaatataaggattaagacacttgctatttaggttggtgtgaaagtaattgctgtttttgccattactttcagtggcaaaaactgcaattacttttgcattaacctaaaataatcattgccaatgctttccaaaatggctgcactaaaatatatcccctgaacagtacatgaaatcattttcaaccctaatacattccataatttcacccaacatattccagaattgtattcctcatttcagcagccttattttaaaatattttataattataaacttttttttccaagtagaaggtatgttgatcaatatttccccaaatatattactgtactggtaagacatattaaaaaatggttcagtggtc

SEQ ID NO: 33096 - DNA, 1001 bp, Homo sapiens
aaaaaaaaaagagagagaagggaagaaaaggagttgtatagggattatcccattgtaatgattgatgatgatatagtgatataatacactatgtacagccgttgtagtactgaattgctaacttgtgaaggagagatgagaatctttcagatacagaagcatgaggagtagatatttgggaaaagataaatttgaaaatatttagatatcgtgtggaaggttggtaaagaccaagctctacagagcctagcgttttctcttcagcaaatagaacagcccactgaataaaacttacagtagggaaaactctttaaggaaggctcacagtattcattattcagcaaacatttttgagtatctaaacatttttgtagtatcggccaggcattattctaggcacttgagctagaacagtgaacaaaacagacagaaatccttgcccttgtagagcaaacaatttagtgtggacaagcagaaaagaaaccaaataaatacataaaatgtattatctagagccttttggttctgagtaatagaaacagaatcaagctagcttaagcaaaaggagttgctgtgaaggagtttctgactggctctgtttggggcagagatgcctacttctgacctaaccagatatggccacagtgacagggttccaggatataaacaccgcctccagaagcccacctctgtgacaaagaggccgtgtgagctgcatagcctcaaaaatgggtctgttatagaccccagacctttccagttccattgttttctttcattaccaagactaagtgttgcaatgcaagtaagctcatagtatttgaaatgtaccattaaaaaaaactcagaggacaagactacttattcaaactgtaaggaaaaatgagaccataggaagaagagaaagagattcactaatttattgaaattgttgagaagcgacggcagccagagccttggttatctagaaagtttttggaaagtggaaagtttacctcctt

SEQ ID NO: 33097 - DNA, 1031 bp, Homo sapiens
tttggaggcaactatctctcttttcactttggccactaggaagctcagagccaaactcatagctctaatgtagcaactctttagtacccttttgaactgaataattgtattttaaccctactttctttctgagtctgcttctgtcttgacctcctaatctaatttcctattttcttaccctgatgtattcatttcatttatattgcactgttttattgtatgtctttaccataagctgcctcaaatatttgtgaaacagatggtatataaataaagaacattggaatgtttgagaaagttgttgttgacaagaccgatgaagatgaaaatagtgtagttctgagaaaatgttggttgctgtggcatctgctctttttttctcccttgcactcttatctcctggggtggtccatcttcgttaccttcaactcccatgacacccctgctgtggctttggctgcattctggagtcttctctatctccgccctcaccctggattcacaaatgcagatctgtatttctgacttccttcctattggatagctccatctgaatgtccctaagtccctcaactcaacacgttcaaaacgaggctcagcatcctttcccccagatcctctctgcctggatctcagttgcaccaccatcaacttcatttctccagtcagtaacccggtcctcactttttactttttccattttctgatccttcacatccaatccacaactaagacctgtcactttaaattataaacatgttgtggatctgttctctctactccatactacctataaggctctttggagtttttaatctatccttgcctaccttggggtttttattttatttttatttattatttttttagaggcagagtctcacttctttcacacaggctggagtacagtggcatgatcgtagcttactacagccttgaattcctgggctcaagtgatcttcccacctcagctgcccaggtagctgggactacaggtgtgcactaccacacccagctaatttgttaagttt

SEQ ID NO: 33098 - DNA, 1069 bp, Homo sapiens
gttgggaagggaactctggatgtgcatggacacttgaatgagatggtaaagtctagggtaaggaatactggcctgagtcctatctcatctggttctgtcattaaccagctctgtgatcccccattgggctgttagttttctcatcagtaatgcgaggatgtaagttagttgatactcaaccttcctgtctgttctagaattctgtgagtctatgattaagtccttagcaaagaaatatttaggaacaactgcctgtgtgaggataaggagccagacacacctgtgatatgagggcagcccgggtctctaggatctgctctgggccaggtgtggtggctcacacctgtaatcctagcactttgggaggccaagctgggaggattgcttgagctcaggagtttgagaccagccttggcaatgtagtgagactctacctctcccaaaatatacatataaaaaaaattagccaggtgtggtggcatgcacctgtagtctcagctgcttgagaggctgaggcgggaggattgcttgagcccaggaggttgagactgcagtgagtttgtttgtaccactgcactctagcctgggcgacagagcaagactccgtctcaaaaaaaaaaaaaaaaaaaggaatctgctttgaccattccttatctggggcatgtttgcaaacacaatcagtatcttcaatctactgtccatcctaccttactgctccccaggcagggccaaaactccatagagctgttagattccaagactgggaatcttggaattccagggttccaaacctgctttgacaccaggcccagagacagggctgtttctctcagtgctttagactgagcagttgtgttatcagaagaaatcagtttcttactgcctcaggatgggccgtaactgttcctctcaagttttccttgttttcagcaacccatagaaaagagtctctcttacctaggctgatgtgtcaattatatcaaagttgtttctttttggtttggagcgtgtaatttggtaccaagttaatctgtcccctgaggtttcatgtaggctcatgttagcagag

SEQ ID NO: 33099 - DNA, 1032 bp, Homo sapiens
cctgcattggcctcccacagtgctgggattacaggcatgagccactgctcctggcctgtgaaaagcatttttaagtgaagggactgatgcacagtttctccttgagtttcttcaaagctctgcctgtcagctgaaataaaggtgaaagagtgaagccagcaaactctgctcttaactgaaaaaccaggcattagttgttagatcattagtcctgctttctaggagaggatcttcagatgttctctttggggtgtccaaattagcataggcttgtaagagtgtaaacaaatgatatggccaaaagagtaccggacatgggatcagaagacctggtccagcctagctgtactccttactgcttgtgtggctctggataggacactcctgagcgtccacctcactttcctacattgtgagcacaaacacacctacctggaagaattgtaagggctgagtaggttcatgtgtatcattgtacccagcataggaagctttttataagtagttgaaataattgattggtgaagtgaacatagagaattctgtctcttatccttcttgtccctggagtagaaagcctgcttttggtagatacctaagcagaaatagttctggggaagtggggagaaacagggtggggcagtgcgtttctcactttgcagatcttcctgggaggcctgagagtggatggggtttggagtgtgttgttggtttcgtacctggaatctgatgtgcattttgactcagaatgcattgtcaggaatcttgatgacaacggtatgttgctcagtaactgaaagattgtttgaaccaaactattgtagcaaaattttcttggcaggtatgccctgttgatactgagcccagtgtgcattgatagttttatagtgactactacaaagtaaacagaagttcacagtgactcagagtaaaccgtgactcagagtatacaggtactacactctggacatcctaaagcaattaacaaataaatgtgctggtaggaaaattgttgtctattgtattacctta

SEQ ID NO: 33100 - DNA, 1029 bp, Homo sapiens
tagagaacaagatactagttgcttaatatttaaaatttttggctgtttattattttttaaaatgtttatatatttttcttcttaaaatatttgagatgacaaaggtactggttactcaattatttgaattaaagaagacagagatttagatttgtaaagtaggtaagtcgaaaaggcattttaagagttacaaagggcccaggaacaggtgattggttctaatataattatttctacatcacgagagtgttgccagggaagagttagctctttgttcactgatttgcatattaatggtatgttgtgtctatttcaataatggtttcaagaaaatgatttagatattgaaattgatcagtggctttagttcacaagtatcgattgtggtcacggtgttaatacctgccttataaatttctaggccaacattgtatcttttattctctatggcagtttttattaaacactgttccatagagccttaggattccaaggagatgccaaatttatgggaaggacgaatggatgtacgtacatgggaatcctggcttcttacccactgcccaatacgaagacaactgcatttgttgctgttttatatacagaattggagttgagtctaagatttggtttagaaaaggggtttgctgctttaaaacacagtttgtaagcacccaccctacagtgtgtaaagtgtgtaattctgagtcttcagttcattccttgatttgacccaaagccctttcttgaggaaagtttagaccctgcccttgttactcctacatctgctttccatggaatagccctctatttcctgtcactttcattttggtaacaagtatctgctttgccagctgcatgccagactactaaatctatggatttttctatagtcaacaacatagaatgcgtgcccttcaggaactttccagggagctccttggccagtgattgcgctctggctcttggcagagccattagagtcaactgcctttgaagagtgatgggcatggtgacacgggacccatt

SEQ ID NO: 33101 - DNA, 1811 bp, Homo sapiens
aaagttcgaagaatgctgttcgagggtggtagaaatatatgaaaatacatttgtgaattgaacctttgcaatgatgctacatcagtctgagtgatctgtactttgctatagtttttagaaaaaaatagttagaaatagaggtaattttaaaggtagcattgcacgtcttcccatctctgtgcttgcccacagacagaagtggggaatatacctaagcaggttgtggggttgttgttgttgttatgttgcttttttcggcagttgtgttcctgacataacaagacaaacatttctttcaacatctgagccacacagattagacagcgaactgtcacccgggtcaagactatgtgccatgtggtgaatgaaagtctagctcaaggaatctcctgggtgggttcttcacggggttcagacagcctgttgcaaaggtcagggctgtgttgtggtttacgtgtttccctggtaggaactgccaggtctttcccagaggtggtatctttctctacgtcactttctgtactgaataaggccttgggcctctcatactgtcttgactatggggtgagtgttaatagggatagtatccataaagttctgagttctttattaattttataatcgcacaaaaaaatatgctaaataatgaagcatgtgaagtacagttcatttcccctcaactgtaaacttttcctgcatttatcttcgtttcctttaactcttatggactgtttatggtgctggtgggagggagagaggaattatcaaggaaaaaaaaataggtgaaagaaggttatttccaactccccatgcatttctttgagttagtacagtccagagtgggatatggcattttccgtggaattctgactcaggagatgggggagaggaagagagttaactaatactgggtggctgctacgtgctaggcactggactaggcttcctgttttatcctccccacagcctgaagagatccgtctttatccttcttacacaaagggctctaaagcttcagactctaaaataactccttgctcctgaccagaacttcagaaggcagtggcttgttgtccatctcatttgaatactgcaacagaaccttagcaatgaagtagaaagttgtgataatatgtatacaggctataaagtaactttgtatattattcctaacttagaataagagaaaatttccatatataaaacctatgctgagaaagattaggaactcaagttcagtatatttttaatttaatataattgaaaagaattaaaagtgttagtcataatttgaaagaacttccttgaagtagtcctatagtagaagcatttataattatataaagagaaagaggtttttttaaaaatcattgtggttgacagttaagtgtaaaaaacatacatgtatgcagtgtgggaggagggcctgttccatgcctttgacccagatatatatattttttcaaatcctgaaaaaaaacttgaggtttttttgtttaggatacagaatgttgcacaaagattggcatgctttcatttttatatgtatttttaaaaatatctgtgtcttagagaaggaaaataatggaatttttgtaaattgctttttagaaaatggttcaccttattaacagaacattttaaacctctttgacacgtgaaaaagtcagtgaaagcactttttgatacaatacttaagtatcttatgcatttgttacttttatctcatgcattttgttacttttttggtttagtaacataggacttaagatacagttaaaccaccaatgaaatgagatatataagaggtt

SEQ ID NO: 33102 - DNA, 1060 bp, Homo sapiens
ttactagagttttcttttccttttttttttttgagatggagttttgctgtatcacccacgctggagtgcagtggcacgatctcactcactgcaacctccacctcctggggtcaagtgattctcctgcctcagcctcctgaatagctgggattacaggcacatgccaccacgtccagctactttctgtatttttagtatagacagtgtttcaccatgctggccaggctagtcttgaactcctgacctcaggtgatctgcctgccttggcctcccaaagtgctaggattacgggcgtgagccacagcttcttttcttcttcttcttcttttttttttttagatggagtcttgctctgttgcccaggctggagtgcagtggtgcaatctcagctcactgcaacctcctcctcccaggttcaagtgattctcctgcctcagcctcccaagtagctgggattacaggtgcccgccaccacacccagataattttttgtatttagtagagacggtgtttcaccatgttggtcagactggtcgtcgaacttctgacttgaggtgatctgcccaccttggcctccgaaagtgctggaattacaatcatgagccaccatgcctagccagttttctttttgtactcttggtctggctccttttgctcaatttatctgtaagattcagctatgttgttgcatgtagcagtagtttgttctttttcattactgtgcagtgttccattttctatgtacatcacaacttatttgtccattctttttttttttttttttttgatggagtctcactctgttgcccaggctggagtgcagtggtatgatattggctcactgcagcctccacctcccgggttccagtgattctcctgcctcagcctcccaggtggctgcgactacaggcatgcgccaccacgcccgactaatttttctatttttagtggagactgggtttcgccatgttggccaggctggtctcgaactcctgacctcaggtgatccacccgcctcggcctcccaaagtgctgggattacaggcgtgagccactgtgc

SEQ ID NO: 33103 - DNA, 1032 bp, Homo sapiens
acttagccctttagttctcagattgagttatatacttcccagcaatttctgttatttaagattgctatctcatttctggtgtaatacttacatggaagtctttctctatttgggggtggtggggttctggcacataggaatttcttaatggcagaatattctgaaattctcggcattaaagtatacttgataattagttcacttaatattaaagcatgttcattcttttcttcccaggtcgctattaaagcatgaagactttctgaaacctgccctagagctgggatattgtttgtgggcaatattttttattgtctcttgtttaaaaagtgaacagtgcctagtgaagttaggtgacttttacaccttttacgatgactacttttggtggagttgaaatgctgttttcattctgcatttgtgtagtttggtgctttgttccaagttaagtgttttcagaaaagtatgttttgcatgtatttttttacagtctaaattttgactgctgagaagtttctattgtacaaaacttcatttaaaaggtttttctactgaatccagggtattctgaagatcgaagcctgtgtaaaatgctaccaaatggcaaaaagcaacaataaacagtttgatttttacttttctttctaacatatcaatgcttagcagaactattcagattgtcagtagtaaatttaaagacaaatgcccgttttcctccagtccatgaaacataccatacttatatacctgcaactaagtgtttaaaattatgctctgtaactctgtactgctagtattagaactaaaaatcttaaaatacagccagtgcttaatgcttatatcaatgtggatttgtcggcttttatgtaatctgtaatatgtatagcaggaaatacgaagagttacacagtgtatgccttaaaaggctgtttcttaaaggtgttacaaggggataatggtatttcaactagttatcagcaagtgacaatacattccaccacaaatacactcttgttcttctagcttttagac

SEQ ID NO: 33104 - DNA, 1048 bp, Homo sapiens
ttttggcttccagagaagggctaagaaaacttccaagggttaaataatgtgttcaggtttcagtcataggatctcagtcgcaactatttaactctgttgttttaacccaacagcagccagatgaatgagttggggccctattccaataaaagattattttggggcattggaatttggattttgtgtgtttcttcacttgtcatgaaatactgtttttccccctagttatttaaatttttagcttatgggttatacagaaacagccagctggccagatttgacctacaggctatagtttgccaattgtgtgctgctttggagctggaaatactgtcaggatcatagttaggtaaaataattgtttcaagtttttatgagtagcttttacaaatgaacatttagtagagggaacaacacatttgtaagttgtagaccttacgttctggctaacattaagataacttaatgcacctaactgaaatgtccagtgggatcttactcatagccacaggataattagtggctttgttcaggatgtatgtaacaatttatttaccttttgaaggctaaagaacgtgccaatggaatggagcttgatgggcgtaggatcagagttgatttctctataacaaaaagaccacatacgccaacaccaggaatttacatggggagacctacctagtaagtttattttcaaaataaatataattggcagtttttcacttgtcaaagaaacacttgtattagtggaaagtcttcagcacttaggtttgtgccataaacttgactgttgattgattaaatgctcctcattagggcatttttctcatagtagaagttcaaccattacaggtaaaactaaatcttagtcaagtccatttttaaattttttgtttgttgttgtttggttttgtttttgttttgttttgagacggagtcttgctctgtcgcccaggctggagtgcgatggtgcaatctcagttcactgcaaccttcgcctcctgggttcaagcagttctcctgcctcagcctcccgagtagctgggac

SEQ ID NO: 33105 - DNA, 2640 bp, Homo sapiens
agattcctgggctgactgatttctgttaactacagttactttattggtagtcttaactgttactgtgaaacacccatattctgctttcacttctggagaaaattgtttcatttccatagaggtaatctttctagtgttggagtaaacaggcttttagcaacttttgggttccccatttctatattctcacctatgttaatttttgcctgtggtaaaaatagcaaaaactacaccctcatttttgagacttcctcctttgtccatggagagaagggaagtgtccgttcagaatacttgatagggaattccaagggattgttgttaattggaagccccagagcatcactacatcctttaaccatttcttgatgttaaaggcagctgttcatatatttttcttttaatctttttacagtcagtcatggagggaggtagaggggaaaggctgtcacatttcatgtcaccccaccatgttttataatggctttgaagtcatttgaacgtttctagagtcgtctggggcctagagacctgaactcattttactggatgagttagcctttccttctgtgttaaacctcaaaccttaatttgtctattctgtgttacattataaatgttttccctgagcatcaaaggatcatccaaattttctccattatgttgtaaaccacaaaactatcttctaaagtgttttgagctgtaatttagaataatcctctactgtcctttcaagaatgtccagaatactctgaagatgtatcacacaaggaaatctcttgtgattttatctgaaagcttcacctttgattcatgccatatagtgacttactgtaatactgcttccttttgagtcttgccatttctgctctctggagtagaaaggcttaccaggctttactttgtctaagtttgataacctaaaataaaggttgccttgataattttacctagctatcagactgactaggagtaggttctgtcctttcctcatctactgttttggtgccttggcagaacttttccttggtttcattacttagtatacccttttgttgattatgtgtctttagctcgttggtgacctagttatcctggttaccattcctttgctatttttcattacaaatccccccttaacctgccagccaatcccagttttggttgggaaagctatgagtacacaatgtttacctaaactttggcttttgtatgtagtttctgtactcttttgcttcctgggccctaggttaggagctcctgatttagctgcctggttttgatgtgtacttaagtaactaggtaagttaggttaattcctggttttccataagtttgccctggctcatctccatttagctggagaagctgtggaggatctctgacaccctctctactcttatttgtgtgtagttcgctgttctgttgtagctccatctggttgctttcagttttttagggggcctcccaccatggttagatgcaatagggttttacagggtttagtgtccttcaagctagcctttgctttccactaggtttctgcttttctctaggatttgaaactgagatcatcatctttatctcttatcactgaattataagtagtaacttgaaaggtcaaggtctttttaaaaatcaagcatttttttaagtaaattatataaattatataggattttgttttattgattgcaacttgattgaaataggtataaagtataggtgtcatagttaataaggttccgcctcaccctagtctttatggagtaacattctgaaacacagtccttggacagttcccttaactgcttgactttggcacccctttctgaaggaagtggggtcaaataactcttatccctgctccaaaaaggtggaagaaaggacaagttaattgacttatgtcatttggagcaatgaaactattaacaccaggtatattcagttcctgcccttacctatattttcttatcttggaaggggattgctgtccctcaccatttatctcacagcagcttatttgtttttaaagttgcccagaaagtgtgcaaattaaacttttaacatctacgtgtaggaatcccgttctgcttccagaagtggaagtgctcacggatcggggaaatctgcaaggcatacccctgcaaggtctcgctccaaggaagattccaggcgttccagatcaaagtccaggtcccgatctgaatctaggtaagaaagactgtcttgagatttcctcgttactcttagctctgaaattggtgcgtgttttgtaaaccaggaaggtagagagggttagattatttgttggcctattaaatattggtactagaagtgaacttaagttctgggaggcaagactaaaagcggttaagagcctgggcttttggagtcagggttttctatttttgctggtttgggcagattaacctttcagctttagcttctttataaaaggcaaattagtaatacagtaccagttcttcagggttgttgtgaggatttactaaatgtaagtaaactgcttactagtatggcaaatatactgcagaacattggctttcagtaattagaattcttgataaataagtatatatatggtgcgcttttttttttttaatgttggtcaaaagtagg

SEQ ID NO: 33106 - DNA, 3358 bp, Homo sapiens
tgttacctaagtttccccttgttggtaaagctaccttaagatctgaatatgatttatcaggtaaataagactattaaatgtcttagcaaacttttgattaagattttatatgattcctcagagtattttaggaagaaattttcagtgatgaagcgtgagtttcctgcgtaattttggagcccaaactgcttaatttggtttgaactaatcaagccttgcgtttacatactcggatgagcatagagtttttagtttttgatgtttttcccgaagccgattgactccaatgtcacgagtgttttagatttttttttaagttcttgctttcttgggtaagaaagttgggattgagctcaaaagttgttaaaaagtcgtgacttctgatcattggcagttgaatctgttataacagtcattggtgtttggactgcaaagtaagcgattttaaagtcttttgttattaaacagaaaaattcaattattgggtacctttctactcttcaaaaatactaaatgactggcttctgactagagctctcgattgaatacacgtgaagaatgcttgagaatggaaaattgcccagagttcattagtatattttacgtgagaagggaaacaattgaaactaggttccagtttgagactcggctcaagagaaatttgaaattttctgatgggttatctttttactagtaaaagtacactgtgtttttcgcaatctttgaattgtagagggaggttaacttaatgtgttaaaaattgagttttttttcttacataagagtcttcgctttctggccgagatctctaaacttttacgttgtgaaatacttccatattgttgtgtttggtgtttgcgtgtttgtgttccaattggaacctttaagggttggaatacacctgaatcaaacacgtgtctaggcttccaaagcaagcttgggaaaaccataaagctcaatggaacagcttgatcttagacatgcctgtggtgtaaatgatgcttctctggagccagaaaaatgagtgttattcaactccaggcttctgaactgggtcttaatgtaaatcactaatctcttcaaatcagtggaattctcccttatttatctgtctctaatccagacaaccccacccctctgtgccccaccttttccagtgactgtaggagtttgttgttgtgtccctcccctttaaggttgggtgtgtgggataaattattctcagtttgatcactcaatagaatacatttgggtgaatataatgacatttaaagaactggtgtgtccctcatccctcgttggtctgtgggatttattttttcccccctctcaaaggtaatagattaacactaaaatctgtctataggggtctaattagcaggcttaacctgatctggccaaaccactttcaaaagtaagatctcgttttcatctccggattcaagactcttcccccaaaattgcttgcattttgtaaaggggttgactagcaccatttctttgtaaaaagaggcactcctggcctttaagtcacaattacaagaagttgaataaaaagttgatgaagtgcagggtaatctttagagcccaataatggtcacagcgtataggttgtgtgagatttgtatgttggtcttgcacgcagtgtaatgttctgagcctctcaatattgtaatgagtttctacgagtgagtctttactaaaggaatccagaaactaaggagacactgatgtatggaccagatgttaaagaaaatgttttgacccagcagatactctgatagaatactggctattatttttgtaaagccgatgtgattgcaacataggcacgtaatctttatcattagagatgaatagcagcatctggacaccaacccatcaaactgcttttcaaattctgcagtttttctcatcttctgctgaatcttgggatgtctttttatattccttggttttagctcctaaactctaaattctaattttcaaaactgaaacatctctgaatctacttctttctaaagaattgcagccatctcaccaaatttcctttaaaaaaggattgaattgtcaaataggaggaaattgttttgtattgtgagtctggttaggtttatcagtctcttgaaacccggttgaaatatttttttcttggttttaaacaagaatgctttaatattgtggatattgtctggaactagaacgtgacattttcaagctgacattacaggtgattttataaggtaagtactactggttttgccaaaaggttgaaaaggaattcaggtggtgggggaagtgttaatgggatttgccttacatagcgttttttcctcctttctctacaataaaatccgaacgtaggtggtaaatattaatgctttcatagctattttgcccaggacaagggcagagctacagctgtgtatatttcttgagccttagcattttatgttgatcagtgtttttacatatgcgactgtttttttaacaaggcatggtgactgatgtttaggaattttaagtgttttgacccaggttagtattgggggtgtgggctatgtagaattagatattgaaatcacttagtcttgtttttaaactgcaaaccaaaagaagttcttcactgtagcaaattacagtcttgaaattcccccaaaatctttgctttgaattgggttttggaggttacattgagattgatgttatcaacatagattgttacctgacagtttggataaggggcccctttttctctaatttttgtggttagaaattaggttaaaaggtagtcttctgaaaagtcaaaagatatttatatttgcttttgttggggagtactgactgttttatgaatgtaaatttaacagtctgtgctatatttacaagagagtttttataagcacaggcctacaactaatttcagatgatgtttttttccagacactattctccagtttttgaggatttacttatccatttactcttctggtagacagtttggctgccagaaaaaaatatagtccttattatattgatatgagcattgacctttccataacaggattaatgaggttttctttgcccctgtccctcccaatttttaaaatattgccttgtcagtcaacttaatgagtttgtgcatgtttaatgttaaatggattctagttgtatcccctagaaacattttaacaaaaattgtgttgataggacaagtttctgtttatttctaactagggtctcttaactaaatgtacataacattagcccaagagttgatcttctggttttataaagtagccacttgaacttagctgagttgaattaaatctaatatttataataatttagtaatggt

SEQ ID NO: 33107 - DNA, 1050 bp, Homo sapiens
aactacggcgagcgggtacgtagagctgcggtagggggtggctgtgtggtcctagctccttgcatctttttctaggcccgtcggcctcgggccaggaggcaggggcgttttaggctccgaagtctgaagccgggagggcaggcaagggagacagcatttaaccaaaaaaagcctttgtggatagtgccttagtgcctttggtcgtgaaggagggaggcccccggcgggtttatgtggcttctgcccgagacggccgtttttcccgttataagagggggaagatgaaaatggccgctgcgtccccgcggtgttgggggaggggagcgatatcttatttcggcgttgctctcctgcgaaggtccgccgcagccatcttgggctggcgggctgggcgagctgccagaggcacaaaatggcggagaagccgcgcggcaacgcggacccgacccgcagcgggccgcgcttcgtaaggccgcgtggtggggtgcaaggggacagacgacgttcttttgggtctttgggccggtgtttaggttaacgaaggaccgtctttgcctccacggaaaggacggagtctgggatgtctttggggcctcttaagatggaaactaatccaaggccgactaagttctgggcccgttaggtggaggggattgcgtgagggctttgtgtttggcctaaatgaagcgcttttctctgatgccgaaagggcttcccaggcaaaaatctgtatcagtattctattaggacagaccacaaagtcgttaagatgattttgtggacatcgcatttccacgggattgtgaaggagaaattggcgggcaaccatttacggcgccgttatttcctttgttttgaggcgttctaatacttagaaccacagcgtgtgttggctacagttttctttcccttaagtttccacctcttaaaggtgttcagtgagggttgattgaattgcgggaacaagacagttctagggtttaaacagcatacgtagctggtctgtggggctctgggtattggattcggaaagcattgaatgatgcgaac

SEQ ID NO: 33108 - DNA, 1034 bp, Homo sapiens
ccactcctccaggaaaggaatgtttagtgattttatggtttgggtcacaacatttttttggaggttggtgtgggggtttctgaactgagatacgattacggagtgatcttgttctttctttggtctatcatcatcccagagtggctttgtctaatggtggtggtttaaggtattgtttatgttcaacaaaagaatacaatagcaagtccagatcctacaccaaggcctagctgacagtgctaggctagctcctggctgtcaggagctactcttctctttcttatcatgaacatgtgaaatacgctctcactttggaacctttgtacttttttggtctcttctgcctggtatattcctctccaaatactcattctgcttattccatcatttcatttagacctaagctcaaatattatcttagggaggccatctctctccattctttctctgaaataacatttccagaattgctattccttcaccctgctctatttttctccatggcacctagaactacttaactttatattatatttttattgtattgtattgtattgtactgtatttattttgagacagcatctcgctttgttgcccaggctggagtgcagtggtgtgatcttagcttactgcagcctccacctcctgggttcaagcgattttcctgcctcagcctcccgagtagctgggacttaacaaacatgtgctaccatgcctggctaatttttatattttttgtagagacagggtttcaccatgttagccaggctggtcttgaactcctggcctcaagcgatccacccgcgttggcctcccaaagtgctgggattacaggcgttagtcaccatgcccggcctatttattttatttttacctatctttcctactagaatatatagtcttcaggagcatggattacacagatcacaatgtgaatggtgccctctggagtcgtgaagtgtcatcctgcttcaacaggggccttgtctcttctctatacatttatccccatcagtcagaacagtacccagtgt

SEQ ID NO: 33109 - DNA, 1012 bp, Homo sapiens
acaatgatttacatacagtagccccctcttacccgcagttcactttctgcagttttaattaccctcagtgaaccgcagttcaaaagtgttaaatgcggctgggcgcgttggctcatgcctgtaattccagcactctgggaggccgaagcgggtggatcacctgaggtcaggagttcaagaccagcctggccaacatggtgaaaccccatctctactaaaaatacaaaaattagcctggtgtggtagtgcgtgcctgtaattccagcttctagggaggctgaggcaggagaattgcatgaacttgtgaggaggacgttgcagtgaaccaagatcacgccattgcactccagcctgggcaacagagcgaaactccatctcaaaacaagcaaacaaacaaacaaaaaatattaactggacagtacagtacagtaagatattttgagagagaggccacattcactgaacttttattacaggatgttgttatgattgttctgttttatcattattgttgttaatctgttactgtgcctaatttctaaattaaactttatcagaggtatgtacgtacaggaaacaacatagtatatgcagtgttcagtgctagccgtggtttcagcatccactgtgggtcttggaacacatcccccacagaaaaggggggactaccatatatcgattttttttttcctcttcatctaaacttcatgcttttgatttctacccacaacctagaacacaatgccaggctcacatgggaccctgtaaatgaggttctctattggtaagtgaatagtggatttgtccaactgataatagtttggacattcgtccctgcccaaatcttatgttgaaatgtaatcgccagtgtcggaggttgggccaggtgggaagtgtctgggtcatgggggcggattcctcatggcttggtgccgtcctcacaatagtgagtgagttctcacaaaatctaattgtgtggcacctcccccacaacccaacccccttgctgctg

SEQ ID NO: 33110 - DNA, 1007 bp, Homo sapiens
aaagcagtgcttccaccatcccagacctcaggaaccagtgactctgggaacgatgggctcctatcttgggctgctgaagttgtggaaatgattaaatgtacacagtggaagaagaattcagatagaagatcatgaagtgaagggtggaagcttgttgtattaccagaaactaaggaattcaatttccgcagacacccaacacaggtaatcacatgaccatatgacaactgaagaagaactagagaaaagaaggaaagtagcatttaaggagggcctactacgtggtagtcactttccttgcaatatctcattgaacctttactacaacactatgatagagatattgacaatcctattttaggaaatggaaaaaactgagacttagcaaggttatagggtttctccaatgtcaacagcaagtcagttctagaaccagaattccagcccaggtctgtctgactctaaaagttcatcatctttccacccaaggacatgcatctgtgataagggacagtgagaagtcagtgtgatcaagtcggactcaaggtcactagagaggcaacttcgtctgtcagacagtcgcagacaagccaccttcaccatcagtgctgcacctgccatccctgctgtgcactgagtggtaacactcaggtactttccgtattggtaaggttttacagacctattatactcccgtgagataagcacagcagattttatgagctccatttatagctgagtatagtgaggtttggaaatacaaataattttcaaagttgcatgagtgatttggaaatagtggacttagaacctgactttcacatgtctgaatgaaacaagatggcaggaagggcctgattcactgtcacaggagtggaggctcaggcagcagctgcccagtacctactctccaaggtgtggtttcccaggaaagaagagttcctccaaacagctgggtctagcgacagtcttgcaaccatcagacagcctcagccttcacagcctgt

SEQ ID NO: 33111 - DNA, 1041 bp, Homo sapiens
agtctccaaggagcatgtcaccgtctacctgggcttgcatgatgtgcgagacaaatcgggggcagtcaacagctcagctgcccgagtggtgctccacccagacttcaacatccaaaactacaaccacgatatagctctggtgcagctgcaggagcctgtgcccctgggaccccacgttatgcctgtctgcctgccaaggcttgagcctgaaggcccggccccccacatgctgggcctggtggccggctggggcatctccaatcccaatgtgacagtggatgagatcatcagcagtggcacacggaccttgtcagatgtcctgcagtatgtcaagttacccgtggtgcctcacgctgagtgcaaaactagctatgagtcccgctcgggcaattacagcgtcacggagaacatgttctgtgctggctactacgagggcggcaaagacacgtgccttggagatagcggtggggcctttgtcatctttgatgacttgagccagcgctgggtggtgcaaggcctggtgtcctgggggggacctgaagaatgcggcagcaagcaggtctatggagtctacacaaaggtctccaattacgtggactgggtgtgggagcagatgggcttaccacaaagtgttgtggagccccaggtggaacggtgagctgacttacttcctcggggcctgcctcccctgagcgaagctacaccgcacttccgacagcacactccacattacttatcagaccatatggaatggaacacactgacctagcggtggcttctcctaccgagacagcccccaggaccctgagaggcagagtgtggtatagggaaaaggctccaggcaggagacctgtgttcctgagcttgtccaagtctctttccctgtctgggcctcactctaccgagtaatacaatgcaggagctcaaccaaggcctctgtgccaatcccagcactcctttccaggccatgcttcttaccccagtggcctttattcactcctgaccacttatcaaacccatcggtcctactgttggtataac

SEQ ID NO: 33112 - DNA, 1047 bp, Homo sapiens
aggattccctctttctctgtcttttggaatggtgtcaatatggttggtaccaattcttctttgaatgtctgctagaattcagctgtgaatccatttggtcctagacttttttttattggcaatttttttttattaccctttcaatgttgctgtttgttagtggtctgttcagagcttctatttattcctggtttaatctaggagagttgtctatttccaggaatttatacatcttctctaggttttctagtttgtgcacataaaggtgttcctagtagccttaagtgatcttttatatttctatggtattggttgtattaggttggtgcaaaagtaattgcggtttttgccgtaacttttgtgccaacctactactatctctcattttgtttccagttgagcttatttggatctcctctcttcttttcatggttaatctcactaatagtgtatccattttctttatttttttctaagaatcagctttttgtttcatttatcttttgtattttttctttcaatttcatttagttctgctctgatctttgttatttcttttcttcttctgggttacagttcagtttgttcttgtttctctagttccttgaggtgtgacattaggttgtctatttgtgctttttcatattttttgatgtaggcatttaatgctatgaactttcctcttagcactgcttttgctgtatcccagaggatttcacaggttgtgaaactataggtttgatagatgatgttcagttcaaagaattttttaatttccatcttgattttattgttgacccaaagatcattctggagcagattatttaatttccatgtatttgtatagttttgagggatccttttggagttaatttctaattttattccactgtggtcagagaggtacttgatatgattttgattttcttaaatttattgaaacgtgttttgtggcctattatatggtctatcttggagaatgttccatgtgctgatgataagaatgtatattctgcagttgttgggtagaatgttctgtaaatatct

SEQ ID NO: 33113 - DNA, 1030 bp, Homo sapiens
gagctcccatgaatgtcgggtgggtgagtgagggactgagagttcagtttggcacaaggggtagctacagaggagagcggccttagagccctacctcccttcctcgtgctgactttggtgtccccctaccaccctccaacagagaacggggccttcttctgcaatgagtgtgactgccgcttctctgaggaggcctcactcaagaggcacacgctgcagacccacagtgacaaaccctacaagtgtgaccgctgccaggcctccttccgctacaagggcaacctcgccagccacaagaccgtccataccggtatggccctgccccacacgacccgaactctccacaattattggggcaggacagggagaggatcctagagaaagctgtgtggggcctggagacctggtggggcaaggcaggaggcaggccccatcctggcctgaacgaggggtctaaccctgtcttgtctttgcttagtgactcgactcatctactccctgtatcctttgtctttcctctgagatgctctatcctgcttttctgcctttgctggggtcagaagtgttaatcccactgtacaggtgaagagactaagtctgggaaagacaaatagattcaatttttgtaaagccagaaaaaaaagcctgttgatttgtttcaatgacttgttccttatcaactcacattcctttaccaggtagcttctcatgacctgcttgttgtttaaaatctactctcttagtaccgtaaatggccctattatcccaaaaactttccatgaaggaaggttcagccattctattggtttcctctgctgagcatctactcaggcccaagccccacccctcttgcaaatggaatccagctgtagttgccacaagcggaaaaatctgtttgttctaaaagagagaaactagagcagcctgattgtgtctccctggtgaatgagttgatgagtgaatctgtcttatccaagggaaaagctagaagaaccttcccaggtaatctgaagtagcccctcaggttcca

SEQ ID NO: 33114 - DNA, 1086 bp, Homo sapiens
ggctctggccaaactaggtcaatgggaaggaggggaggggcgagaaaggggttgacggtttcaaaccttgatggagggctctctctagcgttaggcagcggtaaaaacaccattcggtttgagctcccggaaccacgggactcctaatttccaataaatgcacttacttcattttaacttcccagattctcatccctaccccttattaaatcccaaccgtctctttcacctttatcccaccgggcgaaggggtgagaaagcctcaatgtaggattttgaggccaaaggctcgttctttgcagaccgactctgacccttccgcttgccgcagaagggatgagcggcgcagtgtgacgccactggctagttttaggaccagactgcggcctttgtggctgagtctttcgctgtcccctagcccccgaaagcgcaccccggagcctgctaccgagaccaattaggacatggcacccgggggttataattcccgggagggccacaggaaggcgaggcaactttggagagtgccagtgcgcgcgcaggggtcggggccccggcctttgccgagtccaagctgtgtctctacggtttcggggaaatcggattcggaaatccttacggcttggcagctcctgttctaaagactttgggcggaaaccaagtggagctgggttcccgttcttgccaacgtaggcggaaggggctttctgtttagtttttctccaaccttgcctggggcgcctatgatggagaccctcagcccctagggactccatcttttgaccttgaagtctcgctcaaacattcccctaaaagaacgggggtgagggagaatggaaggcaaaaagagggaaaaaagcaaataaacttcggaatcggacaacttaaagtctcgatatgagcctcggattgtattcgaactcctgggttctagacccagctctgctactaacttgtctgaccttccccatttataaactgttgtgggtgagaggtgggactaggtgaactctgagagccctgcactcggcgcggacgagggatttaggggaaagtgtgctgtattccccgcgagccttccccagc

SEQ ID NO: 33115 - DNA, 1035 bp, Homo sapiens
aaacctctcgctcccttttgtgcatttagctcgatctgctgagtttatgggtaagaaagaaggaattagccccagaccccgggaaagcaaagcgcactccccctcttatgtcaccgaatagcaaattagttctcagaattccagaggccgagctttgctacagcgaaggcgccgacgtcacagaggaggagcccacgtgatggtggcggagcaggccataccatcgtcttgggcccggggagggagagccaccttcaggcccctcgagcctcgaaccggaacctccaaatccgagacgctctgcttatgaggacctcgaaatatgccggccagtgaaaaaatcttgtggctttgagggcttttggttggccaggggcagtaaaaatctcggagagctgacaccaagtcctcccctgccacgtagcagtggtaaagtccgaagctcaaattccgagaattgagctctgttgattcttagaactggggttcttagaagtggtgatgcaagaagtttctaggaaaggccggacaccaggtgattattgctgttgctgccgccgctgctgctgctactgccgccgccgccgctgttgccgctggtgccgctgccgccgccgctgctcatgatcattattttaccttttaattctttttttttccgctcttgccaaatgctttggctccaagttttctatgtgtatctattgatataaatgtatatatttatttattctagctgtcaggtgttaaaataaatgccgaagattagtcccacgtctctcccaccataggatatagattgttatgtatttattattattattgttgtctttgagtgaatcggccggtttggggaggcttttgccaccctcccttgtgttgttttggtttttggaaaggaggtggaggagaggaaggaggggaattagggggcggccggagcagagaggacgagacagtgcttggggggtgattcgggctagtctgggggctgtctggccccagaccgcggagaggacgcgcgctcgcgctctc

SEQ ID NO: 33116 - DNA, 1020 bp, Homo sapiens
agacagtgagtacaagggagtactttcttagatgatcccttcttgttgcaaccagagagtcagagccaggcacatactttataaacgagggaagaattaacttgtttgactaaatcttcttgggctgtggttaagaattggctgaagccatcaaatcaggccccagaaaccacaatttattggactacatttttatttttattttaatgttttcctctgtctggtgtgctactagtcattaagctaccagcttaagactggtagtcatatggaggctggttgacttgcctgttgaatgatagggtttcatttgtctttttttttttcctttggttagttgatgggtgatgggtcgtttttgttaaatgtacgtgtggaaaatatctgtgtaaaattctacacttagtaatattaatgattatgttagctacatgaaaggcatatttctaatgcagattctcccggaacccaagattcagatattgaagactccatgttacattcttccttcacttgatctttgcatgttacttgtggaatgctaggagaattgtcaatatcccagtagccttctcttaaggctctatgcttattaaggtgtctcaatcagaacttaacacagtattccaggtgtagcttattaattcaacaataacgatagtaatgataatacatacttataatggagcttaagactggtagacattttcctaaatatttcatttttgctaactttcaaaatcatattttgaaaataagctaattatgtttaaaataatacatcttcaatgtagaaaaagagaaaaacttggcaaagtataaaccaacttaattcactaaatctctcatctgtctttcatttctatttgagtttttattagcagatgcttttcagtgaatctacaagtatcttatctttcttcttgaaggaacatttctttttatacttctaaattggaatggaatatacagttcacttttccaaatattcgagggaatgcctgtctcaatttgactaca

SEQ ID NO: 33117 - DNA, 1032 bp, Homo sapiens
gactgagtcacggacgtgcccttactcacgtcttctgtgatttgaaggcagaatctgaagcaaattccaacacagctgtgagaggcagcccgtttttgttcttaaaatgctaactacacacatttgcaaacctgcaaagctatttttctccttcctttggaaggtgttaaggctaaaaggacatgtagacaggagacagcaaggagagtccctttcctgtctctgttatagaacttctatttatttttagtgtttattttttcacttgtgaatgacatgatactgacctggaagaaacattgcttctgggatatgtagctgatctcctgctactgtccctatagtccaccgaaaagttaaaaggcttcaattctgatcatcttctccaggagaatttttatagccagtgatgtcaagcttacattttaactttgttttcatttgtttgttttttaatatacttggttattaatgtcatagttcatcaatagcctaccaggtacaaaaatcatctagtaaaataaagcaaaatctatggtagttatattattttcaaaactattttttggcattctcattgtgttgcccagtctggagtgcagtggtgtgatctcggctctctgcaacctccacctcccgggttcaagcgattctcatgcctcagccttccaagtagttgggattataggcacctgccaccatgcccagataacttttgtattttttagtagagatggggtttcaccatgttggccaggctggtctcgaactcctgacctcaagtgatctgcccacctcagcctcccaaagtgctgggattacaggtgtcaaccaccacacccggctcaaaccatgtttaagttagcagaagccatttttaaaataaaatctcttgaatcattgtaatttttttaaaaagagagaagaaaaaataataaatgaagatagttgtgttggtgaaactgctcctcttctgtattcaacagtccttgagggacctctaaagtacctccagaagtcattgtgacagcc

SEQ ID NO: 33118 - DNA, 1027 bp, Homo sapiens
ttacacattttcagaagggtggatcctttgatgacagatgtaatttctacccccttatttctccccagttaaaagattgccagttaaaaatcctttgaaaatggtttgatccttttcatacatgcaaatttttttccagtctttaggaaatttatataggctgtagtttttagccaaaaagcacacaccaggagttgagtcttttccttatccaaaatagaaagggtgtggattttccttctttgatgtggataaggcacaacttcttctctaacacttctgatggctgtggtgtttcctctttgttagaaatccactgtgaacatcccatcccttctgcaggtctttcccgtaaaataagatgttttgcatttttcagaccatatgtcttcttggtaagttaggctaaagaggcaaaaaaggcaagttattttcatgattgtgttttcaagactttagaaaattaattttatcataagagaaagacctggacaccattatgagctgcttggttgtgagaatttgatgaccttaggtaaatgcagataagctgcatgatcctctgcattatgggatcctgattatgtgtacatatttattcacctaatcttggagtattatgttcctttgtcaaatcatgagtatgatataattttatttttgtttataaatataggtatacaatctctctaaagtgattcttcattttcttttactgttcatattaatggtaaacacaaggtaattatattcttcccacttgattaagtaacaagaagaaaacattaaaaaaaacccacctctgttgtctacagcattggctctcaatactctatgcaaagcattctgctaagctcatcaccttcacaaattcatttattcctgttaagaatcctaaggttgaaaatacagttcaataaagggaataaatttcagtattcaatagtatggtagggagactatagttagtaataatgtattgtatatttcagtgtagctagaagagaggaatggtagtgttcctagc

SEQ ID NO: 33119 - DNA, 1027 bp, Homo sapiens
tggactagggcagcattgggccagttacttaataagagctcttctgcatctgccagcttgagatgctaaaatactttagtggattggtacagcaagccaacagtctacctgtggaaacagaaaactgatgagattataaaataatggaatataaaatgcaatggacataaattagtttaaaagtttacaggaaaggaattacttccagtgtatctaatgctggtcctcatcttggggcagtgaatccctttaaagtaaaacttgaaaggaagttacacaaatatttaatttaatggtaatttaagaggacagaataaactaggcaatgttcaagagagacaaagaagatagataaaaggctcaaaaccatatatgagaaacagctgatatagaggatgagtaagctaatgaagaaaagacaagcaacaacaacaaaaaatctccttttgcagtttcaaaaaagattatcatttgaggcgattgttcctgatctttatggcactgaagaattgaagcactaggaccaaataacagaaattacagaaaacaagatctcggctcaaatgtgaaagactttcctcacactattctgagatctaataggaagccctagaaggtgttcaaacgtgagtcaaacaaatacctaatgtagaggttgtatttaaggtgcaagcaccagagtgatgttgaaatgaatgagatttaaaatattttccaatccaaagtctataagactccatgattttgtgaaatgaaaatttctcttgtactcacagaaaggatcattaaagtctttttcattgaaaaaggcatacagttttctagcttccttttgaattctagttaatgtattttaggccatggttgccagcctactccctataaatagttacataatgcaaaaaagaaaagaggaaaaaacagtaccaaggccctaagacacacatgccagaacacacatgcatggaatatttagcagtaataatatccacatgcatgattggcatcagtcctctgatttccgact

SEQ ID NO: 33120 - DNA, 1074 bp, Homo sapiens
tcaacctccactgccactcacccaattttccttcaaattgacactcttaacccttctttctcgttttctgtgttaatatatcaatgtatcttctacagctaccggaaaagtggaagctttggggttggttgttcatgctagccaatggaccaggctgctctgctctgctctgctctgctgtgctctgctttgctttcttttctcctctcctctcccctcctctcctctcctctcctctcccctcccctcccctcccctcccctcccctcccctctcctctcctctcttccttttcttttctttttttgacggagttttgctcttgtcacccaggctggagtgcagtggtgcaatctgggctcactgcaacctccgcctcccgggctcaaacgattctcctgcctcagcctcctgagtagctgggattacaggtgtgcaccaccatgccgggctaatttttgtgtgtgtttgtgtatttttagtagcgaaggggtttcaccatgttggccaggctggtctcgaactcctgacctcaggtgacccgtccgtctccgcctccaaaagtgctgggattataggcgtgagcacggctggaccaggctgtgtttctaaggagatgaaagtacataccatgttcaaatatccaaatgccttttgcagctcatcccacaagatctctgccctcatctgtggtagggttctctcagattggcaactgttggtggagtgcacgaaatttcaactaagtataaatcttaacttccttgtgttgtggctaaggtgttggagttcactggactagtatcttgggcaagaaatgaggagaaagtctgaatcctttccaggacttgtcttctgcttgcttgtgcctcctgattgctaaggcatgtatgaagtataactctaatttcttctaagtgatttacacaatttctggtggtcttacagaaatcagtcaacaccaggcagagaggggaccttgagtgtctgacggtgaagttatcataagctagttcccagagcagaacatgggtggtccctgtagcttggtcctcccaggagtctcggatgtaa

SEQ ID NO: 33121 - DNA, 1064 bp, Homo sapiens
ctatttagcttcatcctaatgttgatatttaagacagctgttggccttggactaacaatgcttatgagttggcatttttaacaacttttaacatgtcaattaccaatttgccttctccatgcttatttctgctcgtgggtaagttgcttcatcataacaactgaaactatgtggaacacaggaaaatgtgactgatctggaagccagtttgtagttagagctccttttttctactgtaacacacatatagacctatttggagcatctgatgatggtgacctatgtgtcacttgtctcttctcattccacatcttctgttagcaaaaatatttgacagtaccattacctcccccaggagaacatttgcaaataaaaaagtaaaacacaccaagattcatggaagaaatgttactgtgcttactcagagattcactgttattatttctagctttggttctgggttctctcatttattaaacatgaaatattgagaaaatatcttgccttttctggctctgaatttcctaagcagtaaaatgagtataacactgatctcacgtggttattgtgaagaataaacaaaaatgaattagtaaatgtaaaacgtgacacacaatcatatagtttcttggtaaatgttacagttcccgtctctgtcgaaggaaaagcatcttctagattgagaaatgacctaattcagtttggcattctagtaacgagcgttataatatttgtaaattacatggacacacagggagaaaagtaacagttttttaaaaaaaagcccctcccttttcttgacttgggtctttcatgccctggtactccaggaagttccccaaccctggaatcagagctcactcacagtcaaatgcccacagcttccacaacggtcagtgaaactgaaagctgcattggaataaatgggccacgaagatccaatctattgagagtcaccacagctacatgaaataaggaacaatttggctgaatcacaggcctgtgagtagtgtgagctgtgttcaatctatctgttgagccacggagagagacagttcttatgg

SEQ ID NO: 33122 - DNA, 1049 bp, Homo sapiens
aggaaactaaggccttgtgtggttaattgacttgcacagtgccagaaagctagttatcggctgggtggggatgtgaagccaggtttatctggctgaaagcaaatgttcttaaccactgtgctcttgcatactgtatgtatagcaagtgccactcagtaaacatgctttccttgctgcacagattataaataaaacaaacacattagaaacatcaagtttcctgattcgattaattcatcttctcacatccttaatattcaattattaagatgcttaccagtacaaagaaaaaattgttgtgaaataaagtgataagagttggaaaccagagtttaagcccgtgtttgctccacactctctgtagattaaacagatattgcatttctctgggcctcagttttctcacctgaaaatggtagttttaaagattattttcagctccacaattttgtgaattaaacttgatttctgagataaaatgaaaaaggaatgagagaactatttagagattgttttctaccctgctattgcctaccaaatcctaccaaatgtcaataattttctttttataaatcttttatagaagtttctgattatgtagcattttaaaggtattgtttattacacgttataaaaaattttatataaagggaaaccaagttttttagcacatacaaattttatgatatgtatttcatttgatggaacgatgtgcaaattcatttactttccatgcaagagtgatcttgttttgatttcagactaagagctggaaaaataatttccattttgttgttaaagacaatggatagtaaaacaagatctgggtggcagggaataacctccattaccagggggtagataacaaatggctggatgtgtgacaatgtccaattcataaaattctggttaacaataatttaataatacttctttgtgcgaggagaaaaaataaaagaaatagtcacttggagaaatgtaaatgggaggagatggtgtttttctgtcattgaatataacaatacactacattgtctttgtaacaatgg

SEQ ID NO: 33123 - DNA, 1031 bp, Homo sapiens
taagccagtacttcccagagtattcatttgaggaatatttttgggtgatattctggaacaaacctctggccatggtaatttttttttttcttttttttaagacagggttttgttcttttgccctggcaggaatgcattggtgcaaccttggctcactgcaacctcgacctcccaggcccaagcaattcttccacctcagcttcctgagtagctagaaccacaggtgtgtgccaccacacccagctaattttgtttatttttttatggagatgagatctcactgtgttgcccaggttggtcttaaactcctggtttcaagtgatccttctcccttgccctcccaaagtgctgggattacaggtataagccaccatgcctggcctgtagtgataattttttaaaaagtaacatccataagattctcaaactgttatgtccatagaataattaataaatgaaaagtgttttataaaaatatatacacatatatcagatgttcttcgtatacaagaagctctcctactcaatagtagtaaatcaccagaagataataagaaaagcaatttatttatgcacaaatacatgtacagtccatgaactggagacatggtaatttaatgttatttaataaacaagggatagtgacattgtatatgtagatagatagataaatacacacacatatatgcatagaggtgaaaaatacacacttgtatgtatagatgtttttcgatgtatgtgtgtatatacatgtatgttatatacatattttttgtatgtgtccttttttttgaagtaaataactttatagcttaccagaccagaattgattctaagattcctatattgttattaacaaggatacaacctgcatgtaactattgggatatttttgtgttttaacaaagagtcactttaatacaatataatttaagaacctgtcttttctgtgtagcaagtgaatttcccagctagttacatgaagaaataagtatcatgatgtgttggaaacttgagaggtcaagtcccat

SEQ ID NO: 33124 - DNA, 1088 bp, Homo sapiens
cattggcaaaatgggtacagggtgatcagcctgagtgtagatggactatagcatagcatttgattgatgtacaagctcaataaaaagtgttatgctaggccgggcgcggtggctcacacctgtaatcccagtactttgagagtctgaggtgagtggatcacgtggtcgagatcgagaccatcctggctaacacggggaaaccacttctctacgaaaaatacaaaaaattagctgggcgtgttggcacatgcctgtagtcccagctactcaggaggctgaggcaggagaatggcttgaacccggaaggtggaggttgcagtgggctgagatcgcagcactgcactccagcttgggtgacagagcgagactccatctcaaaaaagaaaaaaaaaaaaagtgttatgctagtctacataacactccctatatgtcctatgtgtctgactttttccattcagaatttcccaaatgacccttgctttcacactgcttcttccgccttgctctgtaacattctgaatgatctgaactcctctttgggccactgtccagactcttggtctctgaactccacactttcagttgtttaaattcaccaaaaaaattcaccaaaaagtcgtttctgactttgaaccttttcttttacttctgtccttgtgtggagtgttattattttttactcctcattttttctgacacgtactcacttcctctagctaattccttctttttctttacactcatcttcaatgttctatcctgagggagccatttttgacgccctagggtttggtgaggtttatcctccatagcagccaggactccttcagaacacttctcatatttgtaattataataactgattgtggcattatttatttagtttctttctgacaagagggtcaatttcacgaggacactagccataccgccttgttcatagttgtgttccttggcgtggtatcaagaccagggtattggtggaaggaaagatcaaggttaggatggaaggaatgaaggcaggcaggcagtaggtttaggatataatttttgcttgcaccttatttggtgcgtatttttcagaatgt

SEQ ID NO: 33125 - DNA, 1044 bp, Homo sapiens
atatatgtattaaaaatcttgagtgagaattacctgttataaagagaagtcatcacatttgggagctcctcaacacttttgcatctgaataagcaaattaacatctgttctatccttctttccttctgttagaatgaagatgttatttcttccagctaagaccaatctcctgtgttctaaatctcatcctctctcaccttcgtagggaagatacatcacctttcatcccctcttctctagcttcttgctgttttcaatttaatatgcttaagtctttataaaatatcaatagtccccaatcctttttcaggactgaaagagtgcctacatttcttctttttgatttttaaccttttaacaaattctgtatattcactgttggcttttctttacctctcacttctacctcatctttttctaatctggcatttacactcaacactaacactaacaatcctgttcttgccaccattactaatgatgtctaatttaccaaatctaatggatacttttcagccctcatttatgtgacttcttgatagcactcaacattgctggttaattcctgtttttgaaacagtctttactcccatttttctggtttctccttagtctctttaagcagtttatactcttctgttccatctttagagatccaaggctgagtcctggatcttaaacactcacattgtactttcatggctttatttatcaaaacatcaacactgccacatttatatcttcaggcaagacctctctcctgagttctaaacctgtaaatccgacttccacttggtgcctccaactgaaaatatcctaaacctaatttgtaggtttctttctaaatctgttcctcttctaatatttccctcctcaaataatgtggttatcatgtttaaacaagcatgtacccactttgccaatggtgtagaacctcaaatatatagccataaaacctaaacacctttgcacaaatttagcctttgatttcatctacctttgtccaagaataatgtcctttctttcttttccaattattagtgt

SEQ ID NO: 33126 - DNA, 1026 bp, Homo sapiens
tcctattatgcaaaaaatagctctcttgatggtgttttatatatcacataaaattttcattcctttttttcttttttctactcttactatatgatataaaacaatctgtcttctagtttgcttattatttcttctgcatgatctattcttcttcaagctctctattccattctgttgttcagtcattgtattatttagctccaaaatttctgtttggttattttctaatgttttctatcattttgttgagcttataattttgttcttttattgtttcctaattttttaaactgttttttgtgctctcttgtttgctgaacttcttttaaaacgatacatatttgtacatattcatgaggtgcatgtgatactttgttacatacatagaatgtgtaatgatcaagtcaggatatttagggtatacatcactttaagtatttatcatttctatgtgttgggaacatttcaaattctcccttccagctattttgaaatatataatacattgttgttacctgtagtcaccttactctggtatcaaacattagaatgtattccttctatctatctatgtgtttgtacctattaaccaaccttactttatcgccaacatccatataccccttccatcttctgatatctatcattgtactctctacatcctggacattgacttgtttagctcccacatatgagtgagaacatatgtctttctgtgattggcttatttcacttaacatcacctccaaccaattcagtccacgttgctgcaaatgacataattttatttttttatggctagatagtatttcattatatatatatcccacattttatttatccgtttgtccactgatgaatttttaggttgattccatgtttttgctattgtgaatactgctgcaatacacacgggggtgcatgtatccttttgacatactgatttccttttctttgaataaatatccattggtgaaaatgctggattatatagtaatagtatttttagtttttcagaaatctcta

SEQ ID NO: 33127 - DNA, 1051 bp, Homo sapiens
acagttatgttaatttagaattcatttatgacctaagggacctgagaaagaataaattaattcagaattaaatgtggatgtgtacgtgcatgtctacatacacgtgcacgtatgcatgctgagatgcattctatctttaacattctaaatcaggtaaaaagaaatctcaacagcatacatattgggctgggagtaggtcaaggtgaataaattaattaaatgtaacattctttgatttccttgcgtcagttcccctctcagagaaagagagatctaaccagaagacgcaatctaattgatgttcttttgtttttttaatcccagcaaattaaagagactttgccagtgatgtttttagttctttcaggaagaatgtgattcctgcttacacttgtacattgtaattttagtatatatttaaagtttgctgttgttttcctaacctgagcattttggggaaattctgagccttagagatgaacaattagcttgaaataatgatatttaagaagaaaaatctgttggtacacaagggtcagtggctctagtctcagtttctgatgagttcatttcatcattacccttggaatcagaaacttcttttttttttatttatttatttttttagacaggatcttcctctgctgcccaggccagagtacagtggtacaatcatggctcactgcagcctcaacaacctccccggccccagcaatcctcccgcctcagcttccagagtggctggtactacaggcataagccaccacacccagctaattttttattttttgtagagacagagtcttactatgttgcctaggctgttctcaaactcctgggctccagcaatcctcctgccttcacctcccaaagtgctgagattacaggcagggatcagcaacttcttaaaggtggctgataaagacaatcatatgttgaacacagaagaatggtgaggatggggtgggggttggggaagattgggagggggcctggtagaccaaatctgcttctctaagcttcatcacagccacaggcatcttacagcttc

SEQ ID NO: 33128 - DNA, 1441 bp, Homo sapiens
tcccagctactcaggaggctgaggcaggagaatctcttgaacctgggaggcagaggttgcagtgagctgagatcatgccagcctaggcatcaacagcgaaactctatcccaaataaaaataaaaaaagcaatgactgaagtttagcaaactcctaaattaagactttttctgagcctttctctgtagcatgtatttgctactagaggcaggcaaggtcataacctagggtgagctttgggttattaattcaaagacccagtgtctaaatcctcatctgtaaaatggggacaaaattatctgaactcccagtcactggatgtggggaccagtgagcctgctgggtgtgaaagcacgttgggagctgaagatggaccctgcctcacgggcagtgggggttgttatgtagcacgattcctgaagtgtgggccaaaggagctgccagtgccacatgaatttgtgagtggtcgtcatgggtgtgtgtcatggaatagaagtgttaatatttaatatctgggctaataattgtaatcattgtttgacacaagagaatgtacaagatgattttaccctatgaagtaaatgagtttgtttttctccattctacaaaccaagcagtaaaagtgcaggtgggttaaataataggcctaaagtcgaatcaaccatcggaatgtaatttgttaaaactttgccttttgttcacagcttttagagtttttcttttctcatggatcacatttttgggaagggcttcccatcacctctataccagtaataacagctgacatttattgaagcttggtctgtgccgacacattttacagatgagaaaactgagctagaaatgttaagtagtttaccagaggtcatgtagctggtgtggaagacccatttaagttttgctatcttaataacagtaataaaagcattaacatgtattggctgtttgctaggtgccaggcatcatgttaaacagtgtcatctagaacctcatttggtatcacactaagcctgcaagggaagcccttgaaaatgttatgcagagggaggactcctaccatctctcttctcttgcaatggatttgcaaatacctttcttttgcctttcttttaccagcttggaaacagcaaatttccagtgcctcttatgataccagcttttcctgctcttgttctgttacattaattattttgttctatttattaattattttcctgctcttgttctattacattaattattctaatccagatgttatgaatcggctgcctgcagtctgaatttggcttgcagccttgtcctgtttcggccttcaatgtattacaaatgcatggttgaattagatggcaatgtctaaaaattcaggtgaccatatgtaaatctgtatttatgttttctcatgaaaaattgcataatacacctacctgtttgagataaaatga

SEQ ID NO: 33129 - DNA, 1029 bp, Homo sapiens
agcctagatcgcgtcactgtactccagcctgggcgacagagggagactctgtctcaaaaaaaaaaaaaaaaagaagaaaatttacctttcctgtgtttcctcctaatacctggtcccttttgtggcccttagcctgttctttcccatgctttaaagaatacctggcttatttatctttgcagcacccagggggtcatgcacatagtaggtgctcactaagtgtgatgtgacttgagtcactctttaaaagagctcttcccagtgaagctttttattgcagtctctgagaaattagcactttctaaccttgtctctttatgatttttaaaaatccattgagttatactttatcattttctggagtccagaaaattttgatcttatctccttatgtggcagagggatgtagggcaagtttttctacattccttaagacctatcctagggcaatataagaaatgtccatagtgattgctgtagcttgttgactgggaacagcaaactgcaactcatgactcatagggatgttcccttccttgtggaccccggtgtttcttcacaggcatgtgagggtacttccggacctctggcatgcccatactcagggcttttcagaatgcacagtgggcacacgttatctttctcattatggcgtttagtgtgcttatcagtcatcctccaagtgcctccacttggatggttaatctggaacgcaagtcgtaggaattctttattattagaaactactgttatttgcgatcaatactaatttatctttgcacaatgctttatagatgacaataaatattcacatttggtatggtattatccttaggtcaggcctttgagaaaggttgtataggaagtattaatccccatttctagatgggagtactgagactctgggaggtgatgtgactgattcgtaggtcacagaatcggttggagatcaagactccacccagctattgggtgtcttctgccgcagtcagtatatcacctgcaaagagcttgtagacttttctactc

SEQ ID NO: 33130 - DNA, 1060 bp, Homo sapiens
aagagagacgtatgtctggatagaggtaaaatgctatggagtttcaggagaattaagttacttttaagttggggtaccttggaaaacttcctggagggattggcctgtgtaccttgaaaaataggtaggattggggcattgggaatgtgcttagtcgtgggctggagaggatgcaggtacccatggtattaaaggccaagatcctggaacttgaagactttattcagggaacatggtctggagcctagggaatgtgagggactggaagaggcagcttgaggccatgtcacaagctccttaaacatcttgctgaaggactttggaccttatctttagacagtggagagccatgaaacattcttgagcaaagaagaggcatcagggtttccctttagaaagatggctctggcaaaagtgggagagtggattgcagggcttggaggcagaaagggcagttaggcagttcaagccagtgaagaaggttcctaggaggcaggtgcagactgactcccagaggcatctgtctacatccagctcctctggacattgaccgcacgctcttgggaactgagttcaactcaaacctgcctaccctttaatgcagtgttcccaacccccaaccaggaactcaggaactcagatttaattcctgagtctaactaaggaatcatggctctgaccgtattaacctaagcctcatttccaccttccaggatagtcctccagtctgcaaccaaacatttccctcatcgaaggctttggtttactcactgttgcccctaaggctactctgagattttttttaaaaaatgttttcttacactgcagagtgagctgtgccctgtcatgttctgaagaaatgatgaacaatgcctcctttgttgacctgcaacctgggccaaaggggaaggaattttctttcttattttaaacagatggaaaagtggtgatgacagaaaattgtctgttgcttttggaaaacgtagggttttcctgtgtggtgaaaatcctcttggtgaaaggtgatgagcctatgaagttaccctcctttctgccatgg

SEQ ID NO: 33131 - DNA, 1510 bp, Homo sapiens
ctcttctgtccatattgttttcaaaggaatgaggtgtttaggtggctggaaaagcatttgtaggaagttagatttgaatatagacaaggtgggttattcacgttgagaatgttatttgaagaatgcctgtgaagccaggtgtgggttctactcagtgccatagatagactgagtcttctctcgtaggttaccattacatagtaattttgattctgaatttcacattaaattatttgagtttatacagacctaaattttaaaatctgtacatatattattttgatgtattaagatgaatattgctgatttaaattttatttatgcacatacttaaaggacagaaatgtctgggaaagtaattgttaaataatgatatgtaactttttaactttttaaataaataacaagatttttaatgtgtgtctccctcagggttgtttaaagttttttttctccctcaagtataaatagtggtaactatatgttttgtatcttctagcaccaactgctgtaaagcaatgctgcaaataatgcttgaatacaagtggctaagccaacaacagaataaatacttttatagtagttttataatcctgaaattcgaaagctttcccaattgcacttgcatctaaacaaaactgttgcagtttttactctatttattttgttccccatgtttatgaaagtcctgcacagtttcaaaggcatggtaaataatatatcaatgtttatgtagtctgttacagaaacagctatagataacattatccagtgaagagcaaaattcaagctttagaaaatattcatgcatgcaattttgacatatctaaaaataggtttttgtatatttatggtgggaggtggttgggaacttttaacaaaatggggtgttaatttttgtacagtctgtgggcatttacacatttttaatgtattaaaatttggtaattatgtgtacattaaattaataaaagttacttctagttatgatttgtgaattccctaagaccttggatttttttaagtaactttatatcagaaatgatactgcatctttatatttttaaaattgtattgctgctcaagaatggtaccctcttgtcaaaaaggcatacattcataattgtacattcagcattgtaaataatcttatgaaaccttttttgattgaagctattcaaaataaaaattttaatgaatgaaataacactttttttctgtgtctttattcatttgtttgctttttagtgacatgaatactgccctttgtggatttattttcctgcctaataatacttccccatttccttcttttttttttttaaaaaaaactggattttgaaggaaataagaacaacattctgcatatcatgccatgtgtgtgagcatcctggggaaaccccacagtcggatgcagtgtagagccaaatgttaaatgcgaggaggtctgagggcaatggtgaaatgaaatagaagagtagggacttataatctattaatagttgggaga

SEQ ID NO: 33132 - DNA, 1712 bp, Homo sapiens
atggatcatgtcaaatcatcaccataacatagcagtgaatcagtctcagtggtattgctgatagcagtattcaggaatatgtgattttaggagtttctgatcctgtgtgtcagaatggcactagttcagtttatgtcccttctgatatagtagcttatttgacagctttgctcttccttaaaataaaaacagaaaaatatatcgtcctaacagttaaattaacaatcaatccataaagtcctatatcttcattcagcaacccaaatattacatacatttccagaattttcttgattgttactttcagtgatattctttatattgggtacaggagaagtttggtgtttggtaggtttttcaacattagtttttgagactagtttacctcttcacatttatgctcacaaccctcttgttagaaaagtctgtgtttatatacaggctgtaagtttgtgattgataaaaagaagatgagtgttaattagcctccagtgaaaatatactgaaagcctgttttcatttgattccaatgtttcttccaaagaattctgtataaacatatgccaattccctatgatggtctagagttaggaatgagtgtttatggtgttgcttatagaacaactcaggtaatctccatttctggttttatattttctgtacaaactgcctgggttttatttttctaatcagcaaggtgcttcactgccttcttgagacgcctctcaaagctcttaaatggctcctgtgctatgtgtggtgttggcagtctaatttgcttctgttaaatgttgtagaacctttttcactaggaaataagattcatttctttcggcagtagatgtagattcatcttttaacgtttcttcaaatttgtttctgtcaggctttgtgttattttaaatggttttttaaaattttcttctatgttttcaattacctaaagacataggataatagttttttttaagttagaattttacctcataaaattttttgaggtttgatgtatgtctctgtcttatcaataatgaggcttaaaaaatactggatttgaatggctgccgttttttcaaagcaatatgaatttgatgagtttgttttatgccattaggtggcgccagaggtcagaacatgtctattttgaattggatcgttacaaatgagcatatttgatgcggaaatttctgggagaaaaaaaattgaggaaataaagttaaaaaattgacattcattgagccaaaagagatgtggagaaacatttttcacctttctgtttggcctgattaacatttaaattcttgccaaaattaaggtaacttttaaaaaacaccttttataggtggatccagcagtctggcaacgcccacagttaccacaacacagaaaactgatcgtgctataaaatggacgctaaactatgaaaacagtgtgacattgttctctgttcttccagagccagtaacatgcttgctcgtgctttctacttctagctgatcattcttttcccaacatatatttacaaatttaccaaattttacctagaattttaggaccaaatggttctcactctttatgctgcaaagacctggatgatgtttggtaactatagaaaaatagaaattacactcaggatcactgttactgctattgccactgatgattcctgcaaaaatataatcgaagttttccatcaaatgtataatatgcta

SEQ ID NO: 33133 - DNA, 1073 bp, Homo sapiens
aaaatagcagcttttcttagctatacctgtttaatctctgcttctggtgccgttttcatttgtctgcaaacaaattaaatagcccttggtctttaaaaacataaaaaaacgttgatcctggtacctgttactcctctcttctctaccagtctacttcttgagtagtctacacatgctcccttttgtgttttggccatttagttcttcaattcttttcattaaaaactttctgagtaatgaaatacttgtttttcatacaaaagaatatgcacacatatttaagttgttagccataattaaaaaatagtaaagagataacaccctgagtgtatcatccaacctgaaaaaatgaacattacctgagcacaagtcagtgacaaaagaaaacaaaaaaaaggtaacgttaccaatcaataaggcactctcatgtacctgttttgatgattttccctgtcattccctgtttcattatatacttaccatatatgtttgcagtcataaaagatagttttgtgtgctcttgaacttcatgaaaatgttatcttgttcccttttttctgtgacttgcattctcccatcaacattgtttgttgatacattattttattttcattgctgtatagtatacaattgtaggaatatattaaattcatttctccatcctctgttggtaaataattactgaacatattgctgctatgaacatatttttacatgtctttcagtgtatgggggtaagtaatagtgtatgaaagagtggagtaggagtggtttatcccaggtacaagcagtgagagagtggtgcgatgctgtagagaatttgcaaacagtgattaagcccagtagaagtccatctgctttttaaatattgccatgtgctggtaattccagacacttccagtggtaatatactccttccactactacccttggcaaaccattagggacaaaagtttcctctgctgtattctggtatcatgatgagcatgtactcttcagctaccacgtgccaagttgttttccaaagtgattgtatcaatcatccatcagtgtttgacatcctgttgtttcac

SEQ ID NO: 33134 - DNA, 1036 bp, Homo sapiens
aatatgagtcccacttttttttttttttttttttgagatggagtctcgctctgtcacccaggctagagtggagtggcgtgatctctgttcactgccagctccgcctcccgtgttcacactattttcctgcctcagcctcccgagaagctgggactacaggcacccgccaccacgcctggctaattttttgtgtttttagtagagacagggtttcaccgtgttagccaggatggtctcgttatcctgacctcgtgatccgcccgcctcggcctcccaaagtgctaggattacaggcgtgagccaccgtgcccagccccacattttttttaatccttttggtcagtggctcatggtaaaaaatatgtctccacctttggtataagtgttagtgtaagtttcagcctaagctactaaaactatatatatatatatatatatatatatatatactatatatatatatatatatatacaccctacacactggtatatataaacataaaaataatatagtatagtttctgtagaatgataaatatttacctgtagttttgaattgatattaacaaagtttatatttacaaataacatccacgtttaaaaatggcactgagacccttcatttacagtcagtaaaaagtaagttctttacccagtctggaggcttcatgataaagtttttgtatgtggtcttagtaaagtttgagtttgaagtggagttcaaataggaagttgtaaataaatgtccagatcaaaggaaaaggggaaaaaagtttgggctatcaatatattagaaaattttggagccacttttatggcttattattatacaagtatatgcttatatacatgtgtgtatatgtgtagatgtacacacttaagaaaatggccatgagcaagcagtttggtttttgagttaggaaagtgagacaaagtactgctgggtggatttgccattcccagctcccatagcaagccataaggtcagcccactttgaaaaatagtagatcaactcagtctcttggcttttggcta

SEQ ID NO: 33135 - DNA, 1046 bp, Homo sapiens
gaatattgagggacatctcagcaccggggactcgctaggcatttgcatgagtcaacttgtgatgtaggtaccaacatttaaccagcgaggaggtaggctcagggagagtgaataatatttcctcagttagcactgaaaagtgatagtgcttgggtcaagcccattgtctctgttttcactctgctaaaattactcccaaaattaaaaaaactgaggggggcttattaaatatttcctacttgattctaattttttaagtggttgagatgtcggactgaagagaaaacccttcatactcttgtacctgttttatatatcttatattgatattgttggaccttttgctgtaaatatcatatttctatttgttatgatagtgattcagggcaattaaggtaagattggtttcttttgggaaatgagtattatgtttactaatgcagacattttttgcatgtgttctagtgcttgtaatacaacaggaagcgggttttggaattcttcacacgtagacaatgaaaccgaacttgatgaacataatatacaaaattatgaaaataccacagtgttttttatttccagttttcagtacctcatagtggcaattgccttttcaaaaggaaaacccttcaggcaaccttgctacaaaaattgtaagtttggcatttattgtgatttccaccctgcttgcccctttaaaactaatgtagaagagaataattataactgtctttgccacagtaaaccagatcttcacagatagaatcaacttagtgatttagatgtttaccgttttgttttactttcattggtagttgccaccctaagtttaaagttcaagctaccagtgttaagcactgttgtttttcacatcatagtgcctctggctccagcttttatttctgcaacccattgtggagggagttaggatgggaagtggagacggaggttcctcagcccactgttgggtgagttaggatcgggggcggagacggaggttcctcagcccactgcggagggagttaggaatggaagcggagacagag

SEQ ID NO: 33136 - DNA, 1049 bp, Homo sapiens
ggaaatagtgtgtggaaattgaggaaagaaatatctcgctcttctgttttggtagcagtgggatccacaaacctttgtctgcttctccttaataagatcctgttcttgctgctcttctttcttctcatgactgagaagttgtctctcttgtttctcgtttacacctgttcttattacctgtcttacctttttgttttgtatgatcttgcttttgtaattcatcattttctatgatatggtgctggtgttcttgcacagaccactagtcactttgtaaagttatttcggtaagtatttattgagccacctgatctgtgtgtagcaccgtgccaggtattgtgtagatacaaatagtgcatgactggaaaagattgagaattatatttggctttaaaaattgtgggtgagatgttttctttagcatataacgtgcttgcgttatttgaggcttcttttgataagtatgctccaattttgttatttttaaactgtaagtggaagaaccatacattatcgttactctgccagcccagtcatggagactgtagtagattctcagcaagtacatgtttgatacgttcacgtttccattttaatttcaatacatttaaaatattttgaaaattaggtgacagtatgttgactgctgtctctgtggccagagattgtggaatgattctacctcaggataaagtgattattgctgaagcattacctccaaaggatgggaaagttgccaaaataaattggcattatgcagactccctcacgcagtgcagtcatccatcagcaattgacccagaggtaaggtcaagatcgactgtccgttttaaagtttgttgatttaaatttagtctgaaaaaataaaaaaagtggtgcattaaaacacagtaaagcaaaaactaaatgaaaacagaagtcagggctattttttcagagattatgtttcattaggactgggacagacccaggaatctcaatgttcaaattttgatatttagctaagatgagaagcatagttttaaagtacaagaattccagatgtttat

SEQ ID NO: 33137 - DNA, 1023 bp, Homo sapiens
tatgtacacttgcttgcaccccttagtttattttagtacttaaaatgttaatattttcaggatagcagaacatttgaaaatatttaagaacatactttttaaaaatgggaagtagtatagaaggaatcttgaatcctgactttgaaaaacagttgcttgtttcttttccaaataatgttttgtggatgcttagtaaactttttctaactttagtgtgttaatagagttaatctgtactattttttcttgttttgtttcgtttttaggagctgtttgaacttccagtaagtgaagaatgtttacttcttactaagtatatttgttttgattctttaagaatattaagtgctttgtgcctcttttgaaatgatataggctacttatgagataggaattgttcgccagttcccattttcttctgctttgcaacgtatgagtgtggttgccagggtgctgggggataggaaaatggacgcctacatgaaaggagcgcccgaggccattgccggtctctgtaaacctgaaacaggtaaggaaatatctatgctttgggtacaattctggtatttgagtaaacttgtattagcaactctaacaatgaaatttactctttcttttaaaaagttcctgtcgattttcaaaacgttttggaagacttcactaaacagggcttccgtgtgattgctcttgcacacagaaaattggagtcaaaactgacatggcataaagtacagaatattagcaggtgaggttgaacggctttcctagtttcccagtcatcatcatttatggttatattagtcatgcacagtaatttgcatgtaattgagtatttattgaatgtatgaaaagatatctaatataatattgttttaggtgattgaagtaaaagtacattttccccactgcctgatttcctttcattctgggtttttttttgagagacagtctcaccccgtacctaggctagagtgcagtggcactgccgtctcgggtcactgcaacctccgcctccccggttca

SEQ ID NO: 33138 - DNA, 1042 bp, Homo sapiens
tgaagaggcgaggtctcactgtgttgcccatgctggtcttgaattcctgggctcaagagatcctcctgcctcagtctcccacagtcttgagattacaggcttgagccactctgcctcgcacatacattcatttttttaagaactaaaagtatacatttcagttcctgagtttgtatcaaattcatttatttatataaaattgtatttttcttctatgtagcaggcactatgctaggctctggggattcggtgtagagataacagtagtaacagtaacaatacagtgtgacaaatgctatgataaggagaagtcagccaacttatgtattaggggagctcatttactgtaggtatcagggatgacttctttgattaagtgcttgtaagtgatgactatttgaattagccaaataagaggtaggtgagaagttgataaggggaggctgagagaaggagagaagagggttctaaatacccaaaggcctagaaattagagattgtgtggacattataagaactgaaagaagaaatttagtatgacaaatacagcaactataaatgatggatagctctctgaagcatgttagggatttgggctcagtccaaaagacagtggaaagccattgaaggctattattattaatttattttattttattttattttttcgatagagtctccttcccaggctggagtgcagtggcaatcttggctcactgcaacctccgcctcccaggttcaaggaattcttgtgcctcagcctcctgagtagccgggattagaggcatgtgccaccacgcccagccagttttttgtatttttagtagaaacagggtgttaccatgttggccaggctggtctctaactctgggtctgaagtgatccacccgccttggccttccagagtgctgggattacaggcgtacacaccatcacacccagctaatttttgtgtttttagtagaaacagtgtcaaccttgttggccaggctggtttggtactcctggcctcaagtgatctgcccgccttggcctcccagag

SEQ ID NO: 33139 - DNA, 1026 bp, Homo sapiens
tggagcttatcttgtacatatttgtatctttttgtttgtcaaatgaaaagatggacaatctgtatggtcattaatacctcattcagtttgactttaaaatcttgttttttaggttctcaacccattttacattttccagctgttcagtgttatactgtggagcactgatgaatactattactatgctctagctattgtggttatgtccatagtatcaatcgtaagctcactatattccattagaaaggtaagttcaaatttattatgggtttcacaactgtatttgtattttgtagtaacatctaatgtgtgtagaatagtactcagcacaaagtaaattctcaatgcagtcattattttagttgcatgaatatatgctccttctcccctccctttttgtttgttttgctggttgggaggttggggatagcaggtgctttgtagagtcaagactctaccacttgactgtctagagaccatagggatctgtagttgctgatcacagactggaatactggaaggtactgttttcagggctatcctgttaaagtgcttcttgttttgtcttgaactaaaacaatgaatactctgaatttctgactcgacattttataaagatggagtgatatgcatttattgaattaacttatttttttagcactctggcttttttcctgaggagtgggttcatattggctagtttctaacttctttttcctctttcagcaatatgttatgttgcatgacatggtggcaactcatagtaccgtaagagtttcagtttgtagagtaaatgaaggtaagtaattgaatgttggaagaataaatcaaaaaagatacctgttaggcataatgtgtgaagtaagcccaaagtataatacatatacattctttgattgattgattgattgagtcagtgtctctgtcacttaggctggagtgcaaaggcacaatctcagcttactgcagccttgacctcccagactcaagtaatcctcccactttaggctcccgagtagctgggac

SEQ ID NO: 33140 - DNA, 1050 bp, Homo sapiens
aaatactattgtaacataaggaattaagtggaaacatttaaactttaaaagcattttcttttaaagtcgaatgtacaatgttttgaactaaacactgttagtgcaatattaaaaaaaaaataagatccctcaaatttatttggcttcttgcaaaaaataattgtaattcaaaattgttaagatctagtgtgttcaaggatgcaaaagagaaccttttgctcacatggtattatagactagtgggaaagatacttgtcacacataaagatgtgagacaaaatgaagttaagtgctaccagtataggtatctactattgacttctttgttttaaattctgtaggtagagagtttgaattatagaagacaggtgtttggagacatgaataagaacagtctgtggtttaagccttacctaatacaatgcctttcgtaaattatactattatgatataatgtaatactatgaatgtattttcctgttatagaaaactgctttatggagtaaatgaaattgctgtaaaagtgccttctgtttttaagcttctaattaaagaggtaagactattgattgtatataacttaacagtcatgatcaatggatgtgtcaatttggaatgagttgtgattaaaatattcttggttttctttttcctaacctctttttcatatttttacttggaaggtaaagacggaagacatttactctggtagagaaagaatctggggcatgtattcttaaaattttgtctagttttgcttttattacctgttgaatgtctagcagagttaggctcaccaatcttcattctggtttttggctaaagctcaagaattagttgtattaggtgaacacttttaggagtagaagtaagattgtttttcatcagttcctgggagtggccatgtaatgttgcttatgagcatagcatagtgtagtgattaggaattggaagacctgattttaatgtagttccatcagtaactagctctgatctttagtacattctctctgttgctcctttacctataaacttggaataagttttttc

SEQ ID NO: 33141 - DNA, 1050 bp, Homo sapiens
tggcttgatgcttttatggagatggaagaaaatgaatagaaattcttaatttgactctaaaattgaaaaggagaaactatgtagctaaaaagtaaaatgttttcatctttggtttagaattctcaagttatactttatcttaaaattttaaagtttaattttagctattacagctttggcacagtcttaaggataatgatattattatataaatttgagtatttagagccatctcatctatcctgcaataaacatattgaatagcttcgaagttgggtttgagacttagatttgtcattgtttatcttaagaatttgagatttaaaaattctcatttgttatctcaatttttgttaagggtttctaaggatttgtaaggaagtcacacctttataaaatcaggcatatagaaaaatgaggcgttaagaaatttggatattttaaactttgtttaaagtaaaaactttggatttatttaggggactggatgaaggtgtttcttgtacgtcaatttatgaaaagcatagtgcaggactgacaaaggggatgcatgcctacaggtaatttttatccaactaaagttagatcttctcaaaattcctaaaagcagtagtatacataatcaaccctttaccatatagttgtacatattaacagatacttaaatattacagacatagtagttgagaatttattgatgttttatttgggtaagactgtcttagtttaagaattataaaaatgtgcaagctgatattttgaagttggtatccctgaaattataccatatttcatcagttcccaggtgcacgtttttccaccttttaacatctctgagattgggatgtgtcatagagttggtgaagtgtcgttcttgatagcatttttatctttcttgatcatataataatggtatgccttacaattgatagcaccttagattttctgaaatacaagcatgagttcaaattcaccgtaatgaaagattgtaaattgggagacataatctccttcattgtgttattccttgttaaatcataaaaatacacc

SEQ ID NO: 33142 - DNA, 1866 bp, Homo sapiens
ttttaagtaacatttttggaagatattttctaaaaaaacaaaaagttagaaaactggcatcgttttacatcttgcaaatttctttaatgtgtagctgaatgtttaatatttgaaatacaaaaaaaaaaaaaaaggaaaaatatgtcagtgggctcaatgaattttttccctggacaagttttgtaggtagtcaggaataatcagaaggttgcccagtggacttggaatcgaatgatggagtcagctgagtgctctccagtaggagtaaacctgccatagcgattgacttttggccagggattgccatttatgtaattggtgcttagtaaatatttattggatgattaataatctctgagaagtttttggcttggtttcattgctagtgccatagctctttactatgctacagtgaataattttgagttgtgtgaagtacttttagctcaagatggttaaactacactacttctgaatctgtggaatgaaaaaggaagactctgttagtagttcctctcaatataaattgtcctgtatcacagtagttgctagtctaaatgaattaatgaaatatgccatgttttgtggtagttaagtaatacagattcaagcactggtatcccattgaaaatgtcattagaaccagctagcactttagaaactacttaagggtcatctaaagtttgatacatcccatgagcaagtgatgaatacatcactactttggaagaattcaaatttaaacaaaatcttattaaatattaaaagaacacttcgatggtataaaacagtggtccccaacctttttggcaccagggactggtttcatggaagacagttacgggtggggagggatggtttcgggatgaaactgttcagtctcagatcatcaggcattagattctcataaggagcacgcaccctagatcccttgcacgcgcagttcacagtagggtttgtgctcctatgagaatctaatgcctctgttgatctgatgggaggtagagctggggcagtaatgcttgcttgcctgtcactcacctcctactgtgtggccctgttcctaacaggtccgtgacccaggggttggggaccccttgtataatagacagttgatagaatgcagttgtatcgtctactaagatagaagatagttccctaacgtctgttccctttcttccctcagtgatcttccattgtttgaagcactggacctttaatccactgtaggtatggacagggaagaaaggaagaccatcaatcagggtcaagaagatgaaatggtaaccagctgttctaatttactggtgatgtgtgaagactttatctctgcaatttattattttagggactagaaaaatgcaattaacaacagtggcggcagcagctaactcaatgggcttctttcttcatcctgtgcttttgaattgggattgtgtaatatgtctattagttgcttttagtataattctttttttacctgtggtctgttaaaactgagaagaagtatgtttttgcatttggtgatttaagaggtaacattggctaatataatcctaaataaaagatttaaatacaatcccaaataaagatttctaattttgacttacaaaaattttctaaaatcagcttaataaaaaaagccaacttcaacttctctactttttgttggggggagccagaaagatgtcaggtgaagtataagatgccctgttaaatgtaaaagtcacataatgaagggagaaatttttagtataaatatgtccaaatgttgcatgggacagacaaaaagattatttgaaatttaaatttaagtgggccacctgcattttcatttattaaatctggcaacgcttgttggggggc

SEQ ID NO: 33143 - DNA, 1652 bp, Homo sapiens
aagctactgaagttttatgtagagagggaaatggtcatatctggctgcatacagacttgaatgagggagacgagggctcaggacctgaatcaaggcaaagctgatggagataggcatggtgaggtggatttgagaagggtagtcaaaagatgagtggccggttggatgtaggtgtgagataggaagagttcgaaggtgacttctaaattcctggcttggctttttaggcaactcatactcattaaaggagtagggggaattggtggtggctgggtggtggggcagattttttggaagaaagagaaaatgaacctattgagtgttagctgtctgcaaacatgtagttgaatctgtgggtctgaagcacatgagagattagtgctgaaaatgtgaattggtagttgccatcgcgatggtccagtagtgccacccctgatgagattgttacaaagagaagagcctgaggaatattaataggaaaattaagaagcgggcagaggaaatggaggcttggtaacctggctacctgcccagcaacccaggctagtgtaatgtgaactgcagctcagcagagttgtaagaggtaaaatgggcatttgtgggctatcttaggaatctagacactattttccttatggagaaatgcatttcaagtacatgtggagtaagaattggtttttaaatgaattttgttccttgaaagatggtgctgcctacgtgtcattccttaaatttgttggtaaggctttttgatgtaaagtcaccccatgcttgactttctggtgaaaatgaaaaatactaatcttggttaagtgaagatgattttttcctggttttgaaaggcagtattctggtaagtaagagtagataatgcccatcaaagtgttgtgtaaactaaatattcccatacaggcgtcactattgtggttgttatagtgcctaaatacattgattgtggggtgtgtctgtgtgcgtgtgtgtgtgtatgtggttttttttaaatcctggatagtggcatacaggacagtcataggaggttagaaagttaacatttttatgatggttgtgctgtgaataaggtgattaacttcttcaatagcaacttatattactgtatttttgaagtatttgttgaatgtaaatgttacggcctttgcattgtctatgctgggttagcgtgggtaggtttcagattagacaaaggactcaagtagaaaaacccaaattcatgtaacttaaagttgacccaagtacctatgagttacatttatacatttgcaggattttactttttgtacagaatagcttcctagtgattttgtgcttctttgtggttggatttttcaaatcagaatctggaagagtgaaatatgaatcattctgtagtgtatgtagatcatgaggaaaactaattttgctttgtttcaaattgcacagtaattctgaagtgaaccatacagaagtaatgaaaaaaattatttttaggtttgctatcagtaagaaaaaacaaacatttctgaggtttatatgtttttaacacactgaagacttggaggtataacctctggaaaattttcttccactcttctttttttcttctctactcttccctattcctatattattccctagcatcccctttttctcatcct

SEQ ID NO: 33144 - DNA, 1049 bp, Homo sapiens
aggtgggttttcaccgtgttgcccaggctggtctcaaactcctgaactgaagcagtctgcctgccttggcctcccaaagtgttagggttacaggcatttatcactgcaccccgtccttttttctttttttttccccccagagaaagagtctcgctctctcactcaggctagagtgtagtggcacgatcatggctcactgcagccttgagttcctgggctcaggcgaccttcctgcctcagcaacaagggtagttgggacaacgggtgtgtgccatcatgtctggctaatttaaaaaaaaattttttttttttttttgagacggagtcttgtactgtcatcctggctggagtgcagaggcgcgatctccgctcactgcaacttccgcctcctgggttcaagcgattctcctgcctcagctttccgagtagctgggattacaggtgcccaccaccatgcctggctaattttttgtatctttagtagagactgggtttcaccatgttgaccagtctgatcttgaactcctgaccttgtgatccgcctgcctcggccttccagactgctgggattacaggcgtgagccaccacgcccggcctttaaaatttttttgtagagatgagtatctcggtttgttgcccaggcttgtctcagaactcctggcctcaagtgatcctcctgcctcagcctcccaaagtgtaggaattacagacatgagccaccttgcccagccaaaaccatgttctaattaaccacttaagttcaaatagcatgcaagaagcaaggaaattgttaggttctcgtttgagttttgttgaacatcatattttgagagtagagaagtaagagaggctcagatttctggcacataattttaattaagatttaggtttaaaaaaatgaaaaagttctgggctcaaattaatctggagaaaagtagatatttgtaaggtagaagaaggtccacagttaatcagttatcactagataactagtgattataaaaggagttaaaacgatttgtgttagtaggttatgcacagtgactca

SEQ ID NO: 33145 - DNA, 1033 bp, Homo sapiens
agagactgggtttctccatgttggtcaggctggtctcaaactcccaacctcagatgatccgcccacctcggcttcccaaagtgctgggattacaggtgtgagccaccgggcccggcctattctgtttttttatgctagaaatctgatctttaagtgttgtttaggaggtcatgtgcagtggctcacgcctgtaatcccaacactttgggaggccgaggtgggtgcatcatgaggtcaggagttcgagaccagcctgaccaacgtggtgaaactcctgtctctactaaaaatacaaaaattagctgggtgtggtggcacgcgcctgtaattccagctactcaggaggctgaggcaggagaatcgcttgaacctgggaggcggaggttgcagtaagccaaaatcgcaccattgcactccagcctaggcaacaagagcaaaactccgtctcgaaaaaaaactttttttttaaagtgttcattaagccaggcatggtgcctcatgcctgtaatgccagcactttgggaggccgagatgggcagattgcctgagctcaagagttcgagaccagcctgggcaacgtggtgaaactccgtctctactaaaaatacaaaaatcagctgggcgtggtggcgggcacctgtaatcccagctactcaggaggctgagacatgagaatcacttgaacccaggaggcggaggttgcagtgagccgggatcgtgccactgtactccagcctgggcaataaagtgaaaatctgtctcaagaaaataaataaataaataaataaaaataaaaaataagtgttgtttacagcaatatcaaacctttacaattatgtcatgccaccggctaaagttaatgcgtctccttttattgatttaaacagatgacctctacaagtagtcagaacttactctaattgaggccatttgtcttcatcaaaagtttttggttccaaataattgagaaagtaactcaaagaaagcttgtaaggacttgaatataggctgggtgcagtggttcaggcctgta

SEQ ID NO: 33146 - DNA, 1042 bp, Homo sapiens
tgaagaattgaaaatactagtgatctgcacaagtttatactgtgagatagcatgagaacttcagaatagaacctcatttcctgatttcagcagtgtagccttgaagaaatgggagaatccaggtttcagatactcagttccaagttgcaaacctatttaacaatgccatgtaaccgtttgaatgaccttggaaaacttgcttaaccttcccaaatactttccttttctctaagtgggggaaaatctatctcacggttgattatatttaatcagtatagctaacatatattgaatacttgctatgtgcttttctaaacccttaccaaataccttttagtcctcaaaaagcaacgcttaaggcagatactgctgttattcccatttcctcaaacttgaggaaactgaggcacagagaagttaaataatttatctaagctcttatagctagtaagcagtaaattaggaactctgctacctctcagcagcataatgaattaacttacataaagcatctaggacagtgcccagcatggaaaaaagactcaaagatggatttgttaagaactatgcaggggccaggtgtggtggttcatgcctgtaaccccaacactttgggaggctgtggcaggcggatcacttaaggccaggttttgagaccagcctggccaacatggcgaaaccctgtctctactaaaaatacaaaaattagctgggcgtggtggtgcacacctgtagtcccagctactcgggaggctgaggcacgataatctcttgaacctgggaggcggaggttgcagtgagctgagatggtgccactgccctccagcctgggccacaaagcgagactcttgcctttaagaaaaaagaaaatgaaagaaaaaaaaaactgcaaggtctgagattttactctacttataagctaataagttagtctattattgttttgtagatactagcagaaaataggagacttcatgaaattggcacactaatccgctggcttgtaagtagagtaaaattcccttcataactacacttaagg

SEQ ID NO: 33147 - DNA, 1035 bp, Homo sapiens
agtaagcgtgtgccactgtcacaccagctgactttcatccatatagtctgcagagtaaacagcatggagtgcttatcagtattcatcaggtcagagttactctggacattagattactggtaatttttattagctttgaagcaacttgttactaatgaagccttttaggaaactgtgggaagattgaacatgaatggtaaagaattggatcctaattccttatttttgctgattctatgcccacttaaacttttggcccttaatatttatttaggaaattcattcatcattcagttattcatttttagagacagggtcacactctgtcacccaggctagagtgccagtggtgtgatcataactcaccaattcactacagtctcaaacttctgggcacaaataatccccctgcctcagtctcttgagtagctggcattacaggtgcacaccatcaggcctggttgtttggttttgtttgtttgttttggagagacagggtcttgctgtgttgcccaagctgatcacaaactcctggcctcaagcaatcctcctgccttagcctcttgaggagctggggttacaggcacaaaccaccacgcctggcaatttttttttatttgtatctatactaagtatatagcttagggtgatggttatcaaactctgggttgtgtctggaagtcaatttagtggtctgcagctagctgttttgttttgtttttattttttccccagcaagatagagaaatatcagaatgttgcatgtaatagggtgtggtttcagtattcttctattgccattttactgtactgaacggtacttgaatgcttgtatcattatatgtacatacacctttgggtcactatgtaaaatgtatttcttattgtgggattatatcaaataaagttttgactaattttgactagcacagtcagacaatctgggttcaagttctacctgtgccatttagattttgactataggcaagttattttatctgctgaagccttagtttcatcatcagtaaaatggaa

SEQ ID NO: 33148 - DNA, 1099 bp, Homo sapiens
accacacacccacacacacttcacccacacacgcacaccacacacttatacaccacacacgcacacaccacacatacacctcacccacacacacacatactcagacaccacacacaacacacagacaccacacacaccacacacacacacaccacacatgcacacatacaccacacacgcacactcatacaccacacacaccagacaccacacacaccacacacacgcacacatacaccagacatgcacactcatgccacacacaaccacacaccatgcacacacccccacccacacacatacacacaacacacacacatgcacgcacactcatataccacacacacatatacccccacacacaccacacacacccacacctcacccacacacatgcacacatacaccacacacacaggcacacatacaccacacacacgcacactcatacaccacacacacactcatacaccacacacaccacacatacaccacacacacacccagccccacactcacatacatacctgaacacatacaccacacacacgcacactcatacaccacacacaccagacaccacacacactcatacaacacacacaccacacacacgcacacatacaccacacacaccacacagacaccacacacactcatacaacacacaccacacacacgtgcactcatatgccacacaaccacacacaccatgcacacacacaccccctacacatgtacaccacacacatgcacactcatacaccacacacgtacacatacctcacacacacatgcacacatataccacatacacgcacacatataccacacactcatacaccaccaacacacacaccatacacatgcacacatacatgcacacttatacactacacacatgccacacacagacacaccatacacgcacacacacgctgctggcttgggagagccaggcctggttattccgccttctcgagagtgtgcctcaaggtgttcagctatagtgaaggcgctgctgggctgtcggcctctgctgtggaagtaccttgcctgtgccctccttcataaaatgatgctcctgttcaagagtgga

SEQ ID NO: 33149 - DNA, 1067 bp, Homo sapiens
gagatttaaggggggcagctggaaaggaggatgaatgcgctatgggttaaggatgcactgggggttctggcttgggcgccctggtgggtgatgatgtggtgtgtcaggtaggaagggatgtgcaggcgtttgtcagtcatttgcctccctggggggctgtactgaggctgagctatcaacacttccctgagcagactaggactgcatgctagaaagggatggaagtgttctgagtctgcctcccaccagtggtgtggccatgtgccgtcagcttccctggccccgttgcaggttacaggtcctcatgggccctgggctcctggcatgccaggctctttcacttgcctggaccttgggtttcccaactatctgtatgaggagacggatgtttggatgtttaagctcccttctagctctgatactatgtcagcctatgtgatgtacacatttgcacaattacctctttcaatgatttatataatcatttcacagacccttcaaaattcattctgatcaatcaaatatcttactttttattaatacttcctctttctacatggcgttttgctcttcagaaaaattacacacacacacacattttgtctcactctgtcacccaaggtggagagcagtggcatgatcatggcttactgcagcctcaacctcctgggctcaagtgatcctcctgcctcagcctcccaagtagctgggtctacaggcacgtgtcaccatgcccagcaaattgttttgattttttgtagagatagggtctcagtatgttgcccatgctggtcttgaactcctgggctcaagtaatcctcctgtctcggcctcctaaaatgctgggattacaggcatgagccaccacacctcactatttttaaacttttagcattgtctatattttctttattacatgccacctcgaaatctttgcaagtagatggggcctgaggaataactaaatcaatacaaatacgtgaattaaaattttgattccagcacctttttagcaagtccatggcacccctggaggaactgacaaagacacccaggagtaacacaaa

SEQ ID NO: 33150 - DNA, 1067 bp, Homo sapiens
tacaaagaataaccagagcagagaaaaggcacccctatttcttctgccggtaccttcctgccaagatgttggcagggtttaggaggggtacggagtgtgaccttggtcttgcgggccacttttctactcacatctcacacccttttagctgctgcccaaggttaaaggcatcacacagaggatcaaggaaacacacttctgcataaaaggagtagtagaatccttgaggcccttttggtgcaggggaaactgaaacagaaaggaggaactgtttggccgggcacagtggctcacacctgtaatcccagcactttgggaggctgaggcgggcggatcacggggtcaggagttcgagaccagcctgcccaatgtggtgaaaccccgtccctactaaagatacaaaaaatttgccaagtgtggtggcacgtgcctttaatcccagctactcgggaggctgaggcaggagaatcacttgaacccgggaggcggaggttgcagtgagccgagattgcaccattgcattccagcctgggcgatagggcaagactgtgtctcaaaaaaaaaggaggaaccgtttgaccccctttgccagccagaatctgggagagatttgtggatgaaaaaacccacaaatcaaccccaggaatacctggatggcatgtgattagccagccatttgcaccgatcagattagaagaggcccagtccccggtccacatgccatatcacactcgagatggagtggagtgggcggttggccaggcacggtggctcatgcctgtaatcctagcactttgggaggcccaggcaggtggatcacttaaggtcaggagtttgagaccagcctggccaacatagtgaaaccccgtctctaataaaaatacaaaaatcagctgggcgtggtggcgggtgcctgtaatcccagctacttgggagtctgagcaggagaattgcttgaacctggaagcagaggttgcagtgagccaagatctcgcccttgcactccagcctggatgacagcaagagtccatctcaaaaaaaaaataaaaataaaaaataaatatata

SEQ ID NO: 33151 - DNA, 1209 bp, Homo sapiens
tagtggagttaagggagttgttgaattgggtcagagtgttttggggctggaaaaactctgaggtacgatcccatcatgagttctttttttttttttctttttttttttgagacggtgtctcactcttgtcgcccaggctggagtgcagtggcgcgatctcggctcactgcaacctctgactccctggttcaagcaattctcctgcctcagccttccgagtggctgggattacaggcacgtgccaccatgcccagctaatttttgtatttttagtagagacggggtttcaccatattgcccaagatggtcttgatctcctgacctcatgatccgcccgcctcggcctcccaaagtgctgggattacaggcgtgagccaccgcgcccggccccatcatgagttcttgaatctcctccatggcctccctggagtgtggagttgtccagtggaaactacgtgaaggcccagggacagggagctgccaccttcagagtagcctcttccatcttcagacatattttagaaaactctttcttatgttttccaaaacctgcttttatctcttgatgcttcagctctcgatctcaatgaagaagcctatttcctttcttttacaaattcagagagagccttccatcaggggaaacagtcccggcttccccatgtgctccctggtggaaatatctctaggttccctgctctccagatacctgcttctgaatgcacagcagttggtctctgctcccctcaagtacggggcccaggtgtgaagaccgtgcttcagagctgggcactgggagagggcagacacaaaccggagtgcagagtacagggctattctcagctccctgcgtgaaaccagggagctctgcctctgctgatggagctgcgccaagtccttatttgatggccgcgtcctgctggagacactgagtttgcagtggcaccaaatcctctgtgtgtgccctttgttgtggccgctccacatttccaggatggtctccacccagaatttgatttgaacgttgagaccacataatagggttttctggagagagcagggccggcttctcaagctggtctgaaaatgaaagacagggaagagaaaggagaaaggagactggtctggggattgtatggtgattagcggttaggtttgggcgagggttccgtgtgggcaggggcttacatggtttgaaccttctgctgc

SEQ ID NO: 33152 - DNA, 1073 bp, Homo sapiens
gtgagtgtgtgtgtgtgcgtgtgtgtgtcagggagagagaaagcgaggaccttttagccacagacccatgccagctttgcttaagatgatggtagttttctctctctctctctcttttttttttttttgagacagagtcttgctctgtcgccaggctggagtgcagtggtgcaatctcagctcactgcaacctctgcctcctgggttcaagcgagttttctgcctcagcctcccaagtagctgggactacaggcgtctgccaccacgtccggctaatctttgtatgtttagtagagatggggtttcatcatcctggccaggctggtctcgcactcctgacctcatgatccacctgcctcagcctcccaaaatgctgggattccaggcgtgagccactgtgcccggccaatgatagttttctctaacactatgtgtggtgaattctaagctctattagaagcaaaaacctgaggctttttaaaagcacttgcctcgccgcctcctttagggctgtgtctgacatgaccgtcatttcctcagttggttatcagcctttcttctcccttgctgagctgtcaactgatgcccccaccttcgtctcagcctctgttccgggggctgacttgactaatgtgtccccaagttgcttgatgacctcagacaagaagcacagcagtgcctggcctcacagccccatcagcatggaggatgacagtcccagcacactgctccaaggggctgtgaggaataaataataggccaatggcaaaaacactgggcggaggaatcctgctggagagacactgacacagtggagagaatgtgtctgtcaggccatttgctccttactttaaaggcctgagtggtggctagagctctgttctttgtgttttacagagggagatgttaatgttcgattcacttcttttgtgggttttctctggtgcctgcatgttccttctctgcactgctgtcagtcccaagcctgggggtggcatggggtctgctgctgtcttgaaggatatgtgggcccccagggattttcagtgaggtgaaggggtgggtacaggcca

SEQ ID NO: 33153 - DNA, 1131 bp, Homo sapiens
ggcattctgggccagggtgtgcgggcggccggggcctcagcctggactgcagctgctgctgcccagatggtgtcagatccctgtgtgtccctctggtgtgtttgccaagccgcctctggggctgactctgctgagcgtcttctctttgtcccgaactttgtgcactgtccctggctggagaagactcatttctgtactcaagtcctgtgtgtagttgctgatggccaggtcctgctggtcagccgccttggacggagtctcgggcctgcttttccgttttctgtccccttactctggcttctggatagcctttggaatattccgggcgatagctgggcctccagagagagtgggctgcagggtgtgggcccggcctccccttgcctggcgggttttcctggtcagcgttcctgctgctccccggtcatccctcctgtgctgcagcctttttctctggttcagacccacactctgccgtcccactgcctgggcttgctgagctctccgttctggcttgaaggcctcgcccgagccctgtcaccggctctgcctgtcaggagggcccaagtgtgcggcttcggtggggctgcctgacactgacctctggggttgtaaaggtcccagagggtcctaagtcgggcctgatgtggctgagatggcaagagccggaacgtttctgtaaaatctgaaagcccttgatggggccgagggggtgaggaggattcccaccctgtgtggacaggagcacgcagcagcggagtgactccaccacgtgagtggggtccagcgggtgtggcactcgatgacaagacagtttgagagcggcttgtctccggggacctggcgtaggtctcctctgccttaacccttggcttttgcacttcctctgtctgtcctccatacaggcttcttgccctagtgaggactggcttcttaacagggtgagccggttcctgtcctaaccccactggcatcttacactctgggagatagcttccccctgagaggcgagtgagccacgtaaggggaggtgggcgatggcttcccttctgtcttgggttgggggagtcaggtacagtattttttcttttaaagcatcattgatcacataataaggtttgtcatagtcct

SEQ ID NO: 33154 - DNA, 1031 bp, Homo sapiens
tggcttgccccctctcctcctccagatcttcccggtggcattccgtggcttgccccctctcctcctccagatcttcccatggcattccgtggcttgccccctctcctcctccagatcttcccggtggcattctgtggcttgccccctctcctcctccagatcttcctggtggcattctgtggcttgccccctctcctcctccagatcttcctggtggcattccgtggcttgccccctttcctcctccagatcttcctggtggcattctgtggcttgccccctctcctcctccagatcttcctggtggcattccgtggcttgccccctctcctcctccagatcttcccggtggcattccgtggcttgccccctctcctcctccagatctttgtgcaatgaggccatccctggccgtcctgtgtgaaatcgtgctcatcttctgtgatgaagggccctggcccttccttgctttctttctcttcatagttcttatcgtctgctcatgtggaatggattttgcttttttttgtttgttttgatcatctatctgccccacccagatgtaagctccatgggggcaggaagttctgtgtgtttcattcactgctgtgttcccagttcccagagcgatacagacacatagtaggcagtcaataaatattcatcaaatgaattaaatgaataccgttttgttaggtgttatcttgaactactttattttaggggtcccctcagtctgccagagctggctcactgccttcgccctttttcttcttttgagatggagtcttgctctgtcacccagcctggagtgcagaggctcgatcttggctcactgcaatctccacctcctggttcaagcgattctcctgcctcagcctcccaagtagctgggattacaggcgtgagccaccacgcccggctaatttttgtatttttagtagagacggggtttcaccatgttggccaggctggtctcgaactcctcaccttaggtgagtcacctgcttcagcctcccagagtgctggga

SEQ ID NO: 33155 - DNA, 1015 bp, Homo sapiens
aggctccattcattgtactgctcggggctgtgagtggctgcgtctgatcgtctcttaatgtccagtgtagggagcactgaggcaggcaggtctgagcaggctgaaagggggattggtgtatcagagagagtaggagtccaggctcaggatcggacagagctgagtgcagattgcaacactgtgactcccaaggtcaaggcttcgtgatcttgggaggttatttaaaagaggccctatggtgtcgtggttaagagcatgggcccggccgggcgaggtggctcacgcctgtaatcccagcactttgggagaccgaggcgggcggatcatctgaggtcaggagttcgataccagcctggccaacatggtgaaaccccatttctactaaaaatacaaaaaaattagccaggtgtggtgatgggcgcctgtagtcccagctacttgggaggctgaggcgggagaatcgcttgaacccaggaggcggaggttgcagtgagcctagatagcaccactgtactccagccggggtaacagtgtaatagagtgagactctgtctcaaacaacagaaaaagtaatgctgccaaaaatgcttcatatatccgccccagcctcccctccccccagctcccagcatcagggtttctgaaatctccataacatttagcatgtgattattgccaccatcagccccagcctgctcgtttcctgcggagatctatgggagtggataaaagaccagacaaatgcaagctgttataaaatccctcaaaaggtaggatttgggcccgagcctctgcccgaatctcttgaagcctagtgtgacgcttgccattgtagaaaagaacagcaaagccagctggcaacaaattggggtggccccatccagctctcctggcctcctgagtgttatcacccctgagagtccttatttcagtgtctgtcatgggggccttactgtcttgaggctgcaggcagatggttggtctctttcaaggacattcttgggtccactttggg

SEQ ID NO: 33156 - DNA, 1032 bp, Homo sapiens
gcaggctgcttttcccctctcagctgtttgtggtgctgcctgacaaaattcaattactagtccatccaggacatcctgcagaagcgataatcgtcacatgagggaggggcccagcctgtggttctgtctttttctttccttgtaaaaactgcacgtccattatgactgttaccttttccatttaaagctaaccaaattcagagcatttaccacttacccttgcagacctttgttttcaaagtgagctcaagttattggtgggggcaacaggcagccactgatagtgtcttcaggacatgttagtgactaagaaaagagagatcaatagacctgtggctctacccgtctatcactcaattatctgtctgtcactccaggaaaacctcatttaaggaaacacctttgatataatttcagacataaattttagattcgggcatggctattctgaagtagtaatagagaagttattaagaataacttttaggcagacagttaaggtaaaggttctcggtggaaattttcttataataagaaacaacccccgaaccatctctttttttttttattatactttgagttctagggtacatgtgtacaacgtgcaggtttgttacatatgtatacatgtgccatgatggtgtgctgcacccattaactcgtcatttacattacgtgtatctcctaatgctatccttcccccttccccccaccccacgacaggccctggtgtgtgatgttccccttgctgtgtccaagtgttctcattgttcagttcccacctatgagtgagaacatgtggtgtttggttttctgtccttgcgatagtttgctgagagtgatggtttccagtgtcatccatgtccctacaaaggacgtgaactcatccttttttgtgtctgcatagtattccatggtgtatatgtgccacattttcttaatccagtctatcattgatgggcatttgggttgccgaaccatctcttttctaacagaaaaggcgtcttgaagggctgggccagcaagctttga

SEQ ID NO: 33157 - DNA, 1064 bp, Homo sapiens
gtgccctgggcaagctcttcagcctgcacctgcccctgggcgctcacttcagctggagtgtggtggacagagtcctgcccagatgttattgatcctgagttctgggtcttcctctgaccctggcttctgttagcaaggccttctgatgtctttgcctcagtttctcatcataagaggagtggggacgctccggctctgagtaacagtctgttctcttccaggcgtgtataaacagtgctgggggcttacagagctcatgccctttccagaccccatcctgaatgtgcgggtgagaagttgcggggtgtgaggaggctgctcttcccctctttctgggataatccctggaatgaccctaggtgaggcttccgtgctgacttcccttccgtcctctgggaggtactggttcgtttctcgggccctgccctgtgcagggccgcacctcaggcctgcgcggagcatgagggcgagggacttggaatgaccagagctgtctcaggtttatcgtcaccgtcaatgagccacagttgccaccatcgcaggagaccctgggtggcaggcaccatgctggatcctgcttttcctccctcatttaaccttggagcagccaggcctgtgaggggtagctagtctcccctaggaagaggctgcacagatgagcttgctcggagccatgattggagtccggcttgctgattcttcagcactctgcccgatgcctgttgattttggcggtttgttcttgtccctccaaagccaggaatgctctgtgagagctggggccccaccagaagggttcccacggtgcccctgtgcctgctgctggctgggtggcctcttcccctggtcagctgggtggcacagaacaggggaatcccagggctgcccggggtggaccttccctccctcctccaggagctgcccatagaacagcagggagcctctttctaggaggtgggatttacaggctgagatgttggagccccacctccctcatttagctgcagaagaggtctgggttggagggagtccagactctggtcctggagttgagtctattcatg

SEQ ID NO: 33158 - DNA, 1917 bp, Homo sapiens
attcttctcatggcgctttgcttgctctgcttctgagcatctgttgtctttctgtcaagtgcagtctcacacttgtaaaacttagatcaagacttatcccttccatgtgcctttcctgccagatcaggtttgacagaatataccatgaaacccccaaataatggtggcttaaacaaggttgaatttatgtctcgtttcaatgcagtccagaggtaggcatttctgggctggcatgggggcttcgtgaagccaccacggtcctcggctccttccagctctgtgtttcaccatccctgagggtggcgctgtcttcgtggtccaggatggctgccggggctggggccatcacatctgtgttgctgggtcgcatttactccagtttagcccagtgctgctgtgtgtattgtttcgggtccagtctcatcacatggttctactctactgacttctgggaaaatgatcacagtgaacaggcctcaaggcgcctctcatgtctcctctccttccccatgctggccagctctctgcagaggcggtggggcccaccagccactgcttgtatggcctccatggagcacagcaatattgcttctttgtggtatttgccttgtgctatcagctcaaatcttaactgttcagaaagaccttccccgaatctcttgtctaacgcaagcctcatgccagccttcatctttcccatcaccttgtgcatttttttcttttttttttttttgagatggagtctcgttctgtcacccaggctggagtgcaagggtgcgatcttggctcactgcagcctctgcctcctttcaagcgattctcctgcctcagcctcccaagtagctgggattacaggtgcctgccactacgcccacataatttttgtatttttagcagagatggcgtttcactatgttggccaggctggtcatgaactcctgacctcaggtgatccacctgccttggcctcccaaagtgctggcattacaaatgtgagccaccgtgcctggccttttcttttactctttttttttttttgagatagggtttctgtctgccgcgcaggctagagtagagcacagtggtgtgatcacagctcactgtagcttcaaactcctgggcttaggggatcctcctgccttagcctcctcagtagctagaactacaggcatgtgcctccatgcacagctaattttttttaactgttttgtagagatgggatctcaccttctttcccaggctggtctcaaactagtgatcctcctgccctagcttcccaaaatgttggactgcagttgtgagccaacacgcccggctgtgcatgtcttttatagcatgtattcattttttcatgtattcattcatagggtgttgttaagtgcatatcctgtgccagacactgttctaggtacttgtgaacagcagggaacagaacaagtttctgccttcatggagcttaaattctggggttgcagggaatgtataggagatggatttttaacaaataaatatggagtgagtcagattgtgatcaattctacagagagaaataaagcaggctgcagagatagcaagtgtgtggttgtcagtgtggggagttgttcgccgtggtgcacgggtggccagggatggctccacggataaggtgccatttgtgcagagcctgaaggaagtgagggagccacagccctctgggcgggactccgtccgaggcacctgcaagtgtgtgggcctcaggttggagtgtgctctgcatgtttgagcaagtaactatcctgttaacttgtttgtagtctctctgtctccctcctggaaggtaatctccagaaggcagagaccttacctaccttcatctattgaggtttacgggaaccccatagatgccatccttatttcttggcctgagttggaaatgat

SEQ ID NO: 33159 - DNA, 1021 bp, Homo sapiens
ctaatatcggttaaataaccagtttttcttttagctcagaaatgtacgagaatttcactggaatgtttgtcttaactgtgttttgcaaaaggatagttgaaggatgaaaaagcttgagctttgtttttatttgctttttcgaaaagtattaaaccattaaaataagctttacaatattgcattatggattagctttaaaataatgcatgggtgattaaccacgtgtgttttccctcagattaatgttcttcaatcaaaaaggagatcagaaatcctaaaatcagtaagacattaattgaaatgatgttttaaatattttaatatgaaactaaatgtacgtatttaggtgttgaaagagcatctgctatatacatgataaggtttataattgctcttctttttgatcttcatttgtgtttcttatgtggcactggacttctttttgtctccttcatgttacagttgtttgtgtgtctcatctgttgatacactgtgaggtccataaaggtagactctatactgttatgtttttgttttcttttatcctcatatgttgctttacatgcactagatgcccagtaccatttggtgaataactaaaaatgtttggtataaaaacctgtgagaatatttcagaatttgttttgaaagttatcaacataaaaaactgttacacttaggtttttaattttttcttacttgttttgctttaaaatttttttcccagcctctttcaacatatttacatttttctctataatttttggcattatttggacttcaaaaatatttgagattgaggatttatatgaatagtatcatttggagaatttttcccttaaagttgatggtgggtcagtcttttggtttgttcttccgtatgcagttacaaaaccagtgggatgaaatttggggatcacttttttccttgagcctcttcacccacttgacaatgaatttttttttttttttgcggtggggagccctatttttggtcttaaagctaacgaaggccgggtgt

SEQ ID NO: 33160 - DNA, 1588 bp, Homo sapiens
ctccagcctgggcgacagagcaagaccctgtcccccgcccaaaaaaaaaaaaggatttatcttcatatttactgagttgttatatgttttgcagatattttcttccatgctttggcttgcctttttcatttttgtagcagtgttttttaaagatcaaactttttttttatgaagtcagtttattgattttgttcttttgtagttttcttttgtgttctgttaggaaatgtttgcttaaccctattcagtaagatttttttcaatgttttcttgtggaagtttaggtctatgatctatttcaagttaaattttataaatgttctgtggtaacggttgaagttctttttcctctctattattattaaattctttgcatgtggctctccagcttgctctgtacattttcccatctttattggcaccttttgtaaaaaaaataaatgaataaaagctgaccatatgcgtgggtaatttctgctttattgatctttttgcttgtcttttttctttttttttttttcctgagacagtcttgctttgttttctgggctagagtgcagtgaaatgaaaatgactcactgcagcctccacctcctgggctcaagtaatcctcctgccttagcctcctgagtagctgggaccacaggcacatgctacacccctggctaattttttgaatttttgtcgagattggggggtctcactttgttgccaaggctggtctccaactcctgggctcaagtgatcctctcaaactgttgggattacagacgtgagccactgtacccagactttacctgtctttatacagtaccatacttcattgattactgtagctttcatagtaagtcttgaaatcaggtagtatgagtattctaactcttttcctctttttcaaagttattttggctattctaggtcctttatgttttcatataacttttagaatcaacttttcagtttctactgagatttggagtggaattgcgttgaatgtatagatcaatttgaggtgaatcaacattttgctaataataagtcttctaatctgaatagtatatgtgttactcaaagtagagggccatgattctgtctatttgtgtgtgtatgatttgctcactttatttgacaatcagtggttagttcttgtccacactgactttcgacagatttttgaaagtggtgacagacacataggtaatcaatgtatagagcttgtttggtgaatgttcagcctcatcatgttttctggaaaaccacatatgggatcctatgagatattgcttgttcctttgttccagacagctttgttttgcctggtgtcaatgcgcacatctagaattcccatctccttcatggcaaatttctggatctctttgagtgcctgagggccatgcttcttgaagcccactccatggatgtgcttctgaatgttgctggtgtaccctcgggtcaccttatcgatggcaggatgtttcttcttgccgcccatctttgtggagccgttctgctggacccaaattagaaaagaagagcatgaaagattgtctccatttgtttttttttttaatttctctgagcatgtttt

SEQ ID NO: 33161 - DNA, 1026 bp, Homo sapiens
tcctctgtaaaatgaaggggatttactagatgactttccattattaaaaatttataaaatcatgaggcatttattataagatttaaatttggtctcagagccatttgttaacatgtaggaaaagcctagttacataaaatgctttatttttgtagcattctctggaattctaattacatagcatcccaatataaaggatgattaggaaaaactgctttctaaaagataataaatagtgtaacctgcattagattctctagcagagctcataacagttgggctttggtatatcagtttgtgtaaggataaaagtctggatattccagaggtgtcatttaccaactttgtgggcttaaatagatgtttgaaaataataaaaccatttgtgttattagccacgtaaagattaaacatatgttggagtcagattgtccagtcatttaataaaataaatcatttagattatcatgtaatttatttatttatctgtaaaaatggatagaactcttcttattccttttagaatgagaatatcctaggtttctctttaactcatatgtttttgttgttgttgttgtttttgtgaaatggagtctcgctttctctcccaggctggagtgcagtggtgcgatcttggctcactgcaacttccaccttccaggttcaagtggttctccttcctcaggagtattatgtttaaacttcttttgttttatcacaatatatatatatcttttttgagatggagtcttgctctgttgcccaggctggagtgcgtgaccttggctcactgcagcctccacttcccaggttcaagtgattcttgtgcatccgcctcccgagtagctgggactacaggcacccaccaccacacccggctagcgtttatattttcagtagagatggggtttcaccatgttggccaggctggtgtcgaactcctgacctcaagtgatcggcccaccttggcctcccaaagtgctaggattacaggtgtgagccactgcacttggccttaatgcatat

SEQ ID NO: 33162 - DNA, 1050 bp, Homo sapiens
ttctttgtttgtttttgttttgagagacagagagcctcactctgttgcccaggctggagtgcagtggtgcgatcttggctcactgtagcctccgcctcctgggttcaagcgattctccgtgcctcagcctcctgagtacctgggattgcaggtgcaccaccacacccgcctaattttttgtatttttcgtagagacagggtttcgcaatgttggacaggctggtctcaaactcctgacctcaagtgatatgcccgcctcagcctctcaaagtgctgtcattatagtcatgagccatcgtgtccggcccccttttgctcagtttttatttgggttgtatgttttattgttgagttttaagagttctttgtatattttgggtaacagttctttatcagaaatatacatataattttttttggtaaatattttcagtctgtggcttctcattgccttaagcaatatttactttaaaataaatgtgagacagttttgtctgttgactatacttttctaatgaactgatgaatgttgtgacataagaaattagactgtggtgtacctcaaccaaagaaaatacggcaatagcaatacaattttaaataagcaaagactttcaaccaaaactacttacaaaaggaacaaagtttaaatgccttaaggtctaaatttaactgtggaatatgacaaaaatcacattaactgttcaaccatgaatattttaatttttcttaaatatttaaaatggaatcttctgttactctgtgtcctcttatcctgcttttcttaaaagcacttgtaataccttacatgtatacatatttcatatctgtttactaattgtgtttccttcacttagatgccgtgagagcaggggcttgttttaccgcttgctgtttcctaagtctctagtacagtgcgtgacatccagtaagtgctcaaggaattttttatgaggaaacaaaaaacacaacttatactctactatttaagttattttttaaattactacttatttcaaaggcagttacggttttaatttgttatcttca

SEQ ID NO: 33163 - DNA, 1044 bp, Homo sapiens
agtattggaaaatatacatgaaaatgtatgctagcttgggaccaggacagtctgtctaagcatgacaccaaagacaaatgccttgaaatagattttactatataaaaatattacccctccccctggctggtctgaaggtagtcagtgatctcagttgattgttcagtcagttacagattgatctccttgttctgctccttcccctcttctcactactgcatttaactagtcttaaagaaaaaatttcttctcccccagtaagtgaaagataggaaaatatttgaaaaaaagtgaaataactttcaaatcctatgtatttggagagcacggaaaaatgtcctgcaattccagttgaatgaaatgttgcatataggccgatctacccagacagaaagtcgattaatggttgcctagggctgggcgcagggaaagaggtaatgggaagtgactgctaatgggtatgggatttctttttgggatgatgaaatgttctaaaattagactggggtgatgggtgcacaactctgagtatattaaaaactattgaattgtacacttcaaatgggtatggtatttgaattttgtctcgataaggcagctaaacatttttttatgctgatactacctcagtagaaaatgggctaatatcataaaaaaaggaaattgaagcaaagaaacagaatagaaaacaatacagtctcttgcaagcatctccatgttattatatagtgtctcaatatttttgaatagccccatatataatatttagggtgtggtagtcactacaaaacacttatgtaggacagtgtttttatctggacttattgtttatctctttaatagttaagcaactattataaacaatcttgaagctgcgttttaaggcagaccgagcaaggacctgaaacaagttaatggcaaattgatagagcagttacttggcctgggtgcggtggctcatgcctgtaatcccagcacttggggacgccgtggtgggaggattgcttgaggccaggtgtttgagaccagactgggcaacatagc

SEQ ID NO: 33164 - DNA, 1009 bp, Homo sapiens
caacttatcaaatgagcaagtcacaagcaacaagaagttccagtaggtcttcttaaggtggcaccatatgagctaacaaagtaaaagtgagaagcggtgacgttttcagcaccagatttaggctgtaggaaaaccagtcacccaagagggtgggggaaaactgaaaccagcaggtgctttcaccatcatggcagatctgccatgtaaatggtggtgcccctatttttgtctgcagggatactgacctcaaaggaggtcatacagttcatgatggtactgggattaagctcaggctcactccttgggttttgctattccacaactaatgttaattctgccatcactttagagatgccgactttcatatccagtgtcccctgctgacagtttcttctacttcactaactttcgaagatttcctagcatttttggagtctgttttgtaatacccttatttaaatgcttgtttttgcaagctattgttgtctttttttggatctgaataattgtactaatttttttttctgttagtgttctgttgagaaaacaagttgagtgagactttgaatatttagaacttaaaatttcatttacagaagaaagtaaactaaatggcaaacaaactgggaaaaattgaagttatataaaatgtggtttatataaatctaaagagctcaaatttatgggaagatttctgataggcaaaggatgtaaacataattcacatgaggaaattaggcaaagaaacaacagttttaaaatactgttttatacctgctgaaatggaaacacacacacacacacacacacacacacacacacacacacacacacacacacacacaaaatagctaatcctagcaatggtttggtaatttactggggacgttccaaacagtcctctttttttaaaaaaaaatctgtatggcaacatggagtgaactataaagttcttaataaactttaattcagactcttacactagcaaattttctttaaaacagcattg

SEQ ID NO: 33165 - DNA, 1817 bp, Homo sapiens
ttgcatctgggatgcaggcactccgtgtcacctgtctgtcgctgtctcgggtggttcttactgatttgcacccgggacgcaggcacttgctgtcacctgtctgtcactgtctcgggtgtttcttactgatttgcacctgggacgcaggcactccgtgtcacctgtctgtcactgtctcgggtggttcttactgatttgcacctgggacgcaggcactcgctgtcacctgtctgtcactgtctcgggtggttcttactgatttgcatctgggacgcaggcactcgctgtcacctgtctgtcactgtctcaggtggttcttactgatttgcatctgggatgcaggcactccgtgtcacctgtctgtcactgtctcgggtggttcttactgatttgcatctaggatgcaggcactccgtgtcacctgtctgtcgctgtctggggtggttcttactgatttgcagctgggatgcaggcactccgtgtcacctgtctgtcgctgtctcgggtggttcttactgatttgcatccacataggctttgggctctatcccacctgtcgtcttcggattctctaatacgcaggagtgctcttctgttagtttactcatagtttattaaagtacagagaaaagacatccaggatgataaattttacagtccttgccggggactgccagcttccagtggtgttgcctggcaccagtgtgacccccggtgcctgccccgctgaaccttctgtaaactgtttaactgtgctggtggtttcccattctctaggcgctgagatgcgtctggagagccagagggcctgcctgaaggaatcacctgagcctgtccgtccaccaggagtggggagatgcccccatccagtcctggaggacccgctgctcctgctgctcccggggatggagcaaggccaaggctgcgggaggctgggagccctgccctgcccatccctcctgcaccagcgctgtccctgcacactttggttcagtcccggtgcccctgccaagatgtggaaggggccgggtgaagacaggcttgagggctgccccagcaggctctgggtatgacctgcctctggccctggtcctgggcggggcctgtgggtggagtagtacccccaggccctgccctgggtgacagactgggaggaaaccaggctggacctgggcaggcgggatgtgttggccacagggagaggcggaccggcacccggtgggacctcctaggactgggccttcttccagggggcccctggcagcagctggggtgtcgggcagaatgtgacttgtggccttaccatggacttgaatgggacttggctggcctcaggatcttgtgcctggaaatagcctgaggtggctcaggaagcggagaaagggtgccagaccattctctggcggggaccagggcccaaggccccagggctggaaggagaccaaggggcagccgccctggagggacatcagtgcttcctcttccacccaattcccccacgcggttccatgttttcccaccagcctgttggcgaagttgctgctccggcattcagtacctgcttcttccagagaaataaagttagtttctattttatgttacttacttgtgcctgcctgtttctttgcctgttagtcagcaagctccaggccccaagcgaggctccccaggccaccagcatctgctccgggcagcaggccttgtagcaccacctggaggcagcgggagggcgcgcaggcctggacaccgggaggcctcttcccttacacggccggcagcggggccagagtccccgccggtctggtcagtgactttca

SEQ ID NO: 33166 - DNA, 1009 bp, Homo sapiens
acccggccgccggccgatggcggatgaggctatgggggctgagacgcagtagcggccctgcacttctggaggatgctcgaggcccggccccccaggacgcagggcagtgacgctgccggtgccgctgcggggcgggggctgcgggcgctgcttctctccctgaccgcagccgctgggatttggggctccatgggggagagatctgcttaccagcgcctggctgggggcgaggagggaccgcaggtaatggggaaggctaggggatagccagatacctgggccccagaccccttcgtctgctgtgagccgggctcagccctgccccctgcggcggcctcaggagtgagagtgtctgctcctgggccaggggacagagagcggtgtgtttatgtgggtgtggcggtggtgacttagtgatgctggcatctgcctgtgtgtgcatggatcccctgggaccccaaaaagctgcccgttgggctttcttccatgccccaagggagtccaggaagtactgctaggattggggttcagtcttttaggagaactgagtctgtatgtcctgggcattcccgtttactaggcttctgaatatgaatatcaagccagatgtccttgtttgcttttgaaaatatggtcacggtgttgatggatggggtagcttcccttccccttggagagaacgcacttcctctcccgaccggcagagggcagtagctgacaggagaaagggggactcggtaggagcgttggggcttaaggtcgggctgttttcctgggcgaggagaaagggggccgggccgggccgggcgcggtggctcacgcctgtcatctcagcactttgggaggccgaggcgggcagatcacctgagacgaggacgctgaggtcaggaattcgggaccagcctggccaacatggcggaaaaaaaaaaaatagctgggcacggtggcgggggcctgtaatcccagctactcgggaggctgaggcaggagaatcacttgaacccgggat

SEQ ID NO: 33167 - DNA, 1282 bp, Homo sapiens
ggatacaggagcgcagaagcagagtttaaggggtgatgctgagcccagtttggatatgcaatgtgtggtacctgtgcagcctcctggtggagctgccctgtaaatgtctggaaatgcgggtctggagccacaggaattcaggaatggagatagcacaaggtggtaataggagtccctggaggcataggtgaccccagggagcacagcatcagtggagaatagaaggaaacatgagttcaaaagtcttaggaaataccaacagttaagaagctgggggcggggggtggggggggggtgggggggtgagggggtgggcaggcgcagtggctcatgcctgtaatcccagcactttgagagagcaaggctggtagaatgcttgagcccaggagtttgagaccaacctgggcaacatgacgaaacctcatctctacaaaaaatacaaaaattagctgggtgtgatagtgcacgcctgtaatcccagctactcaggagatggaggcaggaggattgcttgagcctgcgaggcagaggttgcagtgagccaagatcgcaccactgcactccagtctagggcacagtgagatcctatctcaaacaaacaaacaaaaaacatgtggggtgaagaggcttcagggctggaccatgggcctagcactgccagcagacacagccttgcctgccctcaggacctcagctgccaggcccccctgggagggagtgggcccccgtgtcctggagatggagagactatggacagtcatggcgtgtgtctgaatcactcccttttctttcttgggccctggccagcctcctccccagaccagtgtgatgtcaggcccagccgacctgaaggtgcagggttgcctggtgcaggttcctctgggatgaggttctgagggcacccagcctggccttgctccagaagcctgggctctgcgcacagaggggtgagttaaggctgactaaacttggtggggctgacatgtggaagcaagataatcctctggctgggggaggagctgtaagcccccctctcctcatcagtatgttcttttttccttcagggcttggagaagaggtaggtggaggtgggagagggcgggctgggaggtagggttggcatatattcctgagaatacggtagattgttttggaaaaatcctcttggccggaaattgcctgtcatgtctgcgccttggtgtggatttgtcacttcgcatgcagttggagaggctggagaggggaatggacagcagagctgggctggtttccagcctcttgt

SEQ ID NO: 33168 - DNA, 1037 bp, Homo sapiens
gcatgaaacggtttcacagtactttcaagacttgatacagatggatgctcttgtctccacgtgtcagccccaccaagtccagtcagcctcaggttcagtgtggactgggtcacgctgtttagtcagatcctcacccctcctctctcaagtgacattcccttctccactggagttggaggggacgaggcatagcagggccctgcctggtgtgtctgcctctgcctctgtgctctgccctcccaccctggcacctgcctgttcccctcctctctctcggtgagctgggatcctgacagacccaggcccccttcccatcaccctgtgtggcagcccgcgccccagcaccccttcgcagtccgatgagaaggcaccttccttaagaccaatgtcaggctctccctctgcctgagggactggctgagttgttctggttctgagatggctttgggggactgagttgcttagtgggtctggggtcggagtggttgtgatgacatggacagcccctcttcccagaaaggtgctggcgtctctggattagaaatcatggggggaggcaaagccggggctgggagagggcaaccaggcttgttcctggcacccactgggaaagcaacctggcagcagctcacgggggaagaagcagccaccgttctccagtgttcctcacaaagactgagtccttctcagcagacacacccagggcccctgccaggttctcccttcagggcgacagatgtggacagatggttcccttacgatgtacagaccacagcagaggtatacagaccgctccttcagcacaattatgtgctgatacaaagagttacaggaatagtgaccctttaaggataggaacgtgatggataatttaaactttttaaaattcttggccgggcgcagtggctcacgcctataatctcagccctgtgggcggctgaggtgggcggatcatgaggtcaggagatcgagaccatcctggccaacagggtgaaaccccgtctcaactctactaaaaatataaaaattagctgggc

SEQ ID NO: 33169 - DNA, 2238 bp, Homo sapiens
ggtatgtgatttacaaatcttttttccagcttgtggctttgtattttgatcctcttaacaatgtcttctaaaaaattctcatgatcagtagtgcaaaatgctgtgtttttgaagagaagttgtaaattttgattaatttactaatttgttactttgtggattgcatttttggtgtcatgtccaagaaatctttgcctgacccaaagtcccaacagttttcccctgtattttcttgtagacattttatagttttgggctttacattgagatctaggattcgtttggggttaatttttgttacgtggtgcaaggtatgaatcaatgtccagttttttgcatgtagagatctaattgatctagtagcaccatttattaaaaagatgtatctctccactgaattgcctttgaatctttgtcaaaaatcaattgctggctgggcacggtggctcactcctctaatcccagtgctttgggaggctgaggcgggcggatcatgaggtcaggagttcaaggccaagctggtgaacgtagtggaaccctgtctctactaaaaatacaaaaaattagccaggcgtggtggcgggcacctgtaatcccagctactcaggaggctgagtcaggagaatcgcatgaacccgggaggcggaggttgcagtgagccaagattgcgccactgcattccagcccgggcgacagtgtgagactccatctcaaaaagaaaaagaaaaaaatcaattgtttgtgtgtgtctaattctggattctgttttgttccattgatctatttgtctgtctttatcccagtatcacactatcttgattactgtgggtttataaactatagtaagtcttgaaatcagggtaagatctcaaacttggttttgtcttttcaaaattgctttagctattctgggttctttgcacttccatatacattttagaattagttagtcaatttctacaaaaaagcctgctgggattttgattgggattatgatcaatttggggagaattgatcggttagcagtattgagccttctgaccatgaacagtgtatatctctgtatttgtctaggttttgtttactatctctcagcagtgttttgtagtttttggtatatcagtcttttccatcttttattgaacatatccttaaatagtacctatttttatgctattgtaaatgatactggtttttcctggtagtattggttttttatttttaaaaacttttaattgtggtaaaatatacataatatactgccattgtaaccatctgcagtggtggtaaatacattcatactgttgcacagccgtcaccagcatccatctccaggacttttctcatcttgtgaaactgaaaccgcacctattaaacagtaacttcccattccctcctctctcagcccctgagaaccaccattttaccttctgactctatgaatttggctcctgtaggtgcctcatagaagtagaattttacagtgtttgtgcttttgtgcctggcttatttcacctcggcctagcgtattcaaggttcatttacattgcagcatatgtcagaattttcttctttttaaagggtaaataatattctattgtatgaatataccactttttgtttatccatttacttggattgctttcaccttttttttttttttttttaaagacaaggtctcactcactctgtctcccaggccggagagcagtggtgtgatcatggctcactgcaacctcgacttcctgggctcaggtgatcgtcccacctcagcctcctgggtagctgggactacaggtgtgtaccaccatgcctggctaatttttttttggaattttctgtagagacgggagtttggcatgttgcccaggctggtttccaactcctggcctcaagcggctttcaccttttggctgttgtcagtaatgctgttatgagatggtaccgttgtttaaactttactttccagttgtttgttgctagtatatgtaaataccattgattttgtattttgagcttgaatcctgcagtcttgctaaattgacttattctagcaagcttttttgtaacttcctttggattttctacatagggcgccgtgtcatctgctaataaagttttacttcctcctttctgatctttatgcctgttgcttctttttcttgcctgattgccctggctggatcctctggtataatgttattgtttttttgagatggagtttcatgcttgtcgccc

SEQ ID NO: 33170 - DNA, 1195 bp, Homo sapiens
tgcttcccctgcccctgggtggggatgggtgcagggttgctgcttgcccagggccttagctagaggaccctcctctgccccagcccgaggtgtggctgtgagtcagatggacccagacccctgtcccgaaccagactgggtgctctcctctgggggcagagggagtggtgctggaggtagcagctgctggaggagccggttagcccgctcctcagacaaactcaaacccgcctgtcagcttcatcccatgcctgtcgcgctgccacccaaacactcatgcaccggaagttcagctgctgtgcccacggtgcctgacgcttctggaatggccagagtggctctcactgtctggcttcagtggagagaacggtctgttttaaacacatacacacaatcttcacctacttatttcaggtcggcgtttttgaacttgtggtagatgaatgggagaaaggccttggcatcacacagattgcttttgatctggttatatcgcttacaagctgtgtaacttccttgggcaacataatgtctttaggtttcagtttcttggtgtctgcggtgggccaggacttcccctgcagtgtcgtgagtaaagaaacctcaggccctttggagcctggtgcccacctccccggagccccggcagatgttagggaggaagggtcagactgttccctctggcccctgagcccgggattagcccccaccttgtgcttcgtctagaagatgcagtgtttctttttgtttgttttaaataacagttttattgagatataatgacatatggtaaactgagcatatttaaaacacacaatttaataagttgtggcctgtgtatatacccgtgaaaccacccccaccttcaagatagtgaacatcccccttattcccctgtccccagaagttttcttgtggaacccctccatcccccgctcctctgccatcccctaccccaggtaacaggctggtctactttctgtcactgtgtctgagtttgcagcatttactgtaaacggaatcgcgtctttcattcaacagaagtattttggagtttgtccaggtggttgcgcgtatcaacagtcattgtacacgtgtgccaaagtctgtttatccattgacctgttgatgggttttcagagaaagctgctgtgaacgtgtttgttagtctttgtgtggatgtacacttttattt

SEQ ID NO: 33171 - DNA, 1032 bp, Homo sapiens
ttttttatttgcatctcagttcgtttatactcgggaagtgcaagacatggctactagaaagagatgtcaagagaaccggaatccagtaggctacaatttggcaaatcttagcttaaaacttcctaaatgttgaccacagtggatgcaaatggctctgtgcatcgtctgttcaatatggtcaggtgaccacccaggttcacgtggtttgtcaccagggtgatacgagccacatggagtgccctcctcagaggccatgtctcagagatgtgtattttgagtggttttccagcaagtgatgcaagatttatgatccattttaagagcctgctttttatgcatttgctcaaatttttagattttaagtttagttttaggttttctgttaaacttgctcaactaggagtggtggtcaaatactggacctcattagcatggtagcctgcacaccttggcaggctccactggagtgctttggggcctgcctggattccagtcctggctctaccagttttgtgtcctcgccattactgggagggagaattgaggaaatgcatgtgaggtgcttcccgtgattcctggcacggagcaagtgctcagtaattgtcagctgtgagtattagtagtagctaatacactactactattcttggctaacaagccagctcaaagctttgatggttttccattacctgatgatggtgatgatggtttccacttcctgaacactcacacccctgggctaggcacttaacccaaatccaaggtcagcgttattgtttgggggtgggggagacacctcctgctctgactcgtgtgtttgggttcccgtattttcaccagagggtgttagtcctgcccaagttcagctggtcctcaaagcgtatatagctctttaaccctcagcaagtgtcagtcagaacataatcttgatttcagctgctactaaatatctaccaggagcctgcttgagagagagaattgcctgacaggtgctgagtccaccattcctgagatactttgaaatcagtgtct

SEQ ID NO: 33172 - DNA, 1062 bp, Homo sapiens
ctgaccgtcgctggctgtcatggatgagtcacagcgtggaggagagggagccgcaggaccaccggagaagctccgtccccagcagggcagctttctcttagaggtttcctggagttcaacacaagactggtgcttacatctcaggcccagatattgatcatgtcttcatgcctggcttccagcagctcggaaacgtctttaagctggacctgttgctgcccctaaatatactcagcagagagggagagtgggcggccggtggacagtgatctgtgtggcctgtgctgctgggagtcggtccagtaggaccgtctgtgatgatggaaatgttgactgccgtccagtatggcagccattagccatggggccgtggagaacctgatatatagtcagtctaagaaactgaattcctctaataacaaggattcttgtccatgaatgagaatctcttgtctactatttgcaagaattgctgcgtattttctaggaagaagtccactgctttagtcctattctgaaaggcatttggtgttagacacaagagaacaggttccctgctgacattttcagaggcccgtgcccttcggtcttcaggtgaggctgggcttgagggaggctttgtggaacggtgagaagaacagcgtgactaaggcacagaaggctgagtgatgccctgcagtgcttttgtagggttggaggccagctgggaaagaaggaacccttgcgttagagaatgggaacatgccttaggatatagaaatggcaaatctgagatagtttgaagtgagaatactagaagtgttcccaccaaacaaggtgtgtcttggtgcctgctgtatcccaggctccgtgaggtgccggagtcagcactgaacaaacagagcttcctatgcttgcggaaatgcatttcgttgggggaagggatttttctgctgactctggctattaatagtaacaatcaaaaaaagaaatgaggtaaattgttagaaacaggcccccaaatgtggccataaactggccataaacaaaatctctgcagcatgtgacatgctcgtgatggcc

SEQ ID NO: 33173 - DNA, 1023 bp, Homo sapiens
tcggggaggagctgatggtctagtttgagggtcgcactgttgaggacttggggaggagctaatgttgtttgcattgagagcctttcagctagagactcagggaggagctgataatcttgattgagggtcatggagctggagacctggacaggagctaatgttctagttagtggatcttctagctgcagacgcggagaggagctgatgttctagattgagggtcgtgcagctgaagactcggggaggagctgatgttctagattgagggtcctgcagctgaagactcggggaggagctggtgttgtagtttgagggtggtgcagttgaggactcggggaggagctgatgttgttcacattgagggtctttcagctggtgattcagggaggagctgataatcttgattgagggtcatggagctggagacccagacaggagttgatgttctagttagtggatcttccagctgcagacccagggaggagctgatgttctagtttgagggtcgtgcagctgaagacctggggtggagctgatgttctagattgagggtcgtgcagctgcagacctggggaggagctgatgttctagtttgagggtcttgcagctgcagacttggggaggagatgatgtttttcgcgttgagggtctttcagttggagactcagggaggagctgatgttctagatttagagtcacggaactggagacctggagagaagatgatgttctagtttcagggtcttgcagctgcagatccagagaggagctgatgttctagattgagggtcatgctgctgaagactcgggcaggagctgatgttctagtttgagggtcttgcagctgcagacctggagaggagctgatgttctagtttgaaggtcttgcagctgcagacctggagaggagctgatgttctagattgagggtcatgcaggtgaagactcagggaggagctgatgttctagtttgagggtcttgcagctgcagacctggagaggagctgatgttccagtttgagg

SEQ ID NO: 33174 - DNA, 1840 bp, Homo sapiens
gacatgtcttctggggctccggctctcacacgctgccagctttactggagaacttgaaactgcgtaaacaaaataacggtgcttttaatgaaacgctgttcagaaaccagttggctctagctacttggactattcagggagctgcaaatgccctctctggtgacgtttgggacattgacaatgagttttaaatgtgatacccatagcttccatgagaacagcagggtagtctggtttctagacttgtgctgatcgtgctaaattttcagtagggctacaaaacctgatgttaaaattccatcccatcatcttggtactactagatgtctttaggcagcagcttttaatacagggtagataacctgtacttcaagttaaagtgaataaccacttaaaaaatgtccatgatggaatattcccctatctctagaattttaagtgctttgtaatgggaactgcctctttcctgttgttgttaatgaaaatgtcagaaaccagttatgtgaatgatctctctgaatcctaagggctggtctctgctgaaggttgtaagtggtcgcttactttgagtgatcctccaacttcatttgatgctaaataggagataccaggttgaaagaccttctccaaatgagatctaagcctttccataaggaatgtagctggtttcctcattcctgaaagaaacagttaactttcagaagagatgggcttgttttcttgccaatgaggtctgaaatggaggtccttctgctggataaaatgaggttcaactgttgattgcaggaataaggccttaatatgttaacctcagtgtcatttatgaaaagaggggaccagaagccaaagacttagtatattttcttttcctctgtcccttcccccataagcctccatttagttctttgttatttttgtttcttccaaagcacattgaaagagaaccagtttcaggtgtttagttgcagactcagtttgtcagactttaaagaataatatgctgccaaattttggccaaagtgttaatcttaggggagagctttctgtccttttggcactgagatatttattgtttatttatcagtgacagagttcactataaatggtgtttttttaatagaatataattatcggaagcagtgccttccataattatgacagttatactgtcggttttttttaaataaaagcagcatctgctaataaaacccaacagatactggaagttttgcatttatggtcaacacttaagggttttagaaaacagccgtcagccaaatgtaattgaataaagttgaagctaagatttagagatgaattaaatttaattaggggttgctaagaagcgagcactgaccagataagaatgctggttttcctaaatgcagtgaattgtgaccaagttataaatcaatgtcacttaaaggctgtggtagtactcctgcaaaattttatagctcagtttatccaaggtgtaactctaattcccattttgcaaaatttccagtacctttgtcacaatcctaacacattatcgggagcagtgtcttccataatgtataaagaacaaggtagtttttacctaccacagtgtctgtatcggagacagtgatctccatatgttacactaagggtgtaagtaattatcgggaacagtgtttcccataattttcttcatgcaatgacatcttcaaagcttgaagatcgttagtatctaacatgtatcccaactcctataattccctatcttttagttttagttgcagaaacattttgtggtcattaagcattgggtgggtaaattcaaccactgtaaaatgaaattactacaaaatttgaa

SEQ ID NO: 33175 - DNA, 1052 bp, Homo sapiens
atcacaggcatgagccaccacgcccggcatcttatgtctttcttgaaactaattgtaactgttgaaaatggaacttaccaggtggaaataactaaatcctgaagtaccttgaaccaaaatgttttcccctatagggacattttcccccaaaaggagaattgaactggaaacaatatagtacataggattatataattatgttcaatttcttaatgagaatggttttcttacatgctgggctcaaatatgagtgtatatcacagtccatagagcttggaacccctgtgcaaggtgctttcggagtcttgagcttatctgcgagttccttttatcagaatcttacttaacgcacgttaaattagaaaggcatacaaaagaatgtccttagaaataaaacttctcatagcgaataatgtctgtttcaggaaatgggcctgagtttacagtggctgtattctgctcgtggagacttcttccgtgctacttccagactaacaacagatttcgggaatgctgagaaaacagacagatttgtcatgaagaaactcaatgatcgtgtcatgagagtaagtgaacttttgggaaaggaggaactaaagtatgtgtaaaataaccgataaatcttacacttctgcaaagtggacaaactctaggagtctagaattcctttaagaagggagcattaatggtttagctgtcattttctgtttctgctgtctaattcagaacttagtcaaacctagtctttttggaagagacttgctgtaaaacttccatgtatgctccaatggggaaaagaatctgaacacatttaaagttttcctttgtaaaatgaatcagtttcctttaaaaaaattttttttttttttgagacagagtttcactgttgttgcccaagctggagtgcaatggcacggtctcggctcactgcaccctccacctcccaggttcaagtgattctcctgccttagcctcccgagttgctgtgattacaggtgcccaacaccacgcccggctcattttttgtatttttagtagaaacggagtttcac

SEQ ID NO: 33176 - DNA, 1936 bp, Homo sapiens
cgggctgtagtttgccagtccctggagttaactttaaatgcaatcaaacagccaacacttactaagaaataagtccttggacttaagtagtcagtaaatttaattagtagtgtaggaaaaaagtagctctactagtaaggtaaaattaatattctcatgtgaatttttaattcccagagtttttagtcagatttgaagtaaggctcttttatccttaatacatatactgtgcttttacctttctactgatgtgctaattctagaaaagtttagaagctgattatataagttctttcttcctcttttttcttttttaaagatcactatgttgtagttggggcccagagagatgcatggggccctggagctgcaaaatccggtgtaggcacagctctcctattgaaacttgcccagatgttctcagatatggtcttaaaaggtagagtacaaattttgattcttttgaatattggtgcactgcatacagttctagatgttatactgtgctttgctcactttgcctgcattcctgtggttctcatgctagactctagttcttaaatacaaggcagattgtcttttgttgtagctgccttttcctttgaaacagctttccataaagtgtcttaactgtgctagaaatcaccagtttctttgagacagtggagttactgagccctagtgcttagtgtggtggatccagagtgataaggtggatcatagtccctaagcaatctatttgaaagcagtagcatacctctctactcatgtactgaggcctaacagctattgaaattttgttctgtttattcatttattcattttttgagacagagtttcactctgttgcccaggctggagtgcagtggtgtgatctcacttagctcactgcaacctctgcctcccgacttcaagcaattctcctgcctcagcctcctgagtagctgggattacaggcacccacaaccacacccggccaatttttgtatttttactagagacagggtttcgccatgttggccaggctagtctcctgacctcaagtgattcacccgcctcagcctcccaaaatgctgctagtgagccaccgtgccctgcctcttttgtttatttttgagcctttctgtcctactttccactctttcacactcctacccacccacacattcaaaatcacgtcacattcttgaatctttgggtcttagggcaaactgcaatgcttaactttaatacagagtacattaatggagaaaaagatacagtgagggaagtgggagggatggagggcagtgtgatacatgtaacctcaaaaggtgctgtcacaaatatagtttctctgcaaactcttcttgtaacttaaatttgtgaatttttattttattttagaattatttttttaaaaatccaatgtttggatttacctctgaagatttttctcaagatgtgcatcatcatgcttacactgttttcaatgatctctgggtccagaagttaaggaactccaagaatgaaattgtgaaagggtgactactggcccctgctatgtactcaaaatcttatttgcagatctcctatcttgctctttgtaggttactttaaaaaaaattattcctattcttttattcttttacctggggtctcaaaaaaagattttgttagttttttttttcttttttggctcagaaaaaaaagattttggaatctgctatcttggaattagaccttctgattcatcttaagtgggataccttccatccttgtctgtgtataacctttcctcaggtaaagctaacttttttctctttcagatgggtttcagcccagcagaagcattatctttgccagttggagtgctggagactttggatcggttggtgccactgaatggctagaggtattctttatcatcccttcccatattggacacgagcttgtg

SEQ ID NO: 33177 - DNA, 1050 bp, Homo sapiens
tttttgagacaggacttgtgctctgttgcccaggctggagtgcagtggcgtgatctcggctcactgcagcctccgcctcccaggttcaagcgattctcctcctcatcctccttagtagctgggattacaggcgcatgccaccatgcccagttaatttttgtatttttagtagagtcggggtttcaccatgtcggtcaggctggtcttgaactcctgaccttgtgatccacctgcctcagcctcccaaagtgctgggattacaggggtgagccacttcgccgggctgagagtaagttttgtttatatgtcctcttaatctgtaacttcactggacaggagtaaaccctgggcaaggaacaataactcagaacttacgcctgctttctgattctaggaatatggaaggagactgtccctctgactggaaaacagactctacatgtaggatggtaacctcagaaagcaagaatgtgaagctcactgtgagcaatgtgctgaaagagataaaaattcttaacatctttggagttattaaaggctttgtagaaccaggtaaagaccgcccccccccccccccgccccgctttttttttgttttcttttctgttcctaaggatgtggctagagaaggagcgagtgtaggaatgctggcttggcttggttttatgaagtgctcaatcttgtctgtcctaaagttaattgtttatgtgttagtttcttttttttttttttgagaaagagtttcactcttgttgcccaggctggagtgcagtggtgtgatctcggctcactgcaatttccgcctcccaggttcaagccattctcctgcctcagcctccccagtagctgggattacaggcatgcgccaccacgcctggctaattttgtatttttagtagagacagggtttctccatgttggtcaggctccatgaggtcagagctcctgacctcaggtgatctgcctccctcagcctcccaaagtgctgggattacaggcatgagccaccgcgcccagcctatgtgtcagttttattgggaggtaataagg

SEQ ID NO: 33178 - DNA, 1046 bp, Homo sapiens
aagacataggaggccaaaaatcttgattttattccaatagctctgacctaaaagttgtaaagttttttagaactcatgtcttttttaggccttggcctccttttatctcttacttgggttgcctgtcttaggtttgatctataacactcttctgtctcaagattttagagctgttccgataccataatgctcattaaatctaatgtctttgttctagggtaaactggtccatgctaattttggtactaaaaaagattttgaggatttatacactcctgtgaatggatctatagtgattgtcagagcagggaaaatcacctttgcagaaaaggtgagtatgagttattataatattaaatacagtacttttggtatcttactcttcaggtaagtgatatttcttgttaatattcttacattctgaaaatcagcaatcttaaactctcataccagataatataatttattaaaatgctcaacaaatgaagtaagttccacttacctaatcagaagtgcttaagtgaaagctatttctctgtataactcagttttacgcatatacagaattcagctaaaagcatgttttataaaaaggaaaattaatagccaaacatacacaaggaactagagtggaacatatcaaaagacagtggtgatttctgcatttttaaaaaaagtggcagggctcacacctgtaatcccaacactttaggaggctgaggtgggaggactgcttgagccctggaggttgtgagatgtgactcgtgccactccagcctgagtgacagtgagactcaaaaaagtggttgtcttagatgggtttttgttatttttcttttcttttttttttttttttttgagacggagtctcttgtcaccctggctggagtgcagtggcgtgatctcagctcactgcaacctccgcctcccaggttcaagtgatgctcctgcctcagccttctgagtagctgggattacaggtgcccaccaccaccatgcctggctaatttttgcatttttagtagagacagggtttcacgacgttg

SEQ ID NO: 33179 - DNA, 1033 bp, Homo sapiens
tttgttttattcttgctcccttgctcccaccaacatcatggtctgggttactgcatagtatcctgaactgatttgtgcccctagtcccagctactcaggaggctgaggtgggggaatcagtagagcccaggattttgaggctgcagtgagctgtgatcacaccactgtactccatcctgggagagagagggagaccttgtctcaaaaaaaaaaaaaaatttacaaaaagggagagactgactgagaagaccagtgtgaactagcccttgactgggcccagggaagaatgttggtttgaaaggagaacaccctaaggaatatatagcaagttatagtaatggcccaataacaagcatatacctaaacgagcttttcctaaacattcccgtgcctgttcttcatcatgcctttttccgcaacacagtttggtggagaaccattgtcatatacccggttcagcctggctcggcaagtagatggcgataacagtcatgtggagatgaaacttgctgtagatgaagaagaaaatgctgacaataacacaaaggccaatgtcacaaaaccaaaaaggtgtagtggaagtatctgctatgggactattgctgtgatcgtctttttcttgattggtgagaatgaccattccaaacttcaatgttttctataaccaactctgggaagtctgttatgtcagctcagcatatagttattttgtaccttattttttttttttttttttttggagacagaggcttactctcttgcctaggctagagtgcagtggcaccatgttggctcactgcaacctcagcctcccaggtttaagcgattctctgccttagcctcctgagtagctgggactataggcgcccacgaccacacctggctaatttttttttttttttttttgagttggagtctcactctgtggctcaggctggagtgcagtggcgtgatttcggctcactgcaatctccgcctcccaggttcaagcgattcttctgcctcagcctcctgaggagctgggactacaggc

SEQ ID NO: 33180 - DNA, 1028 bp, Homo sapiens
gcattttgcttttcttttcctttttgtatttctgaggctgcaaaatacatcttcacaagagtggctttaatagttacctaacattccatcctgcacgtacatttcaaggcactgccgcagtgcaatatccaacatttaagcgtcaacgccaacagattggacctagcactgcagggactggaggttggtcaaggtcaggcggaggctgccaggctaccagggtggaggaaggcgccgaggcagaggccagtgcgcccatcgcgcggctcctcggggcacctgctgccttggcgccttttcccttggccttcgcctcgcccgcagcgccctccgcatagggccccgcccgctgcgcgcgcatccccgccccccgggcgatctgtcagagcacctcgcgagcgtacgtgcctcaggaagtgacgcacagcccccctgggggccgggggcggggccaggctataaaccgccggttaggggccgccatcccctcagagcgtcgggatatcgggtggcggctcgggacggaggacgcgctagtgtgagtgcgggcttctagaactacaccgaccctcgtgtcctcccttcatcctgcggggctggctggagcggccgctccggtgctgtccagcagccatagggagccgcacggggagcgggaaagcggtcgcggccccaggcggggcggccgggatggagcggggccgcgagcctgtggggaaggggctgtggcggcgcctcgagcggctgcaggtacacggggtcggcggctgtgcgcagaggcgtccctgcgcctctcgtcccttcgcctctcgtcccttcccttctctctgccttcttgcccgcctcctcggtcacagagcgacgaatgacgagaccaggtgtacccccactgtcgctctcagccccggggacttcgggtcctcgcccttgaaggccgcaggccctagtgcgccggctccgggctgcgggtccgggagcgcgggcgcagccaaggtgcagctgcgcggcgtgcggcgccgggggaacac

SEQ ID NO: 33181 - DNA, 1057 bp, Homo sapiens
gagaatcaggcagggaggttgcagtgagcagagatggcggcagtacagtccagcttccgctcggcatcagagggagaccatagaaagagagggagagggagaccgtggggagagggagaggggagaggggagaagggagaggggagagggagaaaacttctcttatggccttcggtttgtatttctcaggccaatagatgtatctattccagtcagagggctcgtggttgctatttttatattccctcttttctcacggactgagagaaactagttaagaaagaagtaacctctttctcatactttttttttttttgagacagagtcttgctttgtcacccaggctggagtgcagtggtgcgattttggctcactgtagcctctgcctcctgggttcaagcaattctcctgcctcagcctcccaagtagctgggactacaagcgcccgccaccatgcctggctaatttttttgtatttttagtagagacggggtttcaccatgttagccacgttagtcttgaactcctgacctcgtgatctgcccgccttggcctcccaaagtgctgggattacaggcatgagccaccgtgcctggcctttctcatacttttagaaacccttatttgaccaaatccttccagacccaggacagggagatttccttctttcctaggctccacccactaaccggttcaccagcaaaccctctggccctattgaccacagcaagatgactggtatacagagtgagggtaacagttctagcagactaggagaaatagctacaaaagcagctggctaacttcatatgtatactccataaatcattaggttgggtggtttgtgaatagattgtagaatttatgagcaaagcaaagagagatatgaagtccactgaggcctggcctctgcctattgtcctttttctgggcctgagaacattgactgggtctttctgaatggcagttatcatgggttttaatgatgtttccttattttcagattgattttgtagcccatgatgatattccttattcatctgctggcagtgatgat

SEQ ID NO: 33182 - DNA, 1034 bp, Homo sapiens
gagtcagagttagagtagaacagaaactagattgagtaaattaagagagtgaggccaggtggggtggctcacgcttgtaatctcagcactttgggaggccgaggcatgtggatcacttgaggtcaagagtttgagagcagcctggccaacattgtgaaacctcttctctgctaaaaacacacacacaaaaaattagccgggtgtggtggtgcacgcctgtaatcccagctacttgggaggctgaggcaggagaattgcttgaacctggtggcggaggttccagtgagctgagatcgcaccactgcattccagcctgggcagcagagcaagactctgtctcaaaaattaaaaaaagaaaaaagaaaaaagtaaaaagaaataagagggggattccatctccagttctgtcactttctaattgaatgacttcaggtaagtcattggatttttctcacattgtatcagtgacattaggaagctgaagtacattttcccaaagactggctgtgactgcctaaggatcatctgggaagttgtttaaaatatagacgctgggtccctattcaaatagattctgatcaaataggccaggggttagatcagtgaatcagaatatttaaaaagttccccatgattctgctgactgccagatatggacactgcttatgtagatgattttaaggtagcttttagctctaaaattctatggtctcaccaaggttttatttttatttttattattttttgagacagaattttgctcttgttgcccaggatggagtgcaatggcacaatctcagctcaccacaacctccacctcccgggttgaagtgtcctgcctcagccttccgagtagctgggattacaggcatgcaccaccacacctggctaattttgtaattttagtagagacagggtttctccatgtcggttaggttggtctggagctcccgacctcaggtgatcggcccgcctcggcctcccagagttctgggattataggcgtgagccactgcgcccagccccaccaaagt

SEQ ID NO: 33183 - DNA, 1031 bp, Homo sapiens
cataataaaggtgcttgggaaagccttaaatttgaagacacatggaggcggtagaaaattaaacttgtaagaggagaaaaacatgccattaggtaacgcagagttgtaactactggctaagactcaatggaacttccacttgctctaaaaccagggaaatcttagataactgggtgtgatctacctatagatctacctagtctataggtaataatttccagaaggaggatcttgctgtcagttggggatcctctggtttggtctgtaccaaattgtgaatactcttgctgtgttgtacccagttgctttatattaatactgcaacttgaaacggggagggtggggggacaatggggtgggggagggaagggagtgggacgataagtcttttgaagacatcagctcactgtgctgagagagggaccaaactcaaggaaacctctgatctatacattcaactgctgcatttttttataaatacatgtaaatgtcctgttgtaatatttgatcttggaaataaaaacaaaaacttttcagtattagttttttttgtgttgttgtttttacaagataagactctggatattactttcagtaatacaattgagattccaaaagcttgccccctcacgttctcatttaggtcagttactattgattgacaaaggttactttgtagtcccgttgttatgtgtaacgtttgctagccttttttctgctctttgtggtatgtcaaacattcatggtaaacactctgtaaatattagtccagttgttacagaaacattgggtaagctaggcttgttaggtaagtatgattctgtgtttgacatacttgggcgaatattcagtgtctgttctttcagaccagcagtaattactaatggttaattaaggacttagcttaattgaaggaaagataattactaaattaatgggcaaaaaggagatacgattatatggtatgacagaaattgttattgctgctggatgcagtggctcatgcatgtaatcccagccctttgggaggc

SEQ ID NO: 33184 - DNA, 1568 bp, Homo sapiens
cttactgcgatgactgaaatctccaaagaggagagtatagtagttataggtctagtaataataatcttgtaaacaattcattattttttaaaacttaatgctgtgtgcctaatcagtgttgagtatgactaaaatgtaaatgagaaccaaatatgacactaacgctggcactaaattttatttttacttgtgtacttaaagtactttactggcctgttgggaaattgatttgtataagattcacacctggttttggcagaaacagctttttaaagatacaattaggctgacttaaaaatgttttttattccacagaatgtatctttattatgtcattcttaccgtctctctgccttttttgaccatcatgtaactacgcagtagtaaatcatggggtgcaggctgatgaattagtagtctttgtaaaactaaaatgtaatgagcataggaagagacagctcttctggtgaacatggcagttttccggtaataccagccttgatgaataggctaaagacagctgtgtactatggacattcaacttcactggattgcctggcttagcttttcagttattgtcttgccgtgaaacatggtgttgcactgtacacattttagaatagtggcaagaatgttctttagaactgcagataacccaacagagaataccataccaatatatcggtttctcctgttacatagagatttggtatttcagtgatggttatggtttttgactcacctgtgtgtcagtcctgctagagagacagtatagaatcaagaatttcttgatgtctttttaaaaatagagattataatggccttgctagttgtcctgtgaagtgacagacccttaattagaaatcttttaatcctgctttccattttacttctccaccatttatttttaacattcattctctgaaaatagttatgatttttagtgtaattggctatgtttaagaaattccatttcaaagtcttaatatgtaacaatcttcattttttataaaattgaaggacatttttgaggcaaacttacttttatagctcattttctccctagttaaggagaattctctggtttcatatagagaatggctagctctgtgataccccaccctctttgtggcctaccagttgctgttgtgttgcttaaaattgcagatattctcataaacatgatgatttttggcacaggcctttctttgctattgatttcaaaataaagttgggcaatccaatttgaactactttaataaacataatttagcattcctgtaatgagaaagtattttcaaaagataaccagatttatttctaggattagagatggcaaataccaatgatagtatttttcccaagagcaatcacagattaatctataaatatgagaagtcgcattattgtacttaattctttggcaacaaacagcaagtttttattgtttaattgtatttcctctctagagatcacaatactctgggtattttatatcccttctaaaggtcatttgggttttcaaatgggaagaatagtcaagctaagctggactaaacctaagtaat

SEQ ID NO: 33185 - DNA, 1073 bp, Homo sapiens
attccttgtgggtgttggacacagcttgaaaggagtgtttaaaaaaaaaaagctagggaggaaaagaacaagaaagatagacttcgagagtgataagagaaaaatacagggagatggaatggaaactaccaggaaggccgggcgcggtggctcatgcctgtaatcccaacactttgggaggcggaggtgggcagatcacctaaggtcaggagatcgaggccagcctgagcaacatggtgaaaccccgtctctactaaaaatacaaaaattacctgggtgtggtggcgtgcacctgtaatcccagctactcagaggctgaggcaggggaatggcttgaacctgggaggcagaggttgcagtgagccaagatcgcaccattacactccagcctgggcgacaaagcgacactccatctcaaatttaaaaaaaaaaaagaagaagaagaagaaaactagtgggaaaaaagtgagaggaatacttttttgaaattggtatcggaaggaactggagaagagaaaacaacagtgccaaatgagaaaagaacaggaaacttaatactaattggcatgcaccagatacttttgtgtacatttgcctcttcaatctcccgaagaatcgtacaaaatgtatactttcttcccatgttaagaaaacaggtatagagaacttattcaggactcatagctagtgagtggcaaatcagaattggaatccagagtccatgctgtggtctccttcagcaagagaatcaagctacccagatgattctcttctcattgtttggctttgtaaagtgtcacttagttttgttcccataaatatagaggaagtagttgggttaaagttgtgggatttgcactatgcctatacatttttatttatgccattattttgagaggctgattattgcttttttaaaatgatgcactggtgaagatgtgaaagtaaaattgccacgtggcattatttgccaagaataaatgaaaagggtaaaaaaacaattttttctttttttaaacatttttcagaaaagatacaattaccttttttaataggtgagcgccaccacgccc

SEQ ID NO: 33186 - DNA, 1048 bp, Homo sapiens
ttcactaatatgctctttcctctttttccgtctaatggctttgtctttctcttgtttttataggctttggtgaagcacgtgcagtctaaaggatacccaaatgaacgttttgaacttctcaccaactttcctcgaaggaaattatctcatctggactatgatattacattgcaagaggcaggcctttgtcctcaagagactgtctttgtacaggaaagaaattaacaccatggcttgacctctctcagcttaccccttttttcccttttcctgtgagatacatgtcactaagtatgcattttggctcataggaccacagagccaaagttgggcaagcaagtcaccttccttctcttatttcttgatctctcctataatcagtctctttctccccctttgtttctttctcctcttctgttttctcgctccccactccgtacccttctgcctccccctccccccacacttttctttcttacctaatctggtgaccaaactgaagtgtaaggataagacctctcctagtactagcagcaggaattgtgtgttccagtaagtggtctcttgcacggcacttttttgggatcaaatgttaacgttactccccagactcttcgggcaaaggaatggctagattcagagtaagaacaaccctcccttttttgtaagtccccgtgtttagcagggagaagaaattctctaacatgggtttggttttgttgtgttcttcatgtggaaatgtcgcttaacaaaatatccaggcttttgtttacgtggaaaaagcatcccttgtaatgattgctcatcatacttaaaaacctttttcaaaggattttcatgttcccagctataaggactatttccatgacatgtgttattggcagaatgagtgttaaatatggagcatatagcatggggtgactttcattgtcctaacctgagacagttttccttattactctgtattgatcctgctagtccaagaatggacatgaagtgaacctatcgtggtgactgggataggaaggtgcttgctatttttgccagc

SEQ ID NO: 33187 - DNA, 1073 bp, Homo sapiens
gccgctcagatgaagaatctgaatctgaacttttttctggcagtgaggagttcatatccgtttgtggctctgatgaagaagaagaggtagagaatcttgccaagtccagaaagtctccccacaaagatttggggcatagaaaagaggagaatagaaggccgctgactgagccaccagtcagaactgatcctggaacagccacaaaccaccaaggattgccagctgtggattcagagatactggagatgccacctgaaaaagcagatggagtagtggaggggatagatgtaaatggtaagttacatttagacatactttacttcaaacttagatattggggccgggcgtggtggatcactgaggttaggagttccaagaccagcctcgccaacatggcaaaaccctgtctctactaaaaatacaaaacttagccaggtgtggtggcacgtgcctatagtcccagctacttgggaggctgaggcaggagagtggcttgaaccagggaggcggaggttgcagtgagctgagatcacgccactgcactccagcaaaacacttgagtaattgctgaatggctgtatttatttacatatttatttaaactaatattctgtcttaaactcctgtatcccgttttttttttttttttaaacccttcctttaggaccaaaagcacagctgatgttgcggtatccagatggaaaaagggaacagatcactcttccagagcaagctaaactgctagtaagtacaggcttgctttggttcagttccgaccactgcaataagacgagtcccaaattgtttggtttcctggtgcatataaaagttatgtttacattattccatagtctattaagtgtgcagtagctttatgtctaaaaaaaagcacataacttaattaaaaaaagcttttgctaaaaagtgctaatgatcccctgaatcttcagtgagtcatctttttgttggtggagggtcttgatattgatggctactgactgattggggtgatgggtactgtggcagtttctgaaaatgtgacagcagtgaagttgctgcatcagttgcttcct

SEQ ID NO: 33188 - DNA, 1031 bp, Homo sapiens
taatgagagtgttcagaaggattctaggtattatatttatagatcctggagaatgttcagaaggattctagatattatatttatttatagatcttggtttttaatccttaggtcagaagctagtagaatggcaccagttagatgtatcttctttcttggaccaagtgacgggatttctgggtgaacatggacaactggatggactttctagcagtccccccaaaaaatgtgcccgttcagtaagtataattaggaggtggtgatgggaaaataaatgtaattggtcataagcatcttatataaaatgttcgatgttaagatggtaaagataatctaactagtggacaactatcactgtggctatagcatcttagatatcctccttatattttgataatttcccacatgagagttccatcttcttggtgaaatcatgatactcatactcctgccagtctgtcttgcagctagagtgcaggcagatgccccaggatctggatttagaaggaagcaatgtgaataggttgggcaggaggactgacctggcaagcctagtggtaaaggtgtctacttcctgaggggcagctctgggagggcttctgatatccaggtctaaatagcagtgaaagtggttggtttttttgtgtgttttgttttttgttttggagtgggatcttgctgttttgcccagactgtcctagaactcctgggctgaagcagccttctcacctcaactgcccgaatagctaggactacaggtacatgccaccacagccggctggaagtggtgttttttgtttttgctgaaacaactgtcatggtatagttgagcatttttattggttaatatagctttagggcctggctctctggccctcctagaatttacttctatacttaatttctagaatatactattactaggtagacatgtttgataattggtatcaagattggttgcaaataagagactgaacttgcaaagatacagcaatctcacattggttttcatggctgtttggctttgatag

SEQ ID NO: 33189 - DNA, 1064 bp, Homo sapiens
gcatttgctgaggagtgctttacttccaactatgtggtcagttttggaataagtgtgatgtggtgctgagaagaaatgtatattctgttgatttggggtggagagttctgtagatgtctattaggtctgcttgttgcagagctgagttcaggtcctggatatccttgttaactttctgtctcattgatctgtctaatattgacagtggggtgttaaattctcccattattattgtgtgggagtctaagtctcttctctgtaggtctctaaggacttgctttttgaatttggatgcatatatatttaggatagttagctcttcttgttgaattgacccctttaccaatatgtaatggccttctttgtctcttttgatttttgttggtttaaagtctgttttatcagagactaggattgcaacccctgtgtttttttctttttctttttttttttttggagatggagtcttgctttgtggcccaggctggagtgcagtggtgcgatctgggctcactgcaagctctgcctcctgggttcatgccattctcccacctcagcctctcgagtagctgggactataggcgcctgccaccacgcccagctaatttttttgtatttttagtagagacggggtttcaccgtgttagccaggatggtctcgatctcctgacctcgtgatctgcctgccttggcctcccaaagtgctgggattacaggcatgagccattgtgcccggccaacccctgcattttttttgctttccatttgcttggtagatcttcctccatccctttattttgagcctatgtgtgtctttgcatgtgagatgggtctcctgaatacagcacactgatgggtcttaactctttatccaatttgccagtctgtgtcttttaattggggcatttagcccatttacatttaaggttaatattattgtgtgtgaatttgatcctgtcattatgatgttagctggttattttgcccattagttgatgcagtttcttcctagcatcaatggtctttacaatttggcatgtttttgcagtggctggcaccggttg

SEQ ID NO: 33190 - DNA, 1034 bp, Homo sapiens
tagaggagtgagactgggcactgtggctcacacctataattcccgcactttgggaggctgaggtgggaggcctggagcttgagatcagcctaggcaacatagtgagaccccatctctacaaaatgtattaaaattttatttattaaaaaaggagttacatctgatttgaccttttttttttttttaaagaaagagttacttggctataatggagaagagataggcacagagatcagtagaaggctgttatattaacccaagaaagatagtggtgtcctgaaaaaagttagtggcggagaagtggactccaaaaggtatgggaagaaatcagagtcaaaatgaagtttaggattctgttttggacacctaggtatgtaacagtgctatttatgaaggtatggaatagcagaaaggtgtggggagaagatggttagctcagttttggataagttaaggtgctgctaataggacttccagatggagctgttgaagcagatgaatatttgggtctagaaagaagagtgagaaatctgtcatattcatggcagttaaagttataaaaatggggctaggtgcggtggttcacacctggaatcccagcactttgggaggccgaggcgagtggatcacctgaggtcaggagtttgagaccagcctgaccaacatggtgaaaccccgtctctactaaaaatacaaaactagccgggcatggtggtgtgtgcctgtaatcccagctactcaggaggctgaggcaggagaattgcttgaacctggaaggcggaggttgcagtgagctgagatcacgccattgcactccagcctgggcgacagcgagactctgtctcaaaaaaaaaaaaaaaaaaaggttataaaaatggatgaggcgaggcctagtggctcacaccggtaatcccagcactttggaatgccaaggtggaaggattgcttgaggccagaaattcaagaccagcttgggcaacatagcaaagagcctgtttctacaaaaagtaaaaaaaaattaactgggcctggtg

SEQ ID NO: 33191 - DNA, 1055 bp, Homo sapiens
tttctcaaaaagaaaaaaaaagccacttattattattattattattattattttgagacagtctcgctgtgttgcccaggttggagtgcagatctcccaggcacgatcttggctcactgcaacctccacctcccgggttcaagcgattctcctgtctcagcctcccgagtagctgggactacaagcgcctgtcaccaggcccggctaatttttgtatttttagtagaggcggggtttcatcatgttggcctggctggtcttgaactcctgtcctcaaatgatccactcacctcagcctcccaaagtgctaggattacaggcgtgagccaccgcgcctggccctaaaagccacttaattaattttcagtttcttatgctaattactactcttcccaaactctgattggtttaacgccacattacttcttctgttgcaacatttttattaggtacacacaaaaaccgaagtgtggtgagttgaattgactcacttaattgctttaattctgtttctgttcgtctacgtagcttgattgctggatcaagttggagtccctcaatcagtagacagtggtatctggagatctacagagcgaaaatacctttgagtgttcttcaaatattgtgaatttctattgataatttttgggattctttttacaagatagtgattaaccgttagaaacacatgattgatttctttttgccttttttacatgtcttaaaatttttttggggttctctccacatacgttttaatcgtagtgtttataattaaaaggtattttatatttattttagtgaccttaatagcttatgctctgatttcacaaaggttttacttggaagctcaatattcttgtaaaaacaaatgcatcatcaaaaatgtgagtccttactttttaggcaggagcaaaaaaaagaaaaagaaaaaataaaaataaatgtgagtcttatctttttttggcatttagaaatagaacggaaaattgaaagattttagaaaagtcttatttcttactgaatagaacagatctctctctgattcagtgagt

SEQ ID NO: 33192 - DNA, 1050 bp, Homo sapiens
gcgacgacggcgtcggggtctccgggttcaggcgggagacagcccccccccgctcccgataccctcgttctctgtctcctagtagcgtggagggagatcccccaaccccccgccagcccagacctgggaatgggccgagtccgtccgcccccgccggcccggggacccgggggcgggaggagtagggggccgcacccgggccaccgccctcctcctcctccttcatcatcttcccttctctgtgcagccctgcggtgcggtgcatctcctcacctccttttttcctttcttccccggccaggtcattctgccccggtccccggcctgcccttcccctttctgggcccctcggagccatcgccgtggccctggcgggttcgggccctcccgccttcacggcaaggccggtgggttcggccgtgcctttacacttcacgggggacaggccgccagaagcggggggtgctgaggaggacctcagggactgaggctttgagggaagaatgagggggaacccccaagctgaataggggaggcctggaagaatccagggtggcgtttcccacctccccataataaaatcataaagacggagacgatggcgccggggcctcctgctgataagatagggatggcggcagaaacttctttgagagaaaatctgtttctgggtgtcggtatccccgaaaccctaggcctaggttctctccctttggacccctgcgaaggacacacgcagatcctcttaccgcctggaggaaaggccctaaagccattctatgaattctctctgtcttgtttctctctgatggtgctgaacttttcttgcatgagttattagagggcggagcaaatgatgaagttctctgtggagtgatttgagagaagagtactccaatgtgcctgagtgtaattttgccgttctagtttgtcgttttggaaggaggtcagaatgttagttccctctcaacggatctatactttatctcgtaatttgttagatgcggagaatgtttccactgttaatgttcctagagtttaacgtgcaat

SEQ ID NO: 33193 - DNA, 1046 bp, Homo sapiens
tacttctccagatttgtacttcatttgagatcatttaaatttctgccaatttgttctttttctacttttctattcttgttatgaaatattgcaagtataccaaaacgttcagagaaggattgctctttattaatcacttttaaggtggcggcagagcgacgggccagcgaggaagaagaaaacaaagccagtgaagaatacatacagaggttgttggcagaggaggaagaagaggaaaaaagacaggcagaaaaaaggcgaagagcgatggaagaacaactgaaaagtgatgaggaactggcaagaaagctaagcattgatattgtaagttttaggagggaacgctaaggtatggtcatcccttggtatgcgctgctgcagaacccgctcatgggaagagtcagctccttgtatttccaggttctgcatcccacaaatattgtcttttccaccccaggctggttggatttgagtgtttggaacctgctgatacggaaagctaactattaacattccgattgctttgactgtggttttcaaagaacagaagagatggcgttgccataattagaagctattgataacatttttgctttacttaaagtaaaattgttttgcatattgttacatatttgctctaatccaggtttttggggttttttgttttttgagacaggtcttactctgtcatgcaggttggagtgcagtggcacaatcacgactcactgcagcctcgacggccgggctccggtgatccttccaacctcccgagtagctgggactacaggctggcactaccatgcctggctacttttttgtggagacagggctttgccatgtttcctgaactggtgtcgagctcctgggctcaagccgtccatctgcctcggcgtctcaaagtgctgggtttgtggcgtgagccaccgcaagttgtttaacaacttttttatatgtaggaaagctattcagtgaagaatgaaagcttcctttttccttcttccacctctccactcccgttccttttccatttatatcagtctctatcc

SEQ ID NO: 33194 - DNA, 1132 bp, Homo sapiens
aaatttatggggtgcaagggtaattttgttacatgtatagattgcacagtggcgaagtcagggctctttagggtatctgctacccaaataatgtacattgtacccatgaagtcatctctcaccatccacccctgccgcctctggattttcttgagaaagcaaaaaatatggcacggacaggcctgagtttcctggtagtcgtagtcagctggagttgagtagcagctgccccttgaaacagacagatgcgttctcttttttggatgttccctttttacactttataaaacagtgtcttgttttatagaataaaattctcatcagatttgttgaggatacatacccacatttaggttattttctgacccagaattatctttcaactccagggtgatgattttttctctttgtatagcttactgtttccctagtcctgcagatgtatttcaaatgtctgacgatccttggattagcttttaggtttgagaatgaggcccaggagaaaagctctgtgtatgtggaagggtattggtgatgggcagacgttgagttcaagccgatggaaacctggcctttgtgctttgccatccctaactgcccgatcgcagaggactttgctctgggtcaccacctattacattagctgctctggctctctctagatctgtttctttaaagaaatatgcgtgtgtgcacctgcacccatatccagggagaaatgccggtaagtcgaggattctgatttaacagcttataaatctcgagttctgttttcagtcccacggttactcactctggactctatgagcctctctctaggcaaataggaggcagattcccttctaattctacctcagctgtagtcttccctttcaaggatttcttttccttcatttctgctgtatcaattatctctatttcattgccttcccattttctagaaatttgttaaaaattttttaactggagccgggcacggtggctcacgcctgtagtcccagcactttgggaggctgaggtgagcagattgcccgacattaggagttcgaaaccagcctggccaacatggcaaaaaccggtctgtattaaaaatacaaaaattagctgggcatggttgggcatgcctgtgatc

SEQ ID NO: 33195 - DNA, 1024 bp, Homo sapiens
ctggcactttggaaggcaggtggatcacctgaggtcaggagttcaagaccagcctggccaacatggtaaaacccccgtctctactaaaattacaaaaaattagctgggcgtggtgggacatgcctgtaatcccagctactcaggaggctgaggcaggagaattgcttgaacccgggaggtggaggctgcagttacctgagattgcgccattgtactccagcctgggcaacaagagcgaaactccgtcaaagaagaaaaagaaatagcaaatggactggatgcagtggctcacacctgttatcccagtgcttcaggaggctagggcaggagaatcgcttcagccaaggggttggaggctgcagtgagctatgatcccgccactgaactccagcctgggcaagagtgagatcttgtttccaaaaacaaaagaaaaaggcaaatgaagacaattttaacttgtgtctgcagttgaataactcactgatcttaatttagattcagtttatgtagaaataagtaaactttaaaaatctgtcattccacggtttaacaaaagttcagctctctgcttgctgtagttgggcatcttctgtaaatcgcacgtgcctttcctttgcctgttgtggtttttaattgatctgtggaagttctagttatattctggacactaattctctggtgatttatgtatttgcaaataacttctagtttgtttttaactttgtgatgtctttcatcacatggaagttttaattgttttggaatttatctcatatgttcttcttagtcgtttatagttttgtttttttccattttttaatccaccttgaattcgagtattgtatgaggtaggcatcttaactccccctgcccttgattgccacttaatagccacactacttggtagtaatacagccacattgatatacgtactatttcactaatcatatgcttattttccagagcaatttggggctatttatttattttatttatttatttatttatttatttgagatggagt

SEQ ID NO: 33196 - DNA, 1029 bp, Homo sapiens
gaggtggtatcccattgtggtttttatttgcatgtccccaatgactaaggatggcgagcatctttgcatgcatttattggccatttgtatatcatcttcggaaaaatatgaaatatctattcaaatcctgtgctcattcattctttttgtttctgtttttctcccaaaacccagaaaaagccacaactttgcctgtcatttaatcaggttgtttttttgagttgtgggcattctcctgcctcagcctcctgagtagctgggattacaggcatgcgacaccacacccaactaatttttgtattgttagtagagatggggttttgctgtgttggtcaggatggtctcaatctcttgacctcgtgatccacctgtcttggcctccaaaagtgctgggattacaagcgtgagccaccgcgtccgggctgttttagtttttatccaccatagatgagttttttctgttctggaacttcatataaatggaattctttttatttcctagggctactgtaacaaagtaccacgaacttagcagaaatttattctccctcagttctgaagagtagaactccaaacccaagatgctagcagggagcagggacatgtacattgaaggctctgggagagaatctgttccgtgcccttctccttagcttctggtgtggctggaatccatggtgttcctggtttgcagctgagtcactccagtctctgcctccattggcacgtagagtttcccggtgtgtctgtctttacatggccgtctcctctgtgtctctctcttttttttttaccaggacactagttatattggattaaaggctctgtactctttgtatgaactccattatatctgtaacaacctgtttccagttaagaccacattcttagttactgggagttaggacttaagcatatcttttggggggttattcagcataaggttcaagatttattctttttttttttttgagacagtcttgttctgtcacccagtctggaatgcagtgacaggatctcggctcactg

SEQ ID NO: 33197 - DNA, 1079 bp, Homo sapiens
tccagatatgcacctagtatatatcattgctggatcatatggtagtcctatttttaattttttcagaaacctccatactgtttttcataatggccgtaataatttacattcccatcaatagtgcacaagggtcaaagaactaatatttgcctttgataatcctttctattatttatttctttctatttcatgaattcctgctctaatctttattatttccttcattctaataactttaggtttaatttgctctttttctaacaccttgagatgaacacttatctcacggatatgtccagcttttattttgcatttgagacaaaatttcttcaaagtacagttttagctacctccttattgtcttatgtcacattttcattgtttttcaatgaaacatttaaaattttcattgtattttcttctttgagacatgaataatttagaaacatggtaaaacactgaaactttcttcatgatgttggtaacaagagaatagaatgaagcctataatcccagcactttgggaggctgaggcaggcagatggcctgaggtcaggagtttgagaatagaatgaaattcccttgattaattctattcaacattctgttgaaggtgtagacattacaacaagacaagaaaaagaaatgaaagacataagaattggaaaggaagaactaaaactgtcattcacagacaacatgattgtgtttgcagaacaaggacggatgcggtgactcacgcctgtaattccagcactttgggaggaaaaggtgggtggatcacctgaggtcaggagtttgagacaagcctggccaacatggtgcaaccctgtctctactaaaaatacaaaaattagtcaggtgtggtggcatgtgccggtagtaccagctactcaggaggctgaggcaggagagccacttgaacccaggaggtggaggttgcagtgagctgagatcacgccactgcactccagcctgggtgacagagcaagacgaaagaaaagaaaggcgggcaggcgggcaggcgggcaggcgggcgggcaggcgggcgggtgggcgggcaggcaggcaggcgggcg

SEQ ID NO: 33198 - DNA, 1053 bp, Homo sapiens
agaaaaaagaaaaaaaattgaaatcgttaaacaaaattatttgtaacttaaattgacttttcaatactcaattcaaatttgtaggatagcatctttatcatgaggtaagtcagtattacagttcctaagcctaaatactatcagtgcctttcgtttaaaatctaggtttatctggaacttttggcaacagtcttcgttacggcatatttacctgctgctgtttcagtacttgtcagcaaaaatcaaaccaccagggctccctgtttttacctccctctgagtcatttcctctccaattctctcctttaaatattattgcttcagtctccagttagtttcctctgtatattagttgagtgcttctgcttgaaaacaaaagtttaattttgttttttattttgttatttttatgaacatttctgtatttgattttgtgatcacgtttccgttaccttgattactaatagatcagtgatttttttgcagtctaattagtgatcgtatgtgtgactaaaagtagggggaggctgggtgcggtgacgcacgcctataatcccagcactttgggaggctgaagtgggtggatcatgtaaggtcagaagttcaagaccagcctggccaacatggtgaaaccctgtctctactaaaaatggaaaagttagcctggcgtggtggcaggcgtctataatctcagctacttgggaggctgaggcaggagaatcgcttaaacataggaggcagaggttgcagagagctgagattgtgccattgcactccaacctgggcgacagagcaagactccgtctcaaaaaaaaaaaaaagctttgtgttgggaatggaaactttgggcagattgccagattattttaaatgattttatctctgtaccactgggctaaattcaagtatcttatctgaaaatagcacaacagctctgggggctggcactcgggtaagctctcctttcgcttatgaaatgaaaaattaaatttgtccaggtagatttatttgcttccttttgtcttgaccaagattagagttgtataaattgcc

SEQ ID NO: 33199 - DNA, 1716 bp, Homo sapiens
ggggtaggggagatgttgtcaataggaaatgggataaaatatcaagagacaatgaaaacactgccttgacatgaggaccagcaagtttattcttttcattttcagtgatgttgggaatggactgggttttaaaagggagcttgaagagggaatgtttgacagtcacagaaggttcctgcagcagatgcctcttttagccatttctcatttttttcctcaaattttacctactgaggctcaagccttcacagtgagctgatggtctctacagggaggggagtctagggaatttatttggtatttgtaaggcaagaggtgatttctctctaatatatctgagttattgctcatttaaaactgttaagtccagtataattttccctgatatgaaaaaatgtgcatttttttcacttagcaacaaagtaccttctaatttccaatagtccgtgaaagttggggctgaagtacctaagtgtgaatgtctctcccgttaaactgagtgtagaaatctgaatttttaaaagagctgtaactagttgtaagtgcttaggaagaaactttgcaaacatttaatgaggatacactgttcatttttaaaattccttcacactgtaatttaatgtgttttatattcttttgtagtaaaacaacataactcagatttctacaggagacagtggttttattcggattgtcttctgtaataggtttcaataaagctggatgaacttatcgttgttgctgcctgtttcctggcctataaagagggttgtgttctggaattcctgtactctggatacacatgaatgagttccagggggattctatgaatagtgtggacaattcgcgtgtccattttgattgactgacagttggaaataactattgctgcgtgtgaagagagcgcacagattttcttgtgaaagtgatcaaataggcaccaagcaacctctactgatggaagaataggttagttttccaaaaaacatgctctggatgattgcaagggaagggaaattgtgggtggattaagaacatcttatgtttcctgggctagagaacactaaatgtgagtctctttactgcaccattctttcctatttctcatggatagcatctgacctgtttctcactttaatcggagaaaagtgaaaattcaaacgtacagatgaaggcatcactattaatacatgttagtgaagtgtgagaattaaacattcagtttctcagtcaagctaagatgaagatatagaacatttccgttgtagaaaattcgagtgatggtgctgctgctctgagggtgagctggttagggcctgcactgctcactgttctgaaatgacctctgtcgtgactggaatgtcacaagaaaaaaattactcctcgccaaacagtacatgttactcaagacgagagaacacaagtttataaaggcatttagtttatttttcaaaaaaatactttgctagaagggttgagtactgtaattttacatgatcataatctctaaataaattctttttctgaccaacaggtaccagttaagtgaacagctcgtctaggtctgcttttgtaacacccaaatacaattagcacttctctgctggtattccctgggccgtcttaattatctagaggccaggaggcaaagcctagcacgtaacaaagtatgtgctttgtaactgctgattaattcagtttcttaactaggcagag

SEQ ID NO: 33200 - DNA, 1083 bp, Homo sapiens
aggcagggcttctctcccagattgcaggcttgcctcggggatacacaggtttcccaaatgctagaatgaaaagagattttattttggcttgctaacatcaaagatactagtttctccagatggtttattcagaacactgttgtcttatttttatttgtctgagattaaatgtcttcccctttaattaaagggaggtctctgatgaagtaggtttgggaactgctaccttggtgacagcttgagtctttcctttagtgaagtgcagcacaattccacgtgcacggtgaccttctcttgattagggtgccttggaatgtacagaacctaacttgaatatacagcactggtttcttggataagaagtgtacagtgatctaaacttgcaaaccaaaatacagagatgatgggaccaaaaattatcaacaggaatgtccaagaaatatgatcagtgtagccatggatacgtgtcatatttgactctatgtgcttccaaaccaatcgcaaacaggcctgggcaagctgaattactgtctttgaactccatctggttggattagctcttgtactttttaacaactcagcttcatttacatgttgttcccctatttccagaaatgtttggaaaaatgctagtgttccttaatacttaagatattactcacgcgcagatgcggaaaacgccatgcggtacataaatgggacgcgtctggatgaccgaatcattcgcacagactgggacgcaggctttaaggagggcaggcaatacggccgtgggcgatctgggggccaggtatgcaagaagggtctctgggctcagccattgcctgggattccagtcacaatgacaggtgttttggcaatttgtatttactcttttgtaaataactttgtgtctataaccttggcttgaagtggatctgaaaaccacccaacggtttgggtgaattttttttttaaaccgtgaaatggtatgttctgtacgtttctaacaagcaaccattcttgaacttctgctagggctaggtatcttccacctgcaggaacatctaaaatgaaagcaaaacgcactgaagtgagctgaag

SEQ ID NO: 33201 - DNA, 1033 bp, Homo sapiens
tgtggggaagcctggacaacacccaggctttcttgggcagaggtccccatggctttccacagtgcattgtgtccctgggtactcaagactggagaatggcgatgacctttaccaagcatactgccttcaaacacattgttaacaaagcacatcctgcacagccctaaatccattaaccttgagtcaatacagcgcatgtttctgtgagcacagggttggggctagggttacagattaatagcatttcaaagcagaagaatttttcttagtacagatcaaaatggagtttcttatgtcttcctttttctacatagacacagtaacagtctgatctctctttcttttccccatacagaccttacgatttcattcatatggaagttcaggatagggaattctatagagacagaaagaagattagtggtttccagagtctggggtggtggacaaggatgggaggtgataactaaatgatatggggttcttcttgagtgatgaaaatttgtaaaactgactgtggtgatggttgcacctgtctacgaatataccaaaaaccattgaattgtacactttaaaattatacggtatattaattatatttcaataaacctgttttaaaaagagatagcctcaaaaatacagacacttctcagtttgtcatgtctggacgagatggctggaactgaggattatgtccacacaaagagaaaggcagcatcaaggctgacctgagaagcggcaagggaccctggcagtaccaagtctggttgtttttttatgtgacatgatcaattgtttcctgctttttcttttaagagatgggggtctcgctgtgttgccaggctgaccttgaactcctggggtcaagcaatcctcctgcctctgcctcccaaggagctgggactacaggggtgcaccaccacacctggcaacatgatgaattgttgaagcagcttgcattgtttttgctgttgttgtttgcaaacaactaaatgttttatgcaaaaaggagttaatatagggaattagctgc

SEQ ID NO: 33202 - DNA, 1020 bp, Homo sapiens
gccagtgacaggatttcattcttttttatggctaaatagtattccacggtgcatgccaatgacattttctctatccatcctctgttgttggacacctgggttgattccacatcctggctattgtggccagtgctgcgataaacatggggtgcgggcatcccttccacaggctgattgcctttcctttggacagattcccagtggtgggattactggaccatatggtattcaatagttcgatttgtagtttgtggagggacttccgtactgttttccatagcggctgtccgggtttacatccccagcaacggtgtgtaagagtttcctttattctgcatcctcactagcatttgttattttttatctttttgataacagccaccctaactggggtgagctgatacctcactgtggctttgatttgcatttccctgatgatcagtgatggctgctggcattttgtatgtcttcttttgagaaacgtctgttctgatcatttgcccgtttttaagttggatggttttctgctgttgagatgtttccgttgcatgtgtattctggatattaatcccctgttggatgagtagtttgcaaatattttctctcattccataggctgtcttcatttcactctgttcgttgttttctctgctgtgcagaaacttgtttgtttgatacaattccctttgcttattattgcttttgttgcctatgctttcgaggtcttttcataaaatcttttctcagaccaatgtcctgaagcgttttgcctatattctcttcagcaattttattgtcttgggccctgcatttaggcctctcatccattttgagttggtccctgtgctgggtgaggggtagtttagggccccgttcattctgcacttggacattcagcttcttcccagcagcgtccactgaagaagagatcactcttttcccaaagaggttcttgaaacctttgtcaaaaatcagctggctgtaaaactgcgggttaatttctgggttctctattctgga

SEQ ID NO: 33203 - DNA, 1031 bp, Homo sapiens
gaagatgagggtctgattttttaagcaatttgcaaacccctgcactggatctcacctaccagcccttcctggcatttttctcctcttgcctggagaatttgtccctcatccctgggaaggtttaagatatagtttggtgttgaggctgggcacggtggctcatgcctgtaatcccagcactttgggaggccgaggtgggcggatcacgaggtcaggagaagagaccatcctggccaacatggtgaaatcctatctctgctaaaatacaaaaaactagccgagcgtggtggtgggtgcctcaaatcccagctacttgggaggctgaggcaggggaattgcttgaacccaggaggcagagattgcagtgagccgagatcacaccactgcactccagcctggtgacagagcgagactctgtctaaaaaacaacaacaaaaaaaaaacccacaaagactggtgttatatattgagccatcatgtcatttaagttttttaattttgaaagaactgagctttggaaaacttacaagaataactcaaagagctcccttctattcttcacccaaattctaactgtttagcattttcccacattttattgtgtgtgtgtgtgtgtgtgcgtgtgtgttctgacccatttgagagtacatttgcctatgtcataccccttgaatactttggtatgtatctcctaagacaaggaggtgtgtacctagccacagtaatccaaatcaggacacgcaactttgatacaatcctgttatccagtctatagccgatattgcagattcactcaccgtcccaattctgtccttcatgcccatttcttgcagaccaggacctaaactcttaccacgcatggggtttagttgttagatctctttactttcctttatcttggaacagtttctcagtctttgtttttatgacattggcattttgaagcatcaggccggttattttatagaatgtccctcaatttagatttgcctgaagattgtttctttttttaaattgagatataatttaca

SEQ ID NO: 33204 - DNA, 1370 bp, Homo sapiens
gtggattccgcccgggaactcgcggccgcacttaaggagctcgggccagcgcgagggggagcagggaggaagcccggctgctgcggacctcctcggacccggacccagccccagcccggccccagccagccccgacggcgccatgcggggtccgagcggggctctgtggctgctcctggctctgcgcaccggtgaggccccgctgtgagagccaaaggcgggcgggggtcccggggcgccgcggcccggctgagcaggtcccggggctggaaatgtgcctgagcctgcggctccggggcagtgagacgggggaggcaggggctcggggtcgagtgaggacggcggagggaactagcactgaagcgcagacggggaagtctggaaggcttcttggaggaggcggcctcgaacacccgaggcttccgacgctccaaggagaagcgcgggctgaggcgtggtggggaggcctcggggtgtggagaggagctcccggagggcggcccctcccgacgggcgcaggaactcaggaagactttgggggctcggagcagctctttctcccgagcccccgcgggagaagattcagagggactgaccggcaggcgcgggagtccgcccgggggtttctggcacatgcagggatggaggtggagacggaggccgggtcccctcgcgtcggcgccccggggagtcagggcccgggatggtgggacgggaggcgggacctcggggagcggctcgcggggatcgcgggcggcgaccgccgaggggatggagttcgtggcaccgctgtggccgcaggcgacgcactcatcaatgcaaacgatgaagccaccgccacccccgccccgtctgaactttgcagtttcccgcctgggtggtggggggcttggagcgctgcggaggggagggcagttcgacttcccaggcctccgccaggagtggggaggggagggctgtggcggaagcttcagtctcggcccttgggctggtggggctgccacgggagggtgacctggtttcgggcggagtcatgcgtttccctccctcctgcacaggcctctggcagtgctggctggggcagggtgaatggcagaggagctcaggcctgaaagtcatcggccccaaggggctccagcaccccttcctctgggcccctagcctgggagctctcggggactctgacccggtcagatcctgaggcataagcagaagtccactgaggatgtgggtgtctcaggctctctacaagggggtttactttcaacacagaaggtggggtttttatctgctctctcagaagatgaagcaggctcagagaggcttgaacctaccctgatgggtcctcagcctcccctctgtgcctgccg

SEQ ID NO: 33205 - DNA, 1018 bp, Homo sapiens
gaagacatttacaaccaagtgaaacagatcatagaagaacaatctggttcttacatctgggttccggcaaaagaaaagctatgaaaactcatgtttctctgtttctcttttccacaattccattttctttggcatctctttgccctttcctctggagtctttcttgagtactgatttcatgttgaattgtatcccacacatcatggtctgcagcttctttttcacatgtagtgtctccttcaagttacatcgtgtgtattatttaatgtcactattggttagtggccatttttcagaactgaagatggaatggcctgaccagctattaagaacgtggggagacgcagaaattgtggtaaaattccttaatgtttaagggaaagtaactttaagagatttttggaaaagctttatatacattcttttcaaatttcagtacaaatgaaaaagtggttttaatcagtgatttagtagactttgagcaactgtgcacgcttcagtttaatagcatggtttggccagtgtattactctcaagtccttttctcaatcaacttctatcatcaaagcaattgtttcattatagataaataaggacattttttaatttaaaaattcatgtctgagttgactttcataagggatttcattttttcctcaacattcttaaagccttttagtatttgacggttcttttttcccaggacatttgctaggaataacaacgtttcaatgtttttaatctacttgagcaacactatcgtgtcttacaaaagttgttcatatgtaaatgatcatcacatttcgtgaattgaggccatgttcaggtgctaaggaagttcgccttttacacagaagattgagaaaatttcctagatataaatacagataaatcagacgttacagtggtgacgtagtaaccatcatggcaatggaaaggagtccaattcatagcctaaaacttcaaatgtattcttaggagtcagattttactgaatattttacccacaatagctgcc

SEQ ID NO: 33206 - DNA, 1043 bp, Homo sapiens
ctaatattgctcatctgtgtttgaaacatatacttcagaaaatgttaaggaaaaaatagaaaaggaaaagaaaaatagaaaacctaaataatctagtacttattaaagacttgaacccgtcataaaaagcctttccacaaattaaatactaagccaagcagacttactaaattctaccaaaagctaagaagctatgtcaattttatacaaacttttcaactaatttatgagcattaatttgatacccaaacctggaagggactatataggaaaggaaaatgataaagtcagtcttaattatgactatagattgcaagaacccttaccaaaataggagcaaattgaatcaaacaatttttttaataaggcaaaatgtaacaaccaagttgggtatattcctggtatgcaacactgctgcagcatttaaaaactaatcagttatggagctagagggaagatggcagagtaggaagctctgggaatctgtctccccacccagacgacaactgcactggcagaatctgtctgatgttactatttcggatctctgttcaccatttttatcaggttgggaactctgaagtctattgaaggcttatgacttccaggggaaggtttgaaaggttaatttcagctcttaacatggtagcaactacctgttcgtctaccctcagtcccatagcatgtagccatgtacacattttcaagcagctttgcatagggtttgtgggagccagtgtggacaataaggattctgtcctccaaatagcaggaatctttgctctgatagctaattactgcttctgatcatggaggtgcagccatacagtgagccattgttgcaaaccccactgccactgttacaagcccctccacttgaggctgaagtgacttaaagatttaaagggccattgccttcagtggtgattagtgaggagaaagaaaaaatattaagtaaaaacaaagggctagtgcttccctcttccccccacaccacagacacacacacacaccttttttccccctccccttttgggggccag

SEQ ID NO: 33207 - DNA, 1033 bp, Homo sapiens
gaagtttgggagaatgcagctaagtcatcatttgcgaaaagctagaaataaaaacccgtgccgctttcatgctttaagggaggtaattttgaaaaagctcaagggactaaaactaggtaagattcctttaacagagactgaaaggaaacataactcaataaaagatacataaggtgctcagaagtaaaattatgacataagatttgagacaaggtttgttcttattacatgtaggctttccatttttacaactttccatgttgtacaacacctcaaaaatttcctcaggcacgtaggtttcctgttacatatgtcttttctttcttctcactttaaagacgtacgcatagttgtgcagagcttctaaatgccaaaaacagacttattttcatttgcattacgaataagatgtaagagtagtttcattgcttcagattgatgatgtagtattagaggagagcagaagagaaacatgatgtactgtatcaggaagaagcatttgagtacaatgataaaacttggttagagagatttgagatagatctgttcatcaaacatcataaacaggctgggcgcggtgactcacgcctgtaatcccagcactttgggaggctgaggccagcagatcacctcaggtcaggaattcgagaccagcctggccaacatggcaaaaccccgtctctactaaaagtacaaaaattagcaaggcatggtggtgcacacctgtaatccaagctactcgggagggaggctgaggcaggagaatcacttgaacccgggaggtgaaggttgcagtaagccgagatcacgccactgctctccagcctgggtgacagagcaagactcaggttttttttttgtttttttgttttttttttttttaagacaatcataaacaaaaataaaaacttgaagaatttatttgtaccatgtatgtcacaaggataatatctttataagtttttaacaggtaataagaaataagctaactctccattagaaaactgggcaagagtgctcagaagataagcaa

SEQ ID NO: 33208 - DNA, 1031 bp, Homo sapiens
tctttgattatctttttattgcttgctctctggggactaccctctacaggagatccctgacgacatgggatcaaaaggcctgagtaagtgatcaaaatactcccaagttattttttaacctccatctgcagacctaccttattcagatacattttgagattcatggtagtgcctttctggcataaggaggtgtatgatttagattgcttttagaattttcatgtttatcacatgcttgggactttatttctgtaatacataactttttgtttttatttttcacatgtcatttgaaaaattctcttgctcgtaactatattttcctttttgtaatttttacgacagttacttttgctaggaacttttaaaatataaaaacttttaagatttttttaaatgtaccctcattattagaatgtagaaatatgcttccttggagttttatgttccccttttttttgttaaaataatttaaaataattttgattatgtgttagaaaagcattactataaaagtataaagcacaatagaatactacgcaagtagcagtttattgaggggataggttgtgtatctcttttttttttttttttttttttttgagaaagttataagttaccacaagagtataagaactattttgtttttcctttagctaagatgttgcctttgtttttggtttttgttgctgctgttcttgtttaattttctagctagttacttaatcttcatgtaaagcttcacacagggtctagtatgtagaagacattcaataaatgttggcatgaatgaatgaagcaagaagccattttagcaaataaaatttttaatttgcatgttttcaaattgcttaactgaaaatttaccaaacattactgagtaactttaggtgacagtgagtgatagaagtaatcttttaatctaatattttctaaatggttctttctatttagattattaaatattttgaaaacttctttgtcattcattgatcattaagcctatagccagtatcttttaactttctaag

SEQ ID NO: 33209 - DNA, 1054 bp, Homo sapiens
ctccaggcgcgtgtcactgcacccggctaagttttttgtttttgtttttgtttttgtttttgtttgtggagatgggttctagctatgttgcccaggcaagtcttaaactcttggcttcaagcgattttctcaccccagcctcccacagctctgggatgacagctgtgagccactgcagccagccctaatgattcattttagtgattcatgggtgtatacttagcacatagcaaaagtagttaaggacaggccctctttgcaaaggatggtcccagcttagaggacctcttctaaggcctgtgaagtgctgttgagtgtctctgcttttgtggggaaggtgttaaaatgtcatttcagaattcccctgagatagcttatttatgagatctgcttcatccaaatcattgtctggaagttcttctttaagagctttttaaagtagtagtagtaagatagccagcaaaaatagttaatgagatcataaagaaatgtttattataactagttaattcattttaagtcgattatgctgtaataaacatctttttcttattagttgaatttatacctatttcgtaactatttctagacctttatttatttacctgtttgtagaagttgaaaagtaatattattaaattataatcaagatttataattatgattttcgggcttataactgctgttggctgtatccatatatttagcatgatccaactatttggctagatctttcagttgatgacaaatcctcttttagcaatgcagcaatcagcataacttttttccagaaatagaacatagtctgctttaaattcggaaatgcttcctctatgccttgttgagtcagtagaaaccttacatcttaaatatcaaggtcagagctcctaaaaattgtcttggttcttggagtctcataccttacaaaggctttctgtgcctacacccaataataaacactgttggcttcactggagagatttttttttcattttgtacaaaaattctataagattgtgttttaaagcaagcaataatgtaagaaagatatctt

SEQ ID NO: 33210 - DNA, 1039 bp, Homo sapiens
aagaaaatatattgccaatcagtgttgttttttattattgattctctctgacagtgtgcctttcaagaattggaatattattgtattaataattttattaatgaaagttatgtaatccttgaataatgatgatataataaaggaagaaatttctgtggaccagaaattgttttcagattgatgtgttagtagtgactacaagcttgatgatatcatgtctaacacttagatttaacctctgtccttttctaatatattttccattcaagtaacatttaattacctggcaatttccatagtagcaaaggaggcatatgtaaataataatttaaaatgtgaatagcctcggtaaataatgcatatttggaaaatttctacatgcattttttaaacacttgggagaaggcaaatatgttattttcctataatatataaaggttaagtggcaacataggtctaataaataggtgatattagtatataaactggggtgtttctttttttttttttcatttcgttggcttataagacttaaaacagaaatccgaatgtatttgtattctgtatacttttagtagaactttaactgataactttattatactgttactgtaacattagcactgtaagtaatctgaaccattctttataaattatcatctcagtcgtcctgattctgttgggggacctgttcctaatacgtttcatttatccttctgatgagagagatatgttacatatataaacatgtatcctatacacgtgtatctatacacacaaacaggtactctgtacttgtttacatatgatatgacttactgtcttcacataatcttactctgatacatcatgaaagcaaacctttctcactttcttctttctgttccttttgtcttttgctgtacttggtacttataaccctaccagtgatgtgggaatcttaaatgcatcagatttttttttcccttcgccaattctagcagtactcattaaactcttgtgttccaaagtcattaaaagtattttatatatacaaata

SEQ ID NO: 33211 - DNA, 1025 bp, Homo sapiens
tcaggagtttgagaccagcctggtcaacacggtgaaacccctgtctctactaaaaatacaaaaattagctgggcgtggtggtgcacgcctgtaatcccagctactcaggaggctgaggcaggagaatcacttgaacccaggaggcagaggttgcagtgagccgagatcgcgccactgcactccagcctggatgacagagcgagactctctctcaaaaaaaaaaaaaaaaaagaaagtacaaaaaaagatagtagatttaaaactgaatcgcccaaaactcctcctctccctcaaaaaaattaggaaagccaaaccaaaatttgttaaaaatctacaataaaactagacaaaaagatgaaagatatcctatgaaccccaaatataagctgatgtaaacaaggtattaacagctacaagaccatctgatatcagcatctgtgcaaggggatgcaacaggagaagcccaatgttaaccagtcctcacaagaaaatgcagtaggtaaatttgagaacaccaagtgaactataagagtttttgtacaatctgcatgttgagtgcaaggaatctacactaagatatgaaggggccacgagcagtctgggccctatgacacagttaaccagctgtagttccctttccatttaaagccccacactaaggaagaactgctgggaataaaatccaaattgagtaggatagggataatagagccaaaggaaatagaaggttcagattaatgggggtaagtaaagtttcaggaaatctcacagtgtctgaggtcatgtctttaaacacttgagagaaacaacaaaatagagagttctagagctgtgaagttagaaaacctatcttgactcgtaactcctatgtaaaagttggggaaaactaatttcatattaaaatgagcagtaggaaaagatcacagtcaaatccatggaaacctatttgaaaagtgaaaataaggattagcgtaatgtctccacagtcaagctgtaccagaaagacatatagtttatgaagctag

SEQ ID NO: 33212 - DNA, 1050 bp, Homo sapiens
taatcttatatatatacatacaagacagacagatagagacaaaggtaagcttttggtagaattaagttttttatctttcaggatctatggtttgccttattagtcttccaaaaaagtacttttatgggtttttcagcttgtgtactttgaactttcttgacttggattctgattatgagaaaaaataatctctacaagacatatgaaggaacattatcttctaactcctttcagttttattaattccaaaggcaaggaataattcactttggggggcctttactgttaatctttttggagaatcattatcagaaattagctggacgtggtggctcaggcctctaatcccagcactttggaaggcctaggtgggaggattacttgagcccaggagttcgagaccagcctgggcaacatagcaagatcttgtctctgctaaaactttttttaaagttttttaattagccatgcgtggtagtgcgcacccgtagtcccagccaaggcaggattgctatgatctcaccactgcacttgagcctgggcgacagagtgagaccccgtctcaaaataaaaataaaaataatcgaacatgggaactggaaatataatactatactcgttttggactccatatcccaaagttataaagttttatcacatacttcctatagtttaagaatctcttggccaggcgcggtggctcacgcctgtaatcccagcattttgggaggcctaggcgggcagatcacgaggtcaggagatagagaccattctggctaacacggtgaaaccccgtctctactaaaaatacaaaaccaaaattagccaggcgtggtggcgggcacctgtagtcccagctgctcgcgaggctgaggcaggagaatggcgtgaacccgggaggccgagcttgcagtgagccgagatcacgccactgcactccagcctgggcgacagagcgagactctgtctcaaaaaaaaaaaaagaatctcctgtgatagtatataatagtaaaactgtacgccatgcatgatacgaaccatgttatgttt

SEQ ID NO: 33213 - DNA, 1063 bp, Homo sapiens
gaatgacagcatatctgttgacagcatggtttactgaatattttaagccaactattgagacctgctgctcagaaaaaaacaaaaaaaaaacactcctttcaaaatattagtgctctgagacaatgcacctagctgcccaagagctatgatggcagtgtgcagggagactgatgttgttttgatgcttactaacttgtcatccactctgtagtccatggatcaaggaataattttgactttcaagtcttactatttaagaaatacattttataaagctatagctgtcataggtagtgattccgctgatggatctgggcaaagtaaattgaaaaccttctgcaaaggattcaccagtctagatgcctttaaggacattcatgattcatgggaggaggtcacaatatcagcattaacaggagtttcaaagatgttgattccagccctcttggatgacttggaacaggtcaaaactttagtggcagaagttactgcaaattggtagaaataataagagaactagaattagaagtggagcctgaagatgtgactgaattgctgcaacctcatgataaaactttaacaactaaggagttgcttcttatagataatcaaagaaagtggtttcttgagatggaatctaatcctggtaggtgaagatgatgtgaacattatcgaaacggcaacaaaggattttgggatattacataaacttagttgataaagcagcagtagggtttaagagaattcacttcagttttgaaagaagttctactgtgggtaaaatgctaacaaaccagcatcacatgcttcagggaaatcttttgtaaaagaacgagtcagtggatatggccaactgcatttttgtcttattttaagaaattaacacaggcaccccacccttcagcaactaccaccctcagtatcaaggctatcattattaaggcaagatgctccaccagcaaaaacattataacttgctgaaggctgagatgattgctagcggtttttttttagcaataaagtatttttaaattaaggcctgtacattgtatttttagacata

SEQ ID NO: 33214 - DNA, 1021 bp, Homo sapiens
attaccaaaattatcacagggggagcagccgcccaagatggaagattgcggtatgttttgcgctttttattgtgatgctgaatccactttgtgtatttttcttgaagcagactggataagggataaatacaaataacaaacacgatcatgataactagcatagggtagatgctttaacaacattcaagtcaatgaatgagataattatgctctaagcattgtgttcctgttttcatttagactccagttttatcttagatattataacattttgaataacaaatttggttgatggtttaaatctttgtgagcatatttatagaaatcatgagtttccctttgtgttttcagatacactcacagaatattttccatttcctctctggctgggaaacatgtgtataaacttatttaagtacactcacagaatattttccatttcctctctggctgggaaacatgtatataaacttatttaagatacggaggatagaggatcacacatccatgttgaatcccacaccacaaagactatatgcaaactttaaataatatattttcttattgactagatgaaaataacatttgtctctgtttaaatttagtgttccattttggaagatatattttgcaaactttgattttttgagggtcataaattatgtcatttttcctatttccttgtttgttgttcaaataccctgaagttttaggactaaagagtttatgtagtctgttaaaaacagcatcttattttaaggacgttgatgccttacgcagtttttgaatttctaagctttataattctcactgggtatgacaggtggtatattaatgaaatcaaatagatataaaaattaatcatttgaccattcatgtaaatgtagacatttacttcctgattctgttagatatagaagcttgtcaggaccagttttaatattttaattatgttttgtttaccctctctacccaatttgagatgaccatctttttttcctggtggaataccatgcaatca

SEQ ID NO: 33215 - DNA, 1068 bp, Homo sapiens
cgctttacagtgatggagaggatgcttaatgcacgtcaggtactggcacataatcttagccgcccatatttttagtgttatctcatatttctctgagacagcaaactaaggaacaagttttgttttgtttttttaaatgaggatatttattgaggatacacacaaaaaagacctatttattctgcatagcttcactttaggttttaaatacactacggaagttcatgaaagatagttttaccatttttgttgtgttatgtgagaagccaatgagtgcacctcattttccagaataagtgtgttcctaattagtgaagtacaatgtgtacattataaaattaaaataatggactaaaatatccgtccccaagtaaaatttaaaatacatactaacatataacccaatttcaacatattaagtgaatatgtattcttaaaagatccactactttacatttagatgcgttaggatgtattagaaataaaaacagaagaaaagatttagaatctagtctgtctttgccactcaagctagttaccctctctgagttttatacccccttcatctattaaaatggggggtaacgccaacctgactcctttaaaatgagtttgagagtcaggcaaattagaaagatacatagatgaaaactttttaaaaagtatatagtctttcatgatttgtagaacacttttatacttttcagagtactttcacattgatcatattgtttgtactttatgaaagtcttctacaaatcagaattatgcttattatacagagtggcacagataaaggtaatatttaatggctgcttaatattgcagaaagaacgtggagtttatagtcctacccgactccaccacttcctagcttcacctgtttctacgtgtgatggtgtggaaattactcaacttctgagagcctcagtttctccacatagaaactgagtacagagtaggtgacagttactagttcttcttactgggagtgtaaacacataatctctgtgatactagcctattaaatccagaggcttatttgcaccctagagtaaatactctgct

SEQ ID NO: 33216 - DNA, 1022 bp, Homo sapiens
aaaatacaaaaaaaaaaaaaaaaaaaaaaatagctgagcatggtggcaggtgcctgtcatcccagctacttgggaggctgaggcagagaattgcttgaacccgggaggcggacgttacagtgagctgagattgcaccactgcactccagcctgggcaacagagcgagactccatctcaaaaaaaaaaaaaaaatcatacccattgtgtgtatattatcacgttttgtgtatccgttcatctcctgatagacacgtggtttctttccgccttttgactgttgtgtgtgatgctgcattgaacattggcatacaagtgtccaagtccttgctctcacttttgggaatatgcctacccagtgcatatttacctacccaattgctagatcagatgctgattctatggttggtttttaagaaaccactaaaagtttcctcagaagctgtaccattttacatttcccaccagcattgtaccagagttccagtttctccacatccttgccaccacttgttactttgttttttgttttgttttaattagacacttcccttgtagtggtgaagtaatctctcattatagcttttatttgtattaccctaaggactaatgatgtcgagcatcttttcgtgtgctaattggccacttgtataccttctttgcagaaattattcaagctcttcacacattcattaattgggttgtttctctttgtgttgttgcgttgtaagagtctttaaatgttctggatattaaacccttatcaggtgtatgatttgcaaataccttctcccattgtgtaggctgtcttttcacttgcttggtaatgccctttggtgcacaaaaggttttaattctgttagagtctaattgatttttttctttcatcatttatgatttctaaggttccattaccaaatccacggtcacaaagattaaccctatgttctcttgtaagagttttatgttttcaaatctcatatttaggttgttaatcaattttgagttaatttttatatataat

SEQ ID NO: 33217 - DNA, 1029 bp, Homo sapiens
attcaagttatatacctttggtagaaatatcctggaagtattgtactctcattacattttatcacatgatatatgattttgatttttcccgttactggtggtgttaactttgatcacttgattcagatattgtctgcagatttctccactgtcattaatgctttgaaaggagacacttttgtatgagtatatcccattcatccactggaatggacgtttcacttggcaacaggaagttttaatattcattaatatttcttgaatgaattactctattactatgatggctgccaaatgatgattttataattccatcattacatttttagttagcattttgttgtaagaaaatgctcttatcttcatttatttattgatgtatttatttatatcagtatgggctcccagattcctattttattcagtggatgttatgccattgttatcattgagttacagattgttcccagtctggccagtggcagcccttcaagccaacttctgtgtcctttgtcatcctctttgagtacttcccttatcttctggtacagcaagatgtctacacacatcttgtgcttgctgagctctagcactggagtcagccatttcttcaaagacccatggtttggttttgtttggttttgtgttgtggtttttttccccccgagacggagtttcgctcttattgcccaggccggagtggaatggcgtgatcttggctcactgcaacctctgcctcctgggttcaaagcgattctcttggctcagcctcccaagtagctgagattacaggtgcccgccaccatgtccagctaattttttgtatttttagtagagacagaatttcatcatgttggccaggctggtctcaaactcctgacctcagatgatccgcccacctccgcctcccaaagtgttgggattacaggcatgagcctccgtgcccggccatgttgtgttgttttaaattgcagaatgagtatttagaaatcaagatttggatgccaggtgtattcgtgctgttgagct

SEQ ID NO: 33218 - DNA, 1026 bp, Homo sapiens
cagtcagttcaactttagtaaaaataaaaggacgagaaatggtctaaaaacaagttgagaatgcatttgtcctctgacatcagtgatatttaaattaggaaaatacatacatacacattccttaggaccttttaaaataaattcccttaaagctgtcttttaaagaaaataatagaagcagctcaataaatataaactataactgtcaacagttctatatttctttatatgttttttataaatttctttactgtttttggttactagaattgtcttttaatggtgttgatttaaaataacatcagctttcttaagtaagaaattctacttacttttctcaaatatttgggagaaatggaattacctaggaagggggagtcattatgtaggcattgaggttaagttacaatcaaaacttattgaatgggcaacgattgatttaactcttaaattgaatactgccccaagaattttactaaccttattttgactgcaattacatatatcacgaaaggatgcaaagactaaaggttgacaatgttattcattgtagattaatactagatgatattttccattgtcaacaagacagatatctttagaactttttatatatatatatggtttatgtaaatgcacacccttctatatatgtatgcacagataacactagcattgatatatctgtcactcggtttattaaaagcaggcaaatgaaaagacaggaaaagtagttcatgtataaagtgttgaaaccacagagttacgttatagccgcttgggagtaggagcagaacgttgctgtgattgcgccagaagagagtcatgacccctgttcgcagtcagctctgcaaagccattttacatgacagcccccacccagtttggttcagagcattcctgtatgctagtatatgagttattaatagtttttatttctttcagacctctttcctgattctcatcttgtctttttcattacctttctattttatttctagaaataggagtattagggtagaggtt

SEQ ID NO: 33219 - DNA, 1104 bp, Homo sapiens
gattaatatgacaaaacccccctttctgttgttgttttgttttgttttgtttgagttgaagtctcgctctgtcgcccaggctggagtgcagtggcgcgatctcggctcactgcaagctccgcctcccgggttcacgccattctcctgccccagcctcccgagtagctgggactacaggcgcccgccaccacgcctggctaatattttgtatttttagtagagacggggtttcaccgtgttagccaggatggtctcgatctcctgacctcgtgatccgcccgcctcggcctcccacagtgctgggattacaggcgggagccaccgcgcccggccgacaaaacccttttagcagccatctccgtatatgattcttgtaattaaatgcaaggtgatcaatcttgggatgtgaattggaacgcagactggcctttgggaggtttacaagttctccaggtgtttctaatgtgcgggcacagttgcgaagcattgtgccaccactattacggctactatagttgacccttgaacaacacgagttggaactgcactgctccacttatatgcggatgaaacaaatgcagatttcaaacaaatgcaatcaaacataaaagtatttgtaggatgcaaaacccaagtatacagagggctgacttcctgtaagtgcatagctgacttcaggacttcagtatgtgaggatttgggtacagtatgcgaggattcacgggggactagtcctggaactagtcccccgtgaatgcaaagcttgaggtattttcctgcactactgtgctatctgtgttgagctattaatatttacaagtaaacttctgacatcatttgtcgaatcctccttctagagtgagagacttaaattgatagtattgagagagaaagcattcatactttaagattttcactgctttcttaatctgattcatttcttccttaattttctgaccataagagatgagaagtcagttttttggtatctgctttaaattgctttttctttacatatacttgctttttgtttattctgacaatgataaaggattatgtccctcacagctttttaaagaaatattttatagaggcttaaaggag

SEQ ID NO: 33220 - DNA, 1035 bp, Homo sapiens
taccagccttcttttctagtagtattcttttataaatgtttcttgaaacagcatttttaaatgtatcccacaagtttgaatatgtaatgttttcttattgtatttttttaatgtctgatgtgatttgttttttgttagcctcgtgagttacttagaagcgtgtttaattcttaaacattagagactattccttccattttgtcttttttgtttttgtttttctgagacagggtcttgctctgttgcccaggctggagtgcattggcagtcatagcttactgcagccccaaactcctaggctcaagtgatcctcccagctctgcctcccaagtagctgggtctacaggcacatgccatcatgcttggctattttttttgtttggtagagacagggtcttgctctgttgcccaggcttgttttgaactcctggcctcaagtaatcctcttcccttgacctcccaaagtgctgagattacaggtgtgagccactgcacctggctcatatcttcttttggattgtattttctcatctcactttcccttattactagcttggaagttaaaaattgtttctcttcctttagtggttattgtagaaattttaatatatgtttaacttttaaaagtctaaagtaaataaatgccattcactcttactccagacaacataagaacctcagcacgggtaaagccctaacactgcttgttgaatgtgctgttcttgtcagcctgcttttatcttgattgagttaatctaatttatttattatttttgtccaaaaacactcccaggatatgtataatttttttatttctgatgttttgaatttccggtcatccttattgttacaaaccaaccaaagccaatttgcacatggccaactctggtcttttggtaggtattttagtagttattttggtgtgtttgcagattatgacacaagcagacatttaaacagtgagccagcatgcatattttatgtagcctattctttaaatctcatgaaacctcagctttccgttgttgcctaaaa

SEQ ID NO: 33221 - DNA, 1032 bp, Homo sapiens
ctgtgtcctttctggttttgataacagggtaatactggcctccattcctcaacacatgttaatcctcatctgtttcaagaattcatattaagcctcactgctccttttatgttaatgtgttgctgtttttcttaaaatgaagtatattggcttgcatggaacaatatgtggtaccaaatatttcttttaaatttactactgaaataataagtatttgaggggtagatagggagatatttgcacactaataatatttgttcaactgtctggtattgatttaagaaccttgtactaaatattttattaaatacttagtttttggccttaattttagttattttggattttctaatagattcaggaatctgcatcatttccataatcagaaaattgtttctaaagaaagatatctggaaattatctaacaggaatgaagtagtaatttagtcacattcctatatgtaagtcatagtagtgagtaaaataatattgctgatattgttaaccaagattaagggcagtgtaaagttttatgtcaaaggtagtggcctgaaaaacataaaaaaggatgaggaaatgtgtttagaatgttcttactataatcatttaaaaatatgtttcctccttcatccctaaccctcatcacactttgtaattctttttagtataagtgttaggtaagttagacttggaccatccttagggaggccttagttttctacattctactttattggcaaactggttttatatgaagttttcagtgttacaaaaaattggaaataggctgagataaacctttagataacaagaaatacagatgaatattgctgtgtaatgtaatgatggccctgaaagctacttggaagtactttctcaaataataattgtaatgaacccaaggtttctcttttttgaataattacaggttgagcatcctttatccaaagcacttgggaccagaagcgtttcggattttggaatttttcagatttggggatatttgcatatacataatgagatatgttggga

SEQ ID NO: 33222 - DNA, 1091 bp, Homo sapiens
taaattgtttgcttgttcttgttccatgcattagagagagggctggagggttttgtatctttttcttagggactaagaagtttttaaatgtgtttgtgaaattagtcctttggatttaagttacaattttttttcgtattttttaacgttttgacttctagtcaaatttatcagtctttttttaatggcttctcagtattatgttacagctatataggtctttgttatagttataaaagaatttctctagaagaatcttgtgttatagtctcatttaaaaaaatcttcaggatatttttgttgtagctacccattttcccccttgctatttattgaataatcttttaaccaatgatattggttgaagatataaactttattaaaaatagtaccaaatttctatttatatgccgattttcatctttgtttcactaatctttctgttcttgtaccagtaataccatatattaatcaaggttttataatagattttaaaatttgttgaagattgtgcacacttactccttatctatagactttctttttttcttgctggttttttacaagaatttcagttacctcttctaattcctgcataaatatttgaataaatgaataaattttctgttggcctttttattgggattatgttaaagataaaagtatagataaacttaggaaggagatgatatctttgacttgattctttctgccaagaacgtggtctgtcttcttttcatttggtaaagccggacatttggatactttggttttattcctgggcattttatcttttttgtttctatttcagatatggccttctatttccttgtaccatctaattgcttattattagtttaaatcagagatttaactttgcgtaaagtttgtgtaactttgcgtaaagagcagactttgcgtgaaggacaaactttgcgtaaagagcaaagagcaaactttgcgtaaaggaccagatagtgaatattttagcctctgtgggccgtctgcttcccagctccgccaccgcatcacagaggcagctagaaagcagccatacatcatacatggaaatgagaatgagtgtggctgtg

SEQ ID NO: 33223 - DNA, 1020 bp, Homo sapiens
cccacctcagccccccgagtagctgggactacaggcgcctgccaccatgcctggctaatttttgtattttttgtagagacagggtttcgctctgttgcccaagctggtcttgaattcctgagcttaagcgacccgcccgctcggcctcccaaagtgttgggattataggtgtaagaccacacctggctgtatgttagtattcttacaacaaaatgtaatcagttgtatggtatttttgctaaatcaactttgtaagcctacttataacagaaatgtccacattattgtgggctattctttgccagacaaattgatggcaaattcataggtatctaatgtcactgcttaattcctgccgtttcaaaaagacagcaaataagcaaaccacagcattaattcttcacgtaatttaagaaaaatagtgtttctctaactccattaatcatttaaatcccatatggttctcttacagcagtgtgatctagctgcatttcttcactgttaagaactgttaggcgcttctgttggagatagtttctaatgttgaaattatcagtgaatgttcattaattcttcatgttgaagctgtcaccatggaaacttaggtgttatagcaactagttatatgctataacttacttagcattaagatgattaaataacatactatatgtaaagcagttggaagaatcatggaaagcaatgtcatttcttagcagatactactatcattttattcttgttttttggcaagtgtgaaaattaaattcaaatattctttaagatgtatacttctggtcttgagatgtaacatcactttgtgatcttacctaagtcctctgctctgtaggaattacaattgtttacataaagatgctattactatctttggtatgaaactcaaatatttatcaatagatttaccatgatgttttgaaaatcagtgggattggggacagtgacatgtcaaaatcatctaggaattaaaaaagaaaagcacaacactgcttatttaaacac

SEQ ID NO: 33224 - DNA, 1011 bp, Homo sapiens
tcaaaaaaagaatttaagtttttaaaaaaccttccaatagaagtagttgaaaaatgatagttgctacttttacttggcagttcttctaatccatgaatatggaccatctatttatttaaatcatctttaatttctattaataatgcgtttataactttcagtgtatgagtattgcacttttattacatttattactaaattttttatgcttttaaatgtttttgtgcatggaattattttcttaattttgttttcagattattcattatatgtaatcataatttttttattttactcttgtatcctgcagttttaagttttctgacgattccttccttaggattttctacatattttgtaattacttcttcctttccagtcagttatgctttttatttttcttgcctgattacactggttagaatgtccagtacagttttgaataggaataatgagagtgtaaatccttctttgtttctggtcttaaggagaaagcatcgtctttcaccattaattatggtgttaaatgtaggttttttgtaggtgccccttatcatgaatagttgttggattttgtcacgtgctttttctgtggagatacttagtagttctcaaatttggcacaaggaagcttttcatagttttttttttttttctgccagatagatggtaattttaggatcaactgtgcgttgcatatcatgtagccttaaatgagaaccacggcagataatttaataccatttgttgaacaaatattcatgaagtgcctgcaggatgcatttctaacaagttcatttgcttctgatgaatgttcaagatttggatctagtaggttagaggtcagagtttcagacccatgataacaaagttttgtttcctccatgaatttattttttaaatggttttaaatatttaagcatagagctataaacctaatactgagcccagttccagctttttctaaaataatagttttctttttgttaccatgagcagtatcattagcat

SEQ ID NO: 33225 - DNA, 1034 bp, Homo sapiens
caaaagcctaaaagagcttctattggtgtctctcttttttggcacaaggtaggtctgtaccattggcgtttctgggttgctcatttcttcagctgaaatcctgggatagtctgaggtaaaaaagaaaactcagggactgactgccgtgtcttccttagggttctacattcctagctagtctgccaccctcttttcacctttcagtcttatttttgttttatatataatggccaaagattttagttgtatgtagcatgtggcataggaaagtgtctacgctctctttcaattggaagccctcattgtctttaaaagatatgtttatcttttttttctagttgttatggtacaagccattgtctgtgtgaccttccacattctgatctgagcaggagctcccagacgctagttattgtgggttgtttttgttttttgcactcttaaattttagtcaattaaatgactgcctgtttgttctccagtatgtaaattaaataacctttcctaattcatagtttggtagtaacagaattcattatggacagcaaatgatgtttgaataaaataatatatttattttgaaagatgaatattcttgaataaaacagcaaatgttaacagctaaagtatacttagcatttgttgatctgcttcctggtaagatttcttcccccatctgattatagattgtctaccacctccgttacttggtaaaactgtgaaaatcgacttttcttgactttggttctgcagctgtagctttcccctgtccccctttagggacaacccacctttgaaactaggtctagtgctagtggagagaggtaatgtgattgggcgttgagtcccataaacactgagctgagtagtttggactttatcccataggcaatgtagggccagccaaatgatcattttgaacagtagttcaaataaagttgttaatattcacacagtgtttgatggtctttattttatcttgtaggtcacctgatgtattttttttcagcgtgaagaacttctttaacatttct

SEQ ID NO: 33226 - DNA, 1039 bp, Homo sapiens
gttaggtaagtttgaagaagaaagtgtgtaaattcaagaggggaaaattgttaggaacaaacagtttctcttcaaagggtttcaccccccttttcctttgttctattacataagtagtttttcctgcctttaacaggcccaggcatgcctccatccaccaaccttgtagctgacccatgccgccttactcgaagttgttaggttcaaacaatgaatttcctggttctttttccttttctaaatgctaaatctagtcagtcggaatcagtttagattgtgtggtcctaccctaattaactgggggaggacacagaaacaggaacggcattgggaataaaaacccctgctttcctttgtttggtgtgctcttgcgatcgtaactaacgcaggcagcacccttctgaaatttgccttgctgagaagtcttttgtttgagtgctcattttctttgcaactctgagctcttatttctaacacaaggcatcctcttgcctaattcttcaagcagctgggactacaggcatgtccagactgcaggatcttgaactcctggtctcaagcaatcctgctgtgacctcccaaagtgctgagattacaggcatgaatcatcatgcccagcctatttctacttttttgatgcaggtgtttattgccataaacctgcttaatactgcttttgctgtattccatagctttggtatgttgtgtttccattttcatttgtttcaagtttttaagtttccttctgaatttcttcattgttcaggagcatgttgtctaatttccatacgtttttgaagttcttgaggttctttttattgatatgtatttttattctttttgtggtcagaaaagatatttgatatgatttctatttttttttttatttgttcagactcatggcctatgataatggtccattctggagcatgttttatgtgctgataaaaagaatgtgtattctccagcagttgggtggaatgttctgtaaatgtcagttaggcctattaggtctagtttgtagtttaactccagtgtt

SEQ ID NO: 33227 - DNA, 1031 bp, Homo sapiens
ctgacttcaagtgatctgccacctcagcctcccaaagtgctggaatgacacgtgtgagttcattttctttagttagtgttttatagttttcctgtatagatctttaacttctttggttcaattgattcccatacactttatattctttgtagctattataaatgtgattgctttttaaatttctttcttctctttttctttttctttttttttttttgagacggagtctcactctgtcgccagggctggagtgcagtggcatgatctcggctcactgcaacctctgtcttgcaggttcaactgattcccctgcctcagcctcctgagtagctgggattacaggtgcccaccatgacgcccagctaattttttgtatttttagtagacctggggtttcacaatgttggccaggctggtctcgaactcctgacctcgtgattcacctgcctcggcctcccaaagtgctgggattacaggcatgagccgccgtgcccggtgctttttaaatttcttttcagattgttcactgttggtatatataatgctattgatttttcatgttgattttggatcctgcagctttactaagcatatgtatcagttcttacagttttttttggtgaagtctttaggtttttctaggtatgagatcatgccatctgtaaacaaggctaatttgacttcttccttttcaattttggtgccctttatttctttgttttacttcactgcttttccagtactatatgaaataaaagcggtgaaagtaggcatttttgtcttggtccagaccttagaggaaagaccttcaatttttccccattcagtatgatgttagctgtgggtttattatatatggcccttttaattttgagctatgtttcatctgtaacagtttgttaccggtttttatcacaaaggtatattgaattttatcaagtgcttttttggcatctattgaaataatcatggtttttgttttcggttctgttaatgtgatgtatcatgtttattggtttgtgtatgtcaca

SEQ ID NO: 33228 - DNA, 1041 bp, Homo sapiens
gggataatttcaagttcttcagatacagattacataaagaagattgtagggcacgtgacagactctggtttcttgtattttagatagtagaaaaattgctacctctaagaatggatcctggagagatctagttacagttataacttcttcatttatggttttatctcacagctttatttatttttatttacatgttttgttcaactaggcaacttaaaatagttttgctttatgtataaaatattgtaatggtagagtaatggattgcctgtgcattgtaaccacaaaggtaagatataatatgcttttctgtatttcattgttagtgacagatgtgagagaccctttgttcagtgtcttttaaaaataaggtgtaaccattgttatagatttgaaaatagatgtgtgaatccatgtgatgcttagtttatatcctttagaaagggcggtattttgaaatgtgttttagatagccaaaagcgtgttgcacagatgttttttccctgagatttacaggaagcctttctcccagcagcaagggtctgtaaagtcctgattatatttaaatcttctcagtgtattctcagagctactcttctcccctttgtgtcccaacatgccatgctagttgaaagtataactcgttttgagagcattttctggactcttccatctattataattatagttaattttttgtttttttaggaagaggaaaatagtcaagtgctgattgtgttgcctttagaaagatgttgatgtggatttaaaatgattagacttgtacaagcactccttgaaagtacttgttttgaagtctgttttgctcattgtgttcaaagtgcagcatgcttcacttaatctctaagtttggcttcttttatttttgagcaccagtttgcagacattgtgtgatggtgttatagattcagcgtgcttacatttaaaattcatccattggtttttaaaatatggaataatttacctttttttatttctatgcacttacgatgtctcatagtgattgctagacaaacttgt

SEQ ID NO: 33229 - DNA, 1096 bp, Homo sapiens
agttttaaattggggttcacacaaccccttccttgggtttggttaatttgctaggatggcttacagaactcagggaaatgcgtttactagtttattataaaagatgttataaaggatacagatgaacagccagaaaaagagatacatagggcaaggtctggaagggtcccaagtgcaggagcttctatcctggtagagttggagtcctcagccttcccagcttgcctttgccaacccaaaagcacatcacatgttgttaagagtttttatagagcttgatctccagcccccaacccctgcccctttcctggaggttggtgggtggagctgaaagttccagccctctaaccctctaatcctctaatcccgtggtctttctggtgatgagcctcatcctgaggctttctaggggtctcactttaagttacctcattagcattagctgtgatccaaagggcttgtcatgaacaaaagaagaccttcccattacttaggaatttccaagagttttaggcactctgacagaaacaaagaccgaatatatttcatattataccacaatagatctatagctgtagctggcatttactgagcactgttgcactatttattgccactattgacctaacaagtcagcattattctaagtgccctgtgtatattatttaatcctcacacaacagccccattagataaagtaaggtaaagtcccattgggcctgtctcaagtataccctgttaggctttaaataaaaggctgtaatttgatacatactaataatagtaataacaacattgataatgcttactatttgataggttctaccaaatggtatctatgtattaactccttttcataacgcttaacagtgaaatgtggtttagtctgaaagttgttagtgcagtccatgtgtatttgaaatgttaggaggaggaatggggtataagaggcaagtaggaacagttcagttgtttgaacttgaggtcattcataatatctgtaaactgtgaggaaactttgtggacaaaaattgcagataatactcttccttattatgcattaaaaatttgttagaaaatttcttggattttaaag

SEQ ID NO: 33230 - DNA, 1025 bp, Homo sapiens
tttccttatgttatttaactcattccactaatccttgtatttctggtaagaggaagttaggtgtaaaggttgatgagactcgtttttggtaagcagacctcacagtgatacacagtgttgtatttcatattgcatcatcaggaggctcacaatatcaggttgttgctcttgtggtgctgagttggattgcgtaaaggtggggacctccagatcttccacgggaaaggtacgtttttcttgttgatattgtgaagtgtgtatggggttgtactttggcaccttgtagtgagtcagtttccccccattggtgatcattgccaaatcactacatttgaggtttcaaaatgttatttttctccctaatttaatcattctgtttgtagttattagttggcattcttctataacactctttttcttcatcaactagggatgaacttctgttccttctaaaaagacaggctaaagtttacattactttcttttaatgatcagttatttgagtagcttgtgtgataatcccctccagaggttgctaagttccccctttttcttgatctctctctttacaaagttatcactgtataccgagaaatttttatttactaaatgtttacatacatttaagtttgggtgctcatattacttcatatttgactagacgaatcacttgaaggagtatctgtgttttcttaggatatgctttactagtctttgagcatgtccttgccttccaacaattttcccaagtttattttgagttttcactgctcctgaactagaatccacgcataacgatggtttccatttttctattcctaggggttgctttttctttgaggtgttatttttgagaggtaagaaagtggacaggcaggtgacacattcttccaactttagccttttgccccagaactggtaaaataaaatttgagaaatatcgcgtgagaagaaagcacatattgtattcattttaaaatattaatgcaaaatattgtattaatagtttacaatattaatatttt

SEQ ID NO: 33231 - DNA, 1043 bp, Homo sapiens
catttctttaaacagttttttgaagactgggtctcactatgttgcctaggctagtctcagactcctggtggtggtctccagcagtcctcccacctcagcctccagagtagctgggattacaggtgtaaggtaccacacccggctctctctcttaattttaaaaaataacacatcatttttataagaacaactctattctaaaataagagtgagttagttttagagattataagaaaggatatagacttaaaaaaaagcaagagtaaagagtaggaggaattgcctgatttaatgggatatttcagtagaaaagggttgatttataaggaaggatagatgactcttaaaaagatgaggccaggcctggtggttcacacctgtaatcctagcacttttggaggcccaggcaggtgaatcacctgaggtcaggagttcaagaccagcctgagcaacatggcaaaaccccgcctctactaaaaatacaaaaattagccaggtgtggtggtgcgtgcctgtggttccagctgcttgggaggcagagacgtgagaatcgcatgaacctaggaagcggaggttgccaaagaacccaggaaggcaagatcgtaccactgcactccagcctgggtgacagggtgagactccctctggaaaaaaaggcaagatgaaagagtaggaggaatttcctgatttaatgggacatttcagtagaaaaggatgcaccctactcctaacatcacaatacatttcaactagactagagattcaaaggttaaaaaaaaaaaaaccataaaagtaagattttggggctgggcgcagtggctcatgcctgtaattccagcactttgggaggccaagctgggcagatcgcttaagctcagaagttcgaaaccagcctgggaaacatggtgaaactccatctctacaaaaaatgcaaaaattagctgggtgtagtggctccctcctgtggtcccagctactcaggaggctgaggtgggaagatcgcttgagtcctggaggtcaaggctggagtgagccaagatcgt

SEQ ID NO: 33232 - DNA, 1371 bp, Homo sapiens
taactgctacttacagcttcggaatagcgggaataattagtgttaataagtttttataattctagctgattgcaaagtcatttgatcttttaaattatcctgtgctattataaataaatttatcatttattttagagttttgtcatgactttaactgattgtttctaaagtagtataaaatatttaatttactattataaaatattcagactagaggatatccgaaagcccttctagttctttgattttaatttcctctttttttttggctttggctttggctagaagggcaattaaaaccacttgagggatttacattcccagcttagatattggtggtgaacggtaataactcctatctgtagaattcacagtaatgatattagctaccatctgttaggagcctattctgtgctatagtgctaggcatcttatatgtattatacttgagccttgaaacaattcacagtgctaagaggcaagttaccagaggttaagtagtttgcctgaacttgtagctagttggtgatggagttgggatttgaatcaagtgctgactttgaagtgtaaaaagcctatgaattttacactgtgccctgcaggttctgatatgattgtgatataatgaaataagataatattcactgtttaagtacattatacgatgggaattgatttactaatctagagtaaaaattgtgcttttgagttatgttgttatagcattgcataatttagttagaaaatataaatacttatgaatttttattttccttcttctagatattcaagaattttatgaagtgaccttactggataatccaaaatgtatagatcgttcaaagccgtctgaaccaattcaacctgtgaatacttgggagatttccagccttccaagctctactgtgacttcagagacactgccaagcagccttagccctagtgtagaggtgagataaaaaatgtgttctgaagctgttttttggtgatcaatttatttatgttactatgtttctttattttattaaaataatattttatacaagtggattttgttatggaagtataatttataatagaataaagagaatggggttaaaaatatttttgaaaagcaaagctcagattctctgttgcccctgttttaaaatgttatgaatgtttgaagtctgaaatacttgatttagactattaaaaaattctttgcatgatagacctcaacaaggcttcatctgtgtggtaattaaaatggaaatggtactttgaaaagatggttttgctctggtattctttcctagaaataggatatagttttgtggtctgggctgctaagttgtacccatttacctcaaggaatctcttctttattgg

SEQ ID NO: 33233 - DNA, 1027 bp, Homo sapiens
gcaacctctgcttcccaggctcaagcaatcctcctgcctcaggctcctgagtagctgggactacaggtgtgagcccccacgcctggctaactttttctagagacaggtgttgcccaggctggtctcgaactcctgagcaaagttctgggattacaggtgtgagccactgcgcccagctgagattgatgattttgaaaaacgcagttccttccactcttacttttttttaatataattttctcattttgggtttgtctgatgtttccttgtgattagattcaggttttgtattcctggcttaggattctgtacatccagaggtacacagagtcatctgctctttgttgatgatactgattttgattacctagttgggtgttgtctgaattctgtatcctatagtcattgttttttaccccttgtggcttataggcaatatgtgggggagacactttaacaccatgtacatatcctactccttagcaaaatttccacccatatttagcatccattgatgattcttgaaccggtttataatatggttgttgaaaagtaagatttctaacagtaacactcctaggtttaccagttaacactttgcattttattctaaacaagagccttccttctttttttcccgtgtctttcatgaacttgcagatacctgtttttttttcaatgacttatcatttattaccatccttaatgacatttgtgctctgagtgatccagtgggggccctttcaagcttgtgtccttatgagatgccctcatcattttttggagcactttcttaatttttggcataacaagatgttccaggtttatcttgtacctctcctgccccagccctggaatcagccatttctctgagaagctctggttccttttagtacacaccttgttttatggaatatgcttgtgagtcatgtatgattcttagtctaatagtatctaaagtattcaagtgatttatttttgcctactagcttgacatctttcctttctttagtgtgtgaaacaatag

SEQ ID NO: 33234 - DNA, 1052 bp, Homo sapiens
atttgaaaacttgcttttgtattccagttttttgtgcttaagtttgaaaattttttgagtagacgggatatggtttgattataatcagagcccaggtattcaggtccatagtggtttcagttcattcatgattctaaggtgtgtgggatctgagatgacactgctagtccatagagacttcataccagtctaaacccctgcagttatttcttacgggatcagagaactcatctgctttccttgtgcatgagaaaaactggggcccaagattaggctggctttagagacttgagtaagttgagtcatgtgatttgtatattttgtctgcaataaataagcttattctaatgcagtgttttatttctgcagagatttcagaatgaaagtggattatgtaataatactgtccatttatgagtttagttaccagttcatttgttgccactctattaaaatctaatagtttcactagcccttataaaaggacattaccctatctttatttgtagatactagtttcaaaagtatgacccctttgccatcttcaccatctttaaatgtacagttcaggagtgtgaaatgtattcatattgttgtgaaacaaatcttcagaacactttcgtcttgcaaaactgaaatcctataccgaataaacaactgctcccctttcctctcacttcccagccccttgtgaccaacgtgctgctttctgtttcagtgaatttgatcatgttagaaacctcatagaagtatttgtctttttgcgactggcttatttcactcagtgtagagtccgcaaggttcattcatgttgtagttgttgacaggattttcttcctttttcaggctgaataatattccgttgtatgtatataccgcattttatctagccatccattgatggacagttgggttgcttcctcctcctggctgttgtgaataatgctgttaggaatgtgagtgtgcaaatatttcttcaagaccctgctttcagttcttttggatatttacccagaaataggattgtgggatcatacggcagttacattttt

SEQ ID NO: 33235 - DNA, 1041 bp, Homo sapiens
tagagtagtggtcaagaagcaaggttataaacaccctgtaaggactgaggttgctaccgctttaaattccattgagcattcggaagcaaaatggtgcatttttatacagtaattttattaagagaacaagtgtccaccactgtgtggcacccgtatttgttcagccatagattttagaggcatcttgcaaagcctgattctaattaatttaagtccattagatggaatgtgttactgttcctggccaaaactaagttgtcacagtcagattaatttctcctagcagagtggcaaagcaattacgactgcaaatacggcaagtcactcctcaccggcagaagctcatgatatttgagggagtcttatgtacctaaaatgttcggtgataaattgttagatgatatttaattagacaattaactcaacgtgcagcttgattatcagttaggtggagagctccagcctctcaccggtttggttcactgcagtttctcccaagcgctgcttcctattgggaatggatgctcggctcctttcaggctttctgtcttgtctccagctcacgtgcccaagatacgcatctcctggggacttgaacaggcatcaggctggcaaaaaatggtgggaatcatggccgggcgcggtgcctcatgcctgtaatcacagcattttgggaggctaaggtgggcagatcacttgaagtcaggagtttgaaaccagcccggccaacatggtgaaaccctgtctctactaacaatacaaaaattagccaagtgtggtggtgcacgtctgtaatcccagctactcggtaggccgatgcaagagaatcgcttgaacctgggaggtggaggttgcggtgagctgcgatcgcgccactgcactccagcctgggtgacagattgagactccatctccaaaaaaaaaaaaaaaaaaaaaaatggaaatgagaactctgagcgatcttcagtcttaccgaagcctggcttgtcattctgtgaacacagagctagaggtccagtgggagaggcttaaggccacaca

SEQ ID NO: 33236 - DNA, 1024 bp, Homo sapiens
aggaggaaaaatgtatgcatatgtaaatgcttactccaaagtcacctcatctaaagctcttgctcagaaagcaagtcagaatcttcactcctgtgtagcattaccgaatggaaaacacgctaagagtcatcaataaagtcagccccgtgtagccttcccactggagaaatgacaacctgaggtcctgcctccagcgctaggatgtacctgtgatgtggcttctaccttggactctgtccacggcctggaacaacctggactcaccagtgtgcaccatagcaggagcccaagcaggcttagctcaaagctccatgtttattgcatgaagcccttaaaaagtatttgttatcggaaggctttgcccagagctttggagaagattacaaaggaatgctttcttccttcagcttatttcttaggaaattacctccagatctacccaagaaacaaaggctgcaggatctccttggtgtcttcatacattgaacacttatttagaaatccctcatgactttttccactcccatttcttgaggagaaaacagaagatctgagaaagggagaatgggagatggcctgccctggtctcttggctgccctaatggaaaggctccaagttgcagctttagaaacaagggctggcactatgagcaggctataacttcttgcttacaccttctctcttcacatcgggtgccgcctgtcaggtgagggccacagtccttcattccaggtgtttttgccttcagccttgctttactaccatgtttttctccttttctgtcttccatctgtccttccataaatccattcattattcatccatccatccgtcctttgagacatccatccttcaagccaccgtttgaccccttcatcccaaattaatgacttactatatgccaaactgtgtgctagaaactgactctacagatgagctagaacagttcttgccctcaatcttggaagaacaactcattggtagcagctccactgtttattggcagaagggaggattgtgtcc

SEQ ID NO: 33237 - DNA, 1049 bp, Homo sapiens
ctttggctattcttggtcttttgtggttccacataaattttagttgttgtttttttttctatttctgtgaagaatgtcattggtgtttgatagggattgcattggatcatcagatttctttgggtagtatgggcattttaacaatattgatgccttcatgaacatggaatatcttgccatttgtgtgtgtgtgtgtgtgtgtgtgtgtgtgtgtgtgtggtcttcaaattttttcatcaaagttttatagttttaattatagagatctttcatttctttgataaaatgtataataaaggtatacacattttggttaataaacttaaccaaagaaatgcaagatctctataattagttaactaataattaattaaatggttaatgaacttaaccaaagtaataaaagattaaatagaatcctaagtagctattgtaaatgggatgactttttaaatttctttttcagattgtttgctgttggcatatacaaatgctagagatttttgtatgttgattttgtatcctgcaactttgctgaaatttgtttaccagttctaatagttctttggtggagtcttcagctttttccaaatataagatcatatcatctgcaaacaaagataatttgacttcttccattctaacttggattccgtttacttccttctcttgtcttgattgctctgggtaggacttccagtactatgttgaataacagtgatgaaaatgggcatccttagctgggcatggtgctcatgcctgtaatcccagcactttgggaggccgaggcgggtggatcacctgaggtcagaagttcaagaacagcctggccaacatggtgaaaccacttctctactaaaaattaaaaaattagccaggtgtggtggtgggcgcctgcaatctcagctactcgggagtctgaggcaggagaatcacttgaactcgggaggcagaagttgcagtgagccgagcttgcgccactgcactccagcctgggtgacagggcaacactccatcttaaaaaaaaaaaaaaaagataggagtagggt

SEQ ID NO: 33238 - DNA, 1052 bp, Homo sapiens
cgggctcaattgttttgagttttagatcccacaaataaacgagaacatgtgaagcttgtctttctgtgcctggcttatttcatgtaacataatttcctccagttccatccatgttgttgcaaatgattcattctttttcatggctcagtagtacttcattgtgtatatgtaccatattttctgtatccattcatctgttgatggacacttaggttgcttccaaatcctggctattgtgaacagagctgcaacaaacatgggagtgcaaatatacctttgccatacaatttcctttcttctgggcatatacctagcagtgggatttctggatcatatggtagtttagcttttttgaggaaactgttatgcatagtggttgtgctaatttatattcccaccaacagtgtatgaggatttccttttctccacatcctcgccggtgtttattattgcctatcttttggatataagccattttaaccggggtgagatggtatcttcttgcagttttggtttgcatttctctgatgatcaatgatgttgcgcaccttttcatatgtatgtttgccattttatatcttcttttgagaaatgtctatttggatcttttgcccatttttaaattggattattagaatttttcttgtcgagttgtttgagatccttatatattctggttatttataccttgtcagatgggcagtttgcaaatattttctcccattctgtgggctgtctcttcactttgttgaagctttttaaatttgatgtgattccatttgtccatttttactttggttgcctatgcttatggggtattactcaagaaataactgcccagtccaatgtcctggagagttcctccaatgttttcttttagtggtttcatagtttgagatcttagatttaagtctttttttttttttttttttttttgagacggaatctcactctgttgcccaggctggagtgtgatggtatgatctcagctcactgcaacttctgcctcccagattcaagcaattcttctgccttagcttcccaaatagctg

SEQ ID NO: 33239 - DNA, 1013 bp, Homo sapiens
aggacagcttcgacaccctatgatttcatctctgacccaaccaatcagcactccccataccctagcctgctacctaccaaattacctttgaaaaatccctaacctccaagccttagatgagtttgatttgagtaataactctgcctcccacatggtgtggctggcatcatgtcaattaacctctttctttactgcagtgccatggtctccatgaactgatttttttgtgcagtgggcaggaagaacccatcgggcagctacacatcttgaaagagaagctcttcctgtgaggtacatcaactgtggttaagaatcttacatacttatcattttttgttgttgtgagaacatttaaaatctacccttttctttcttttttttttttttttttttgaaatggcgtctcactctgttgcccaggctggagtgcaatggcatgatcttggctcaccacaacctgctgggttcaagtgattctgttgcctcagcctcctgagtagctgggattacaggcatgcaccactcttttagcaattttatttatttattttgttattttgaaaaagtatttttaacttttactttagattaatggggtatatgtgcaggcttgctatatgggtatattgtgtgatgctgaggtttggggtatgaatgatcctgtcagccagatcgtgagcatcgtacacaagcaattttaaaatatacaaatggtgtggtatggtggtacatgcctgtagtcccagctactcaagaggatggggccagaggatcgcttgagcctaggtgtttgacaccagcctagacaacattgtgagactctgtctcaaaaataataaataacaaaacaaaataaaatatacaatgcattattatttaatacagtcattattctatgcaataaatcactaaagcttatttttcctgtctaactgaaactttgtactctttgatgaacttctccgctttccccatccaccccacttccctggattttattaaattaaattgta

SEQ ID NO: 33240 - DNA, 1033 bp, Homo sapiens
agccgcaagccagagactagggacatggctgaggatcgctcccgcccctcggaggccagaaaccgagggtcactcccgctctctagaggcccgaggccccgggccgctcccgcccacctccgcggacgagcgccgccccttcgaccccattccctgaggtctggacgttcaggccctctcggtctgggagatcccggagaaccacccacggggctttaaaaaatgttggtgccaaacacctctccgaaatagggcccgccctatctcggtcggggagcgcgggacctccgtggccacccagcgccaccgtccgcgggtccgctttgcgcaggcgcggcgtccccgccccttagaccccggcccgggcgtggcgtggtgcgcaggcgcaatgtcccccactagcgccccgccttgacccggccgtggtgcgcaggcgcagtctgcgcagggactggcgggactgcgcggaggcgactgcagacgtatcgggggtccggagcctgtcgcggctgctaagcgctcggcgcctggcgctggcgctggccaaggctgtgagtccctgccgcggaccggggcagggcaggcgggggacgaggcggcggtaggagcgggacggtccccagcgggtccgagcggagcgggcgccgggtccccgcgccccctgcccggggatcgggaaggggctgggagagccctgggccggtgcgagggggagccgcggagtgtactcgggggcctggggagctcggtccttagcaggtaggccgcgtcccggtgaaggtcgcgaccccgcgggcttgctgggcgtcccctccgccgctttggtccgggcctggggtccggcgacctcgcgggctgaggtagcccctcgcctctgcctggcgggtggactcggggaggagtcgtgtctgcccaaggtcaccggggtggagtcctggctgggccgggcctctgccgccctctgtgagggttgtcctgcggggccgcccgcagcccgtgggtggggctggcggggcgggtgaaaccgcccggg

SEQ ID NO: 33241 - DNA, 1046 bp, Homo sapiens
ttgcaagttaccactatctgaaaatcccctgctgttgcggggagaagctttgaatgcactgaagagaattccttctaaatgaaggcaggtgatagtgttctttctgtaagtaaagggaaagaaaaaaaacatagtttgcttaccaggtggagacaagattcaagacatagcagaagagtggaagacaaatattttccacttaaatgaggctgtttttgacgttctctgccaaggatttagagctttcgttgaactaacataaaaggagtgcgagtcttagtagagatgttccgtgtgtgccgcccgtgctctgaactgcgtttccacctgctgtggtgcttgtgcagcctggcagttcattgtcatctttaataaactaaggaaataaaattctgtctttcgtcagcctgccttgactgtcaagaaatggcatgtgtccactgtaaagcaggtatatctgaacattgagaaggtttctgtgttataatgtaaagcaaactggaccacacacatcaaggaaagtgaggtggagtggctgtgtctctaacttgccatgagacctcgagcgaaccacttcacttctctgggtttctggtgcatggtgtaactgtcacttaaaatgaggtgtcttcctctccgcaacatctgacttgccttagatgcttcagttcccacttctgtgagcagctagcatctttctcttctgctcctggcccactggagctccagctctacgctgcaactctctcaacatttccccttaaatgtccccttgtcatctccaaccagtgtgtctaaaaccagcataaattccgtatttccaaaaacctaaccattagtcacccaggtttgaaaattaattgtcttcaacttcctctgtaagtggcacactgagctcatcacgcatcgtctcattcctactccctgtcatcaagttctgtggatgttttcctctaaaataaatctctcattacttttctgccactagcacacaaattcaggtgttcttgatcatacattattttcctccctgcgcctcagtggaa

SEQ ID NO: 33242 - DNA, 1030 bp, Homo sapiens
tgcgagcggctgcaggcccggcgggaggcactggccaggcagagcctggagtcttacctgtcagactacgaggaggagcccgcggaagcgctggccctggaagccgccgtcctggaggccacctgaagaaagcacgtgcagccctccctccgggccgggtcacacctgttgcagaactgagccactctttgaaggactcgccccacctggggcttctttttttttttttttttttaattatcatcatctttttttttttttttactgacttgtctgacgtctgtgtgcagtcagccgtcggcaggttgatgggtccagagtctgtggtgacagataatttgtaaacaccaggtgtttccatcagaactgacatgcgggtccttcagtgaagcttctagtgcctctgtcagtggaagagacagcaagaccaagttcttccagcgtctgtggccttctcctctaggtttcacctgcatgtcaggtatcatttccaattttcctttgtttcagttctggagcttctgagccaggcctttctcaaccacctctcctgctgctgaaacggggatggcgttttccctctccctgtcctggactggggtcagactgtgccccgaggagaagcagcagagaataggactacgtcatgggcatttcgtccacttatttgggtattttgggggccacagaacaatcctgactatcctagactcctcagagacctcagaggcagctgtgaatgtccctatgttgccgggagttcctgtttgaaatatttgaagcatagaggatgccacaagctgactttcttcatctaccttggtgatcttgaagcaaagaacagaactgatgctcaggccaggctcacctgtagccttacgccgcaagcatacgtgaggcgccagctctgtcgctgaaggagcgcttactcagaggagcggtcggccccctcttggtgttaaggtctcttagttaacctggctttttggtgcaggtgtgatctttgaagctcaggcaggtccctgatgcc

SEQ ID NO: 33243 - DNA, 1032 bp, Homo sapiens
gtggttcctctgctgtcagatgtttctatgtagtcctactttttttctatcatgctaggaatactcatcctagagtcgctccgtttcctgcatcagaaatacctgccttccaggccaggcagagtggctcacgcctggaatcccagcactttgggaggccgaggcgggtggatcacttgaggccaggagtttgagacctgcctggccaacatggtgaaaccccagctctaaatatatatatgtatatatataaataaaggaatagctcccttcccaaatagcttcctgatatgaggagacctaagaacactgctcccagatttgcttcccagatagtagtaccttctatttacttgaaactttctaaagggaaagtttccatttctctctgttgaggtcatatcagatcccttatattgtgacactggaaggacaagaagacctctttctgccctgtttattcctttttgtttttaaacataacaggctttcgggtcacctccagcagctcccagttcagctcacgtgattcggcacagctctctgactctggctctgctgatgaggttgatgaatttgaaatccaaggtaagaagtgacactttgttacaagggaacttttattctgtttctttccatttagaatgataagctgcgaagtgtttcctaagtagaagatcttcattatggattgttgttagctattgtaagggacagccttctgctaaaaacaaaaccccttcacagtttcagtagggaagaacactggaagcaggtgttccaggtggatggagtggctgctcgttgatgtcaccctgacgcgtcctcctcagtggtgtctttctcctgggttcccactctgactcctcctttcagcttgtagggctggtccataccacttgaaattagaatcctattctcttgggttccataacacaactgaaattgtttcagagtgttcaaaagagaaaaggacaaaaagaatcattgggggcagggggacaaaagaggaaaaacatcaggtttacaaag

SEQ ID NO: 33244 - DNA, 1033 bp, Homo sapiens
tgtttccaatcatttgctattagtaacagtgcttgtgtataaataattttgccctttaccgtaggataaattcctagaattcttaaagggcatgtgcatttgatattttgatagctattgctaaattactctccaggaagttatgtatataaatatcctcaccagaggccaggcgtggtggctcacgcctgtaatcccagtactttgggaggccaaggcaggtggatcacgaggtcaggagtttgagaccagcctggccaatatggtgaaaccctgtctctactaacaatacaaaaattagctgggcttagtggcatgtgcctgtagtcccagctgcttgggaggctgaggcaggagaatcacttgaacccaggaggcaggaggcagagtttgcagtgagccaagatcacacaactgcattccagcctgggcgacagagcaagactccatctcaaaaaaaaaaaagtaaaagattacacttctcttagcatgaaaagatattataagtgtcattgaatttttttccctgtgaactttttcctattttattcctattttcagtagatttagtcttttcctactgatttatagatattctttatttattgaggaaattagtcctttgtaatgggagttgcaaatattttttcctagtttgtctgttgacatttctttctttttttttttttttgagatggagtttcactcgttacccaggctggagtgcaatggcacaatcccagctcaccgcagcctctgactctggggttcaagcgattctcctgcctcagcctcccaaatagctgggattacaggcatgtgccaccatgcccagctaattttgtatttttagtagagatggggtttcaccatgttggtcaggctggtcttgaactcctgacctcaggtgatccacccgcctcagcctcccaaagtgctgggattataggcatgagccaccgcgcccggccgtcttttgacatttcttatggtggcttttactgtgccaaaatatctgacttttagtaagtca

SEQ ID NO: 33245 - DNA, 1034 bp, Homo sapiens
agtagacaaaagttatgtttttattatagaaaaaatctttatttaaagagaaatgattaagagaaagggaaaaaactgaaatctatgggtgaatactaacagagaatatttagatcagcctgaagacagatgaggatcaaaaatgtaatgggaactagataagagttttctaaaaatcatcttagtaagatgtaatttaacaaaacttggaatatctttaactattaatgacaatgtttctaaagcatctttaaaaactaaaatgtaaatataactactcttttttttttttttactaacccttagtattttatgtgtaaaaacccccacttttaaccctcatttttggcagcttaaatttcagaaaagataatgatgaaagtataaatcatttttagctgttttaagaaaagtgtctatttttgaaatctgtccttattggcgtcaggtttataaaatgtgctttatacacctgcctaaatacatattattcatcaacttatgagaaataacatttttaagatagaacagggtctctagattttacaaaaataattttaaacactttctttttttctttttttttttttttaagaataaagtctggagtttagttaatagtaatgtaccaatgttaatttcaacaaatgtaccattgttatgtaaaatgttaacattagaggaaaccaggtgagggttatacaagaactctctgtactatctgcaacctagaataatctaaaactattgccaaataaaagccttttttaaatttttttgttattatactttaagttttagggtacatgtgcacaacgtgcaggtttgttacatatgtatacatgtgccatgttggtgtgctgtacccattaactcatcatttagcattaggtatatctcctaatgctatccctcccccctcccccaccccacaacagtccccagagtgtgatgttccccttcctgtgtccatgtattctcattgttcaattcccacctatgagtgagaacatgtggtgtttggttttttgttc

SEQ ID NO: 33246 - DNA, 1050 bp, Homo sapiens
aatttgtcagaatagtagaggaaaacatttcagatgtaaaaatcaggatatacactaataaaggtataatggtaacaaaattttgcaaattattagtaaataacaactcacttagcatgttgttgaaaagatactattatgaagtagagaataaagtattactttatatgtttttactatatttttaaattttactttgtttccagcagttttgcttatttattttgcgtggaataatttgtgggtgaccctgagacttttgcatggcttgaacctgctgatatctagtgtctccttaagtggtttgttgaggttttagataattagaagtatttctttaaaatgtaaatattccagtaaacattaagcttcatttaaactctccatttataaaataaaagtatatgttattttgtatccatttttataaagattatagtctttatctaagtgttctaagtcattcattttaactaaacatatggatttgtctgcagaacacgacttaaaagtggcttcagaggaaaagcaagaaacgcttgaaagaagtgaaaataaacagccagaggtatgtaacaatttaaatttctggtttaatattggttggttggtttttctttaataacacagcatagtccaaaagaagtgaccttttagactgtccttttagaatccaacagacagatcataatttcttacttaattttaaaacattttagccagttataaaatttaaaatatccttacagtctgcagtaactcatagctatctgtacccttggaattgaggccagaaatttccagaagtctctttgctcttttacttttataagcttcttcatgacaaagaaagtaacatcaaaaattgagttgtattactaagcaagagaaattatgaacaatttaacagtgatggccactgagttcaactcgtgttaaaggagtcatcgttgctagtggttcagactctgcagttttatgttgctggtcaccagtgctgaggttaaagacttcttctgttttttggtttctggttgccttcagtgtctt

SEQ ID NO: 33247 - DNA, 1050 bp, Homo sapiens
cactccagcctggataaaaaaacaagactctatctccgaaaaaaaaaaaaagtaagattacatagttttaatcataaaagagcagtttaaaatatatatgtatatacattttttaaatttaatttatttagtttagaattcagagttaagaagttagttgtagctaattcataatctcacagtattgtctgaaaacaatgcatttacctacttatgttccctgaaattcgacgtgatatttttgtattaatataaataagaaattagatttttaagttagtatgttgtattttcctctataatcacattattacaaattggacttttgatgcaaatggatcttctatttaatttttataataaatggtttgtatttagtaaataaatattaattatagttgattcttgaataatgtggcagttaggggctctgatccctgtgcagttgaaaatctgagtataactttgactccttctaaacttaactaatagcctaccattgactggaagccttgctgataacacaagcagtccatgaacgcatatttggtatgtgctgcattgttatatactatgtttgtacaataaagtaagctagagaaatgaagctgttataaagaaagtcatagaaaagaaaaaaacgtacttactattcataaggcagaagtgagtcttcccaaaggtcttcatcttcatcatcttcaggttgattaggctgaggaagaagaaaaaaggttggttttgctgtctctgggttgcagaggcagaagaaaaatctacatataagtgggcccctgcagttcaaactcttgttgttcaagagtcaactgtattacacaggaatttgtgtcactaagaaagtaactatctttagaactgggaactcaaaaatccctttctgataccataaacaaatggcaataaggaccataaaactgagccagtgtgcacccatacaaataggagattatttttgaagatacctattgaatgcagaagatgggaaagtaattcctttacaagaagcagaagttatgttacatattcttc

SEQ ID NO: 33248 - DNA, 1058 bp, Homo sapiens
ggaggattgtttgagcctaggagtttgagtccagcctgagaaacatagtaagactcttgtctcttacaacaacaacagaaaaaaaaaacacctcagggtttgaatacactcctgattgagaaccacagagtaggtaagtgcagtatataaattcccgtatctcaaaaacataagaaatctctaaaagagttggcatttgataggtgctactttcttcaaagttctcctttccaataatgttagcctgacttatctttctctacatttgtgactggaaagtaaaaggaaatattgctggcaatatatctcagcttacagaaacacaccttttccttcccaccaggaatcattcactgccattcagagagcctttagcaatttgcttgtgggtaatctttcaataggtaaagcctgaccctttcacaatttcatgttcctttgtcaccattcaagtgattatgtgtcaacaaatgttcattacaagtgaaattttctcaattagattagtagcaaatcctgaaccgttttttttttttcagttgaaattgtattatggactatgtcagtatgtctgttaagtttatagagctttggcacaatcaggatgtcagttttaaacactgaaatccatgaagtcggtgagaatactataggaattcttttaataagttagtttcggcagtcttatgatctaattatctatttggttaacaatctgggaaaataatatacaaacagatttcaaatgaataaattttgggaaaattcttcaggtgggtattatgagtcttaacagcaatttttattatatatatatcaggggctgatttttatataaaacacatgatactagagacagaaaaagtttcacatgcaaatacttggtttatacaaaatcatttagtacacattcatggaaactataaatacacaagggctatagtctaactgtggcacatagatttgttcatttgcctctttaagttgagttagcatgtgaaatttagtagactcatgcagaaatctggacctcaggcctgtcttaagaatcaaatctg

SEQ ID NO: 33249 - DNA, 1086 bp, Homo sapiens
atggctgtttatggacagaagagaagtcattatttgtattgtttttgccttgctaagaataaatatttaacttcaaatataattggtctggaaaaacaaaagggttttggttaaattccttgttattgtatgttatagatggggaagtggcaaaatagataaaaattacacaaactctgggaatcaaatttcttttgggcaggcttagaaaagacaaaactgaaactacttagtggcctagagagcagaagcctagggcccattttctgtcccaactttgcccagatcccccctctactgaaccttgtccaggtctgaccccacactgaaatacctcacagaactgcttagagaagatcagagtttggagtagctattcctactgcctctccagagctggtgctcccaatttcctgaaacacaaaagctgataaatggagaaaggcaatgtactttgaatttaatgtacttaaattattttatgtaaaattaaaaccagtatttctagagacatcccatccagcaacctgttctccatctttgcagtttcagtggatttttcacaagtctcaaagtaactataaacacaaaaataaaaaattcccgaattgtacttaaaactttcttctgtgtctctcccatttatctacattgagctattattctatatattttttaaaaatcaatgataggaaaacagaagaaaaaatagaaatgctgggccctgcatttaaatcctgggaagtatcacacactttgtacccacctcccaggatgctgtgagaattaacacacataatgtgagcttcccagcacagtgctctgtgacatactcctgagcacatagtacatgctccacaaatatcgcattaatgcatgtggatgtgctgtttttcaaatgcagacttactcagacattgccaccatctccagcctctgtaacctttaaagggcttgcagataatgccacgtttcaggatgttgattgctggtcttgtcttcggatgaaaagtatttgtgttgtgataagggtgttggggtaagggactctgcgtgctgtgtctgctttctctagctgagtggtac

SEQ ID NO: 33250 - DNA, 1086 bp, Homo sapiens; identical to SEQ ID NO: 33249

SEQ ID NO: 33251 - DNA, 1086 bp, Homo sapiens; identical to SEQ ID NO: 33249

SEQ ID NO: 33252 - DNA, 1086 bp, Homo sapiens; identical to SEQ ID NO: 33249

SEQ ID NO: 33253 - DNA, 1068 bp, Homo sapiens
ggaggatctatatcataggatggcctaacttgccacttgagtcagacataccattccggccagtactgccactccctgggtttgtcatcttgaaaagattgtttacttatttcagctttcatttttattaactgcacaatgcattctatttgtagagcttgaaaaatagaaaaatattctcaaagaggcatacaaatgtgaattttaaaaaaatctagtgatgtatttcatttgttaaaaattcttattttcattttttttttccctgagcaagggtagtaagtttctgaaatctgtacattttgggagctatttcacacagaatctcagggcttagttataaaaatattactgggtgaaaagaaataggaaaaattttcttcttttatggctgcagaaaagtgaatacatttccacaagaaatcgtggtagatacattggtggtttatagagatttgccaaaacatcagtttcttttttctgcatggtggagaatttgcaatagttgataagtctactctgttatcctgttatctgcatatttgagtttaatgttaaattctatggactaggacttgacattcctggaagtgctcataaatgattgcttaattatttgttattatggaaataatacctaaatgacatttgctgtctgaaatggatattttggcttttcttgttgaagtatgaaatgtaagtgccttccaatttccatttctcctgtgaacataagtgctgagtttgaggaattctgctggattcttcaaacactgagttccttttgtataaaatgaagggaataaccttgactgggaatcagacctaagcccattaactgcagggtaaggccaatcttgacactgtcaaaggatgtaatcagtagcccagttgttacttactggggaacctttcctgcaggtgtaccagcctggctcaaattagacatgaaaggagcctttacactgagaaggtacagaactctggaaagctgaggatccacaggcagatgcagtgagagttgggatgggaggttgtttgtgatgtcctctgagagggtgtaattgt

SEQ ID NO: 33254 - DNA, 1068 bp, Homo sapiens; identical to SEQ ID NO: 33253

SEQ ID NO: 33255 - DNA, 1068 bp, Homo sapiens; identical to SEQ ID NO: 33253

SEQ ID NO: 33256 - DNA, 1068 bp, Homo sapiens; identical to SEQ ID NO: 33253

SEQ ID NO: 33257 - DNA, 1046 bp, Homo sapiens
acacagtccagttatacactttaattttttttttttttttttttttgagacagagtctcgttctgtcgcccaggctggagcgcagtgttgcgatcttggctcactgcaacctccacctgctgggttcaagcaattctcctgcctcagcctcatgagtagctgtgactacaggcaggtgccaccatgcccagctaattttttgtattttcagtagagacagggtttcacaatgctggccaggctgttctcgaactcctgagctcatgatccacccacctcggcctcccaaagtgctgggattacgggtgtgagccatcgtacctggccactttaattatttttaaatgtgcaattatttttttactacaggttattttatgattataataagtatatgagtataattataattcacacatttctaagtcatgaatgcttttaaaaaatgttccatatttatctttgaacatgtagcatctctttccgcaaataaatgcagactttggttttgatttacatggagttaaatatgtaaatgtattgctctaaagataaaatttaggtgtaagaaaattatggggcaagcagttgagtttctgtgagagtttgtatctattttccaaggaaaatagcaatattggaacaaagattattttaataaggtggatattttactagaaatctagaaacctaaaacattctgaaatcaaatttatattttcttctattactgtaaaatttaacggatcattgttgagactctcccatgcaaattctgtttttatttgtctgttactcatgctagagctataattgacttctttcttattttttttatttttactttatgaagtatttattatgtgagctggtcagaaattataattttataaaatttagtagcaaacacaaaatatttagatgcaagttcataattcgtgtattaagttatattttagttaggacatttcattttattgctttagttggataaccctatatgagccgtttagttatttgtttcactttttataattgacataaat

SEQ ID NO: 33258 - DNA, 1041 bp, Homo sapiens
aacattgctaagtgtatagtaagctctcaattattaccttatttcttaataactattatcttttaattttgtcttatttagtaggaagcctactgaagttctgttgagatctatctatatataaaaatgtgtgtctcacacacatacacatacctatataagttatatatgtgtataataaattccttacttaactttgctgataggttcttggaaacagtaagtgaagcaacatattaagtaaactaatttttaccagaatttaatacaagagttatgtttgcatgacatatagcaacaatattcatttaaagatgcacttttcatgaacctattttgaacataaagtgaggacttactgtacatacatgtgcaacctggatttttctgataaataaaaattgtataatgtgtacagtataatgatttgatatgtatatacattgtaaaataaaatatagtcaagttagtgaacacatctattacctcaggtagataaccagtttttttgtagtaagaacacttaaggtctactgttgtagcaaattgtaagcatacattacagtattactaactataaataatgctattttgctgatctaatgctgaatgtactttagatttttcagagttactcaagttacaactaaaaatttgtactctttgaacaacatttccgtattttccaccctcaggcactaacaatcaccatcaatcaatgttaaagtttttttgttttgttttgttttgttttgtttttgagatggagtctcgctgtcacccaggctggagtgcagtggcgcgatatctactcactgcaaggtctgcttcccgggttcacgccattctcctgcctcagcctcccaagtagctgggactacaggtgcccgccaccacgcccggctaattttttgtatttttagtagagatggggtttcaccatgttagccaggatggtctctatctgacctcgtgatctgcccacctcggcctcccaaagtgctggggattacaggcgtgagccaccgtgcccagccaatc

SEQ ID NO: 33259 - DNA, 1088 bp, Homo sapiens
gccaattaaacctttttctaaaaaaaaaaattacctagtctcaggtatttatagcaatgcaagaataaactaatacagtgaatattgctgcagtaaacatggatgtgcaaatatttctgtcagatatactttgcatattttgaataggatgctcagaagtagaattagtgggtcatagaataacttcattttttttttggaggaacccctatacattttttaggggctgcatcactttcttcccaccagcagtgcacaagggtttcaattcatctacattgttgacatttgttattttttgtttgcttgatattggccattccaattaatacacgataatacctcattgtggttttgctttacatttttctaaagattaaaaattttttcaataattgtttgctgtgtgtatttattctttggagaaacattttcacctcctgttcatttgttaatcatattacttactctttgttgactttttggagtttattctgggtgttaacttctgtcaaatgtatactttttacttttttttttcttactcgggactgactaaatgtttattttaatgttcagagataaatttaatgtagtccatttttctgtgtttttaaatttgttactcatgtagttgatgctatatgcaagaaaacattgccaagaccaatgtcataatctttcttcctgtattttcttccaaaaattgtagagttatgcttcttacatttaaatatttaatttattcaagatagtttttgtatatggttcaggattttaaatttttatgagtacacagtagctttttgtatctatgggttacatgagatattttgatgtaggcatgaaatgcataaaaatcatatcagggtaaatgggtattcattacctcaagtgtttattctttgttttacagacaacctaactacattcttttagttatttaaaaatgtacaattaaattgcttttgactatagtcactctgtgtactagcaactgctacatcttactctttctaattatttttctacccattaatcttccccacttcccccagtcccctgctacactttccagcctctggtaa

SEQ ID NO: 33260 - DNA, 1048 bp, Homo sapiens
gtttcaatttttagctttgtatgtgttttgaaatcaggagctgtgatgcctccaacattgttgtttttctttttttctttttgtttctttctttctttctttttttctttttttttttttttttcagacagttccacacttgttgcccacgctggagtgcaatggtgcaatctcagttcactgcaacctctgcctcccaggttcaagtgatcctcctgcttcagcctcctcagtagctgggattacaggcatgtgccaccatgcccagctaattttgtatgtttttagtagagatgggatttctccatgttggtcaggctggtcttgagctcccaacctcaggtgatccacccacctcggcctctcaaagtgctggtattaacaggtgtgagccaccgcacccggccttgttgtttttcttattgaagatcgcttggtgctacattgtctcttgaaattttatctaattttggggttgctgtttctatttctggaaaaactcgattagaaatttgacagggattgcatttaatctgattattacattcaacagtccagatggcttcataatattaaatatttcaaacattgaacaagagcatgctaaagagtatattgtttgctttctataattatgtaagattttcagtttttttattctactctctttccagtttggtcataaaaagtaatctgtaaaattttaatttaaaaaaatttgttgagggtctttttgtggcctaaccggtggtttatcaagaagacttttgtatgagctattgagaagggtgtgtattctgctgtcattgagcagtgttttctacaattctgttaggcataattttttaatactgctttcaagtcttctgctcccttatgaatattgtctttttgttttattcattacagaaattggggtatcaaaatatcctagtataattatattgctttgtatatcttggctttacttctgtcagtatttgctttatatatttgaaaccctaatgtgagatacacacacacacattaatatgtatatatacacaca

SEQ ID NO: 33261 - DNA, 1063 bp, Homo sapiens
gggtcactccccgttataggcgccctttttgccccctagcacacaacagataagacccctgccgatcccctcgcgttttggtctcttatattcctccaagatgttttccctgcctaggggctaaggcctctctgcgttaggcctcttcctaggcttcacctacccagccatatacagcaagtaaaggcgccctggttctggaccacttgcacacatcgccagccgctgaccatgtaaacgcagtatgtaaacgcccagccatcccgtagctgcagctctgcgttttaggtcaagctccctaaatgtcccattccaggacccttacgtagggattctcctaccccagtactcttcaccatactgaggataattcactgcttgctactgtgggtccctaagattactcctgttaacccccgtcctttccccccagcactacctaccaagtacaagtcgcctccttttgggttgggttatgtagatatcgcagggtatgtgctggagaagtaggtagaagctagattgtgaaggtgcttgatgctaaggaaagtttagagttcaatttccttttttttctttcaaacacttaggagccagttctaactggaccacgctgccaccacctctcttcagtaaagttgttattgttctgatagatgccttgagagatgattttgtgtttgggtcaaagggtgtgaaatttatgccctacacaacttaccttgtggaaaaaggagcatctcacagttttgtggctgaagcaaagccacctacagttactatgcctcgaatcaaggtaagtttgccttaatgttttatgaatcatggtttggctgttttgaagatttagagggggtctctgtagtctttcgcttggagttgcaattttaagaaagtggaaattttgtgctgtcagttggctggggcaatagaatgttgaaggagcctcacacgggatggaactgagacccatcatttgtgccccatgtcaagtagccaaagctcatgcttcatggcaaatataaaagatttagagcaagatcatccaggctaacctacccca

SEQ ID NO: 33262 - DNA, 1162 bp, Homo sapiens
aacagctgagtgccattgaggggcagagaggatcaggaagggtgacacagccaagggactgtctgagccgagatatgatgggtgagtggggactccccaggtgggcagaacaggctggtagcttctgcacatggcagagctgtaggactccacagcctgttggttctgctgcaagcggagcctcatcgtgccctgagggcaggtggccgactgggtggggcctggtcctgagggggttttcctggagcttttccaacaaaaattagacctgcatgttagaaagcagacctggggctgaggtaggagcacaccagcacacctgcctggcctggggtttagccagcttcacctcctagatggctgggccttatggagcatctgtagtcctatcctgttccaaagtggggcgcttttcaacagttacttttcagtaatgactgagttttcctgactatatatggcatcactgagaaacacttctcttcataggagatttttttagtgggagggagatgagctagctgaggggtcagggctcaccaggctgacagctctattgggggctgatcaactgctcatctctcctccgtgatgtgtttatttcagaaatcaatgtgatcattgagtgctgtgtctttttcagaacagccttcttgtaggacacatgtagatgccctcagcttcatcatcctgctggttactttaacgctgggtactgtcctgtctttaattaactgccctttgcccttagttacctcatgacaacttgggatctatttaacttgcccatttgctcaccttcagttatgcccattaagcccagcagtgatcccacagaaaaatatttttgtcagaagaacccttgctcatttaaattatctgtagaatatattcgatccatagcccagaaacataaaaacaatattagcaaaagtttaatccaatgctaatgttcatttatttattatagacgtggggtcttgctatgttgcccaggtgggtcctgaactcttggcctcaagcagtcttcccgcttcagcctcctcaagtgttgagatgaaaggcatgagctgctgtgtccagcctatttatttatttttaatgacatagattttgttgtgtttcaactcccccaaatcctgtaacctgaataaacccctag

SEQ ID NO: 33263 - DNA, 1031 bp, Homo sapiens
gctgcagaaactcagagggcaggaggaggggctttcaacagcgtgttgagagaagccttccctgaagacgtgtgcagggtgagcagagacttgaagggagggaggggcagaccatgtggtctgtgcacgagtgttccaggaggaccagcagcgagggtcaggcacagcctgcctggcttgtcccggagcagcaaaggatgtgtggctgcaaccccaggggcagagaagcctggtgggtgcccccacatggctcagagctcttgccttttgctgtgtgttgtgttctcaccagagtcctgtgaaagattccatttgacagatgaggcgaccaaggcacagagtagaatgcgtccagagtctcacagcttggcagtggcaaagacagaaaccagatacaaaccgtctgccatcagagggcagaaatgcagcctgctgtgctccatgagctgtgtacaattctgtgaacttcatttatggcattatttgactgtgaccctgtgatctggctatgagctcataggaaaaaaaaatctaattcattgagaaagagctacaactctataaagtaaagctaaaaccgaaaattgtcttcttaagatgatgtgctctcttcagtctgaacgcagttgaaatgtttttcctttgccttaaaggagagagagacgcctttacccaatttgctggttctttgtggtgaccatggcatgtctgaaacaggaagtcacggggcctcctccaccgaggaggtgaatacacctctgattttaatcagttctgcgtttgaaaggaaacccggtgagaatttaggaatgttaacagttggaaattgtattacatttgttttctatagtctggttttaattttgaaaacctattttttagaagctccataaggttgaagtccccaagcaatgtgagcatgaaaagtaattgggcaaaaggcttttgggatctgaagttacgttccttcccgaatccttaaaatacagttattctttgtcagaattttgttgtatgaatgttgctgcctg

SEQ ID NO: 33264 - DNA, 1184 bp, Homo sapiens
ccctgtgtgggcagtacaggtctggccactccagagtcaaggggtgtgggaaggagagcatgcctgtacctggacttccacagagggcagagcaggtctgttttattttcggcctcttgctactagaatgtttgaccctgtttgttgttctgttcccctggtacctggcacctagtggatgttttatcatttgtggattgaatgttgaagactcagcaggcgagccagtggaggtagagaccggcggtgaaaggatgctgctgggctgtgggaatggttttctgaagtgctggaacttctttcatggccccttatcgtcagtggggcgcaatccacaggcctaccctgtgtttgtatttcagaattacagttattaaaatagtttgtgcaggcaagaactggtcacaaaccaatcaaaggtgcaaaatcaagaggccagaaatagacctcagtgtatctggggacttggtgacaaaggtggcatctcagattagtgcagagaagacatggtgctcaataaatgatgctggtacccctggctgaccttttggaaaaaggtaatgcagactctctgccttattctttacaacaatatcaatccaggtcaaagcatgttaacgtctttaaaagactacagtatggaaaattctggatgtagaacggtagtcacagtcgtataataaacccccaagtccagcttcaccagttactggccaattacagccaatcttctttcatccgtgcccacactcatttcccttctcctttattatttggaagcagacctctaaaaggtacgtgctctttacccccataatcttgatacccttatcacatttaaaaaatagtgttaattccttaatatcactgagtagtgttcatatctctaatatctgtttctctctctttaggtgtttcagcttgtttgaatcaggctacaaataagaccatacactgtgatttgtttatgtgtctcttaagtctctgtaaatctgtaggtccccagccccaaaactctttgctttactacagtttactcgtgcacatttccttcttgagacctacagtcagcgatttctccaggatgccctgcttctttttagtggaaggtggtatttcaagatcactgtctcagagctaccagtgctagctctgagtggttggtcattgtttctagacagaaa

SEQ ID NO: 33265 - DNA, 1042 bp, Homo sapiens
gcgtgaatcggtttctaagttagtggcagcacgtgatggccagggttctgttttcctggtcagggtgtaattggtgatgaggatgatgagtggatgtttcccagcagctgggaaatgaagcttgctggaaaatcagaccgtccttgtaatttataacgagcccccgtaaggggccaggagctcctgttgattggcgggagggctcagtcaggaggaccattttattttctttgtgtcaaagcaactgtgtttctgattttaattgtgttgtggtggtgaacacaggagtgggatgagcagaggccgttctggagggcagcttgtaacatgtgggtgaccctctatttaaatttaaatagctgtttccatttatctcaagaatataagcagaggcaggagcctgggatgggacagaggcatgtccactgaagtgtccttcacaaagtgtccttgcaaaaaggaacaaccagggtaattatccagcagcaatacagtgatcctcccagtgaggtcggtgctctgacagtgaccgtcccagtgaggtcggtgctctgatagtgaccctctcagtgaggtcggtgctctgcagaggggtcttctggctgttaggcagcctattttcacagaacagagaagcatgttgtggaacaggtatgaccccagcttactaattgtgtacctgttttttttttcatacttatatgaaagactacatacttaaaatactggtgattatatttaggacctgaaatcataagattgtggtcttgctttttacttatttttgtatcttagcgatgtctagagttaataagtgttgcttttctaatcacagcaagtcaaggtgactgctgagggctgtggccagcctgaggggtggccgtggggctccgggggcacccctggaagtacttcctggctgagtggggagtaaggggtgggagttagggtgacctgaggcctggctgaggcagtgagagtgtagcaggccgtcatacggggccggggcctggggcagagaggatgctgacgtgcaggtacc

SEQ ID NO: 33266 - DNA, 1030 bp, Homo sapiens
gctcagggaggggcacccacctcagaaaaaagcgccgtgctcatgagaaatgacttctacaggttgttggggaaagaggagttattttaaagatcacagagcccgtgatgtgccaggcgcacccacacagggcatatagtccccgcagctgcctctgtgctggggccacgtcaccgtcctgtcctaaagacaagcaatgtgaagcccagagatggtatcttaaaacaatcgtgtggtttttttctgattacaacagcaattgtgttaatccaacaatatttttcctatcaactgtaaaccttattttaatatttacatatttattagcatttaaaattcaatctcctagaatattgacttcaattagtttggctgattctaattttttttttctaatttgtttatcacttaactttttaagtactttttttttttagacagagtcttgctctgtcacccaggctggagtgcagtggtgcaatctcggctcactgcaacctctgcctcctgggctcaagcgattctcctgcctcaacctcccgagtagctgggactacaggctcacaccaccatgcccagctaatttttatatttttagtagagatggggtttcaccatgttgtccaggctggtctcgaactcctgacctcaagtgatcccccacctcagcctcccaaagtgctgggattacaggtgtgagccaccgtgcctggcctgtttttagtacttttatcctttatctttttaactacgtaagtactcaacattttaaattattaatcttcaccatgttatttccaagaacaatcacgattgatctttcagttacacagccacggtgtgtgcctctctgtgtaactctgcacagctggtgatttactgaaagaacttactctcataaaaccacagccagcgagttctcagagacacaataatgcaccttaattatgagtttaaaagctcttgtcttgtgaaatgtaatcgatccacagaaaaatcataaagtatacatgtaatagcttaatgactt

SEQ ID NO: 33267 - DNA, 1060 bp, Homo sapiens
ccaggatggtcttgatctcttgaccttgtgatccacccacttcagcctctcgaagtgctgggattacaggcgcgagccaccgcgcccggccagagtgatttatattcttttgagtatacacccattaatggggttgctgggtcgaatggtatttctgcctctacgtctttgtggaattgccacactgtcttccacaatggttaaactaatttacactcccaccaacagtgtaaaagcattcctttttctcctcaatcttgccagcatctcttgttttttgactttttaataacagtcagactggtgtgagatggtatctcactgtggttttgatttgcatttctctagtgatcagtcatgttcagctttttttcataggtttattggccacatgtgtgtcttcttttgaaaagtgtctgttcatgttatttgcccactttttaatggagttgtttttttctcataaatttaagttccttgtagactctggatattagatctttgtcagttggatagattgcaaaaattgtctcccattctgtaagttgtctgttcactctgatgctagtttcttttgctgtgcagaagctctttagtttaatttgatcccatttgtcaatttttccttttgctgctattgctgttggcattttggtcataaaatctttgcccgtgactatgtcctgaatggtattgcctgaattttcttctagggtttttatagttttgggttttataatacatttaagtctttaatccatcttgagttaatttttgtataaggtataaagaaggggtccagtttcaattttctgcatatggctagccaactctcctagtacaatttattaaatagggaatcctctccccatcgcttgtttttgtcaggtttgtcaaagatcaaatggttgtagatgtgtggtcttatttctgagttttctattctgttccattggtctgtgtgtctgttcttctaccagtatcatgctgttttggttactgtagccttgtagtatagtttgaagttgggtagcatgatgcctccagctttgttcttttt

SEQ ID NO: 33268 - DNA, 1035 bp, Homo sapiens
gtagccccaagcctgtccttgtagggagtggcagccggagtctgaactgtcctgggggaccaagcaggagcttaagatgggcaagacctggggccctgggcagacgcatcaaagcaggcagaagcaggcatggtgagcaggccgccgtgcatgcctggggcaggcgtgtgggtgtgagctgtgctgtgcatgtgtacatgcgcacagacgagcgtgggcgtgtccgtgcttgcgtgtgaatgcaggtgtgggcgtgtgctctgcctgcatatgtgtgtgcatgagcgtgtgtatgtgcgtgtgtgtgaccttgcgggtgtgggctgtgctgtgttgtgggaagtacgtgcctcacgttgctctcctggtgagagtccggagcaggatgagggggttcctggctttcacaaaatcccggtacccagaacaagcccacccagagtccacttgcccctcaagccttcagaggccaagctggctcctgctggacggcgatccctgaccactgtgctctgtgggccttctggaagccactgtccctcccccagtccctgtgctgaagccagacacctgcagccgtcctgcccccaaccccagctacccaggcctgaggctggcatgctcctcagctgtctggccccctccagcccgaagggctgaggtccacccttcatctgagttaagtctctcaaaactctgggtgccctggagggtttcgtcagccagcccaggaccctcagccatggtgctcccaccgcaggccagcaggaagaccaagaagaaggaagggggtgccctccgggcccagagagcctcatccaatgtcttctccaactttgagcagactcagatccaggagttcaaggaggtgagactttcctgcttcactgggagcccccacccccaggagcctgtgctgggaagaccccatgtgggctggctccagggccagcaggagtggaagcctatcctcagtcaggggtgctgaggaaccgggagcagggggcggggcagagcccagccgggttggcagca

SEQ ID NO: 33269 - DNA, 1102 bp, Homo sapiens
gaactgggcgtgggtgctgggaccctctagacactgtgagtgtgagaactgggtgtcggtgctgggaccctgtggacactgagggtgagaactgggcgtcggtgctgggaccctgtagacactgagggtgagaactgggcgtcggtgctgggaccctgaagacactgagtgtgagaactgggcgtcggtgctgggaccctgtagacactgagtgtgagaactgggcgtcggtgctggaaccctgtagacactgtgagtgtgagaaccgggcatcggtgctgggaccctgtagacactgagggtgagaactgggtgtcagtgctgggaccctgtagacactgagtgtgagaactgggcgtcggtgctggaaccctgtagacacttagtgtgagaactgggcgtgggtgctgggaccctctagacactgtgagtgtgagaactgggcgtcggtgctgggaccctgtagacactgagtgtgagaactgggcgtcggtgctgggaccctgtggacactgcgagtgtgagaactgggcgtcggtgctgggaccctgtggacactgtgagtgtgagaactgggcgtcggtgctgggaccctgtagacactgagtgtgagaactgggcgtcggtgctgggaccctgtggacactgcgagtgtgagaactgggtgtcggtgctgggaccctgtggacactgcgagtgtgagaactgggtgtcggtgctgggaccctgtggacactgcgagtgtgagaactgggcgtcggtgctgggaccctgtagacactgagtgtgagaactgggtgtcggtgctgggaccctgtagacactgagtgtgagaactgggtgtcggtgctgggaccctgtagacactgtgtgagaactgggcgtcggtgctgggaccctgaagacactgagtgtgagaactgggcgtcggtgctgggaccctgtagatactgtgagtgtgagaactgggcgtcggtgctgggaccctgtagatactgtgagtgtgagaactgggcgtcggtgctgggaccctctagacactgtgagtgtgagaactgggcgtcggtgctgggcccctgtggacactgcgagtgtgagaact

SEQ ID NO: 33270 - DNA, 1011 bp, Homo sapiens
gaggagttccttagatccttcaaaggggaaccttccagtgtgttcttcacacctgatgtgcgtcctcacacctgatgagtctgtgctttggtgttagaggactcacacctggggctggacctgagtgtttttctaagtgtggctaccgctgacgggcaggtgccatccatcaggctgaggctcggctcttatgctaacctgaggccccatggctggcggccctgctggtgtggacgaccgctgtgtgcgtctcttgatggctggggagcattttgtttaaacaggatctttaaaatgaagtgtacgcttataatacaagtgatgcttgtgtatttctcactttaggaaataaaatatttgccaatttgatagaattttgactttaacgttaatcgtatttttagatattggttagcatattttatgttaggttattttcatttgattttatctagttgtacgtagaagatactgtcatcttttaggacaaagtattgtaaaattatctgttttagcccatgttctgatgacccacagctctgtcacctttgagcatcatctccccattctaagtttttttcccacttaattcctaaccctgcctctttgaggaagcccattgacggggcaattaaaaccttctcattgctcctgagaccagaacggcaagatgtttcctttcagaagctgagagccacaaggaggacagcagtgagcatctgcacagaaacgagctcagagacgcccgtgttcagtggagcacgccgatggggtgggcgccctggctctagacgctctcctaacacacctgtgctttgatgacagtctgcaggagctgcctggtgaagtacctggaggagaacaacacctgccccacctgcaggattgtgatccaccagagccaccccctgcagtacatcgggtgagtgtgggccttcccaggccacagtacgtggggtgagtgcccctgggcgtctctgtgtgtgggccttcccaggccattagcgctgt

SEQ ID NO: 33271 - DNA, 1024 bp, Homo sapiens
attcgttagcgttatgccaacagtgagctcctcagatcaggctggactgccgcagctcaagagcaatgtccagagacagtgagctcttatttatttatttattcaatcatttttgagacggagttttgctcttgttgcccaggctgagtgcagtggcacgatctcagctcactgcaacctccgcctcccaggttcacacagttgtcctgtctcagcctcctgagtagctgggattacaggcaggtgccaccatgcctggctaattttttgtatttttagtagagacgggggtttcaccatgttggccaggctggtctcgaactcctgacctcatgatccgcccgcctcagcctcccacagtgctgggatgacaggtgtgagccaccgcgcccggccccaataaatgtttcagtgcctgtatacacctgacactgagtgctgctatttttaatccttctttattcttacaggtgaaaattaaagaaatgggaactagagccaagggtcagggtctgaagctgagttgctttccactgtgtccgtggggctctctcctttgcacggacctatgtggcctgttgttcccgtcacggctcttctgcagactgatgggaacagcctcctgctgtcagcccctgtcttgcaggcctccattccagctgctgggatgtgattatttaagggaaacattttctttcaagctgctctcagattctccaggctaatctttcagcatttcccttgtgaggctccagcactccatccacctgcggccggccccacctatccccttggctctcagggtcccctcctctctctgcccaggctctcggggtcccctcctctctctctccccaggctctcggggtcccctcctctctctgcccaggctctcagggtcccctcctctctccccaggctctcggggtcccctcctctctctgcccaggctcacggggcatcctcctctctgtccaagctcgttgcctcacgcgggcattggtccctgcacggttggtgtttg

SEQ ID NO: 33272 - DNA, 1768 bp, Homo sapiens
ttttttaattttttgtagagatggatggagtcttgctgtgttgcctaggccggtctgaactcctgggctgaagcagtccacctgcctcagtctcccaaagtgccaggattccaggcgtgagcccacgtgcccgccaagtctttgtaagcgcatttccggctgtgtttcctgtgtgctcctggctgctccctgcggactttgatgaataatattttcactggcattcatttctaaagaagctgtaatttcatcagagttcctttttaatcgagaagtttgttctgaaacatttgagtaacgtggcctttttgggttccatccactcctctttctagtctccttcccgggcggtcagggagtgttgtctacacggatctctgccttgggggattgagatcttcttgcttgttcacttgggtgcagattttccaggggtcctggggtgattttcctttggctgagtttgctggttggtgtggtgggtaaacaagcggaccccgggggccagttgcccacgtcctgctctgcctttagccagggtgtggcccttcacaagtgacctacctctgcctcagtttctctgtctgtggcgtgaggtggtggtgagattgcctcgaggtttttatgaagattaaatgatttcctatttgtgaggcactttgaggtgttaagttgaatgaatgagaaacaagcaggcagcctgggagattgtgaactccgacatccaagtccggtcgtttttcttgtggattcttgttttctccgtgtctctgtaacctcgcggtgttgcttaggagccgtgctgctggctatgcaggctgatggttcttacgtagttttgatgacttgcaccttttgccagtgtggattctttttttttcttttttcctgttcagtgtgttttcgctctaacccccgattctcttgtactaacatcgctacagttgctgttggtctctgcttccaccctccctgtcatttgtttcagctgtgttacggaggcctttgctttgcttttttgcacacatctcaggttctctttgataggagagtttaacccgttgtctttgttgtgagaatacattttttcccctctccatgagggcttggatccggttttggtgtcttctttctctgctctaatggtttgggaattttgcattctctttctgttcttcttgtggctgcccttaaacttggattccgtgtccgtttgtgggattatccgcgtctataacttcgtgatgagttcctgatctccgtcttccaaaacttgggaagtcatccgagggtttgttccagattgttttgggtaattttaaaattttatttcacactaattttattctaggaatcgcttcttcatcttactgaagttttgatgcgacgttatagttatttaggcttaacgggaggttgcatgggttttgtggccgtttctggtgtcttcctggtgtgtttggatttgtgcttcgccacgtccgcacgtcacttctgagcccagtgcggtggcccctgagctcctgccggtcacgggctgtgtgttgtccccctcacaccagagacagtcgtttcttctcttaactcttaagccctcctcagtcactcggatgaactgattaaattctgtgcttttaatactaagcattaaaaaaaaaaaaacatatgagggaagcacctgccacccaggcccatgtttctgctctcagccttgtgccctcccccggtggcccctccaaagggcatgaagctgtggatgctgtgcctg

SEQ ID NO: 33273 - DNA, 1681 bp, Homo sapiens
gagttactcagttacctaagcttgctattcatccaaatcattttctagagtcactgtataagggtctatgagtagctgtgtatgaataaatattacctgtctacctcaaaatacacatactgctgaagcattctgtacaaccgtgtgttatcacagtgcagttttaagtgtaacgttagaacttaggcattttcctgtgtggcggaataagaaaggattaaacagttacaagcctccaaattcaaataaaattaaatcacagttcagatgaaactgaatatcattgtaataatctcataatatatatttgtaactttgtagctatctttgaaatcacttgactttgcaatggtgctaagctgatagatttaaatacacagacgggcgagtggcgcccgtgtcgatgtcttcagccagtggtgaccctgcttttgtaaccgcgttaacctgacaaaacctcagcagcagaagtccctatttttctaggagttcatcgtgcagacagtcttcactacaggactcggccctggggcctctgcctctcgtctgaccttgcagccttagtcgttggaggctggagcgcaatggccctgccgtctgtggagcctctgggcggccttctttcctttctgtcaacctctcatttcacagaaaaaggctgaatttcattttttccagcatgaaagccaggatcggttagtggttggattctattggttttttttttttaaacagatggagttactgtgaagaagttttcacaactatttatgctggtaaaacaaatgctgttaaatcaccttatgcgtcgttttcaacagcagtggggctaattacccggaatacggtctcaccgatgcagttttcatggacatagaaaattcaaatagaatatataatattgaatttaagatttggggggttaaaaaagaaaacttaactttataaaattatttattctattttaagccttctatcatattttcccatccaattgtttggtttcagtggtccagctttatttacaggcatataaaatgaaattgtgagatgttttgcaagcttctttttactttgagtagcttttaatttgtatgtttttatgtggatgaagagcattttttatgcttttgtgcaataggttccaatatgcatttattagacatctgtttaaatggtaatgtagcatttattttgctaaattgaaagggaacatagatggaattccaaaatatgtacattcagctgtttggtttttcgtttttcattgttattattgtgagaatgctgttattggggttgtgtgtgagtgcccgtcagccagtgatgcctcgggccacgctgtggggccacctcagtcctgcctgggtcctggtgccttggaccccacgtgcttgtggccaggctgcccctgggcagggccatgtggcctcagaccacaagagcggagctgccctggcccaagcactgcagctgcctgcacccccgggcttcgcagccttgcttgttttctctgaacagcaacagaacagtgttcacagcgattcaaagggtggcattgggttggacgttctgggtacaagccaacctagtcccacgttgtacgtgaatgtttaatgtgctctcaaaacatggaaaataagtttagtgcacatagctaaatcacaaaacatccaatttc

SEQ ID NO: 33274 - DNA, 1028 bp, Homo sapiens
gaccacccgccctgtactactcaggctgtgaaagtgcctccaaattctggcagtggccgctagtctgagtgtgcggggctgtgtgccacaaggaactggggtctggggaattccgtatgaatcggatgacattttggctttaaaggcctgagacatctggtggagttggttggggtgggggcagtttggacacatgccccccagcacccagctggcgccatcctgtgatggccccaccgcatctcccagcgtcccgtggagtggggaggctcaccatggcccagttccaggctctggggcctggtaacctaggatttgggggggtttggttttgtttttgttttaacagttttcgttaatggtgaccttccctgatgtgcctctgggcatcttcttgttctgtgtgtgtgtgatcgccattggggtcgtgcaggtagggggcctggggggcctgcactgtgtgtgtgtgtgtgtgtgtgtgtgtgtgtgtgtgtgtgtgtgatcaccatcggggtcgtgcaggtagggggcccagggggcctgcactgtgtgtgtgtgtgtgtgtgtgtgtgtgttcaccatcagccctcttggggcctggggtcctgtgctgtgtgtgtgtgtgtgtgtgtgtgtgtgtgttcaccatcagtgctcttggggcccggggtcctgtgctctgtgtgtgtgtgtgcgtgtgtgttcaccatcagccctcttggggcccggggccctgtgctgtgtgtgtgtgtgtgctgtatgtgtgtgtgtatatgtgtgagtgatcgattgccgtcaggtcacacaggtagggttcctgaggccacctacacacataggatgtggcatgcccagagtccccgctttctgaccagagactgggaagagtgggccctgagaccccccacatgcggccccaggagccagcaggggctcctgttctctctccacctcagcccctgtgcccaaagtgtcccaggtacaagcccacctctactcgccaggtcctcccccaccccaagacccct

SEQ ID NO: 33275 - DNA, 1057 bp, Homo sapiens
tgtcacctgccctgtgggtcctggggctggcggaagtctcaggaagaggcctcctatgtccctgccaagctttgtgggtactgggaccccaagtctgctgggggagcagcactcagacactagcctagcccatccgcctggacttgggacagaattctgagaatatgcctggacgggggccccatcagggccagctgggaggggaggagggtgactggcgtctgtctcccctgcccagacagttctgggacgtgaggcgccctttttcccaggctgcaccagctcactgtggaacggccatgacacactgtcccgaggcagcaccgagagggcccagcccgctgcacacagtcaccctgggccggcagagccggaagggcacctgacctttcccttgatctcggaaaacaccgtggcgttagggaggcggtgcttagaggcctgactggtcccacgtgaggcctcgggtctgtcctgtttgcagactccaatgtactttcactttaaacattcttctcagcgacgttaggcaaagactttgctcccaggacaccaggtgcccaggacaccctggagcctgggctgagcctgctgtttgcacgctggcccagggtgtgcgagctccagtctcctggcgggtgtgttggggcagtgagcccagcctggtaggttgacacatgcaggctgggcacagcacccctggggcacagagcgggggtcctggccctcaggcaacattgcaagagttgtgtccccttccctggaagaccccaccacactgggtccctggatgccctgaagcccaccccaagcccctggggtccaggtgtgtggaatggggacagtagggccacctgccttgagcctgagggtgcccctaagaaaccacgagtccagggcatttctggcctcggctcccacgcccccctctgctgcagctgagatctgggcccaggatggttcttacctgagggagtcctcacaggcgcggagggccctgggatgacgaggggctggcaagaccaccgaggaccgcagggccctctggctcccgcga

SEQ ID NO: 33276 - DNA, 1061 bp, Homo sapiens
aggagctacggggtgaggggtgtcggagagggcacttcagatggggcaggtgttcggggagctgatatgagggcctgtgaagacggggaagggcaggccgcagggggttcctgcctccgtccctccagactgcagcttcttcccctccatcccagggcctgcccacctccaccctccctgggccctgggaaagaggagcctctgtctggggacagtgtgtgtgtgacaaagcgtgtaggcagagcggcctctgggccttgctgctgtgggaagcccctgctcctcctccttccctagttgtgttttttacagctgggcaggggtggggggggcggcgggaggatttggaggcatccgccttcttggcgcactgcctccgagtctagtcctccatacctgacagcagtgaggccctgtctcagactcagtttactctcatgtctcgctcccatgtggcccttggtgtcctgcctgtgctgggggcctctcggctgtggctaagtgtgtgtgcagggcaggggctgtgctggaggaggaggctggggggtgtcttggcagggtgcacggccccggaggtggcacagtgctgctgtcatgccccggcgggggttccctgtgtttcttcctggctgcagtgcgaggcagccggtcttcccaccaggtgcctgtgccctcaggtcctgactcagtttccccataggctgcgtgggttggacgcccgtccaggtggcgtggtgccctggccgctgtcctggtgtgatcattccccaggaatctggggggatgggcttcctcctgggcaggccctcctgcggggggtcttgggccggcaacagcagggggtccggggagcccaggtgggggtgggataggcctggcgagggggagggaggctgtttgctttaggataagcctggctcctctggcccagctgcctctgcccgtgcctacagcgcttgcaggccggccctgggggccacgcttccggccatccagcggtcatttgtctctgccccctttctcagtggtgaccacaggcgggggtcccgcctccctgtctg

SEQ ID NO: 33277 - DNA, 1021 bp, Homo sapiens
tggcctgggtgggagggtcctgagttgagggagagacgtgagtcagagaagagacccccacatgttttctcagagaggccaaggactgggatgggccgggtgagccagggctgagaagaatccctccctccagagcctcagcccaccctttgtgtttctgggcacagcagggaggcgccgtgtctccactcccagccccagcggccaatgatgcctgtgggctcagaacctagaggccctgggcaacgccccctgtgctatcagcactgattgggaggcctccagagaggtgatagggattctctgtgagggtccctgtccccagacttgggggtcagaatgggagctgctccctgagtgtctgaagacgccagtgggagacgtcacagggccactgttaactgtgtattggaggaacacgcggccccaggccccatcgagatggcctggagcagctgctacctcttggtgttctgcacgcagcctggacgctcccagacagcagtggctgcagtgcgggatggacactgtcacccatgggctggcgagagatgccctgggaactgtggggtgcctgcggccgcctctccgacatggagagcagtgagtgggctgtggtcgccgctgcaggacttgggagcagcacgtggggagtggggcacgcagggccctcctttcccaggagctccatccaggtacaggccctgcggtgccccgagtttctgaggcctgcagggtctgtgtgttctaggttcatcttcctggccggcttggcactgcccactggggctggtcacacacacacagaaccctggccctgccttccagcccagaggcacccaggcaggggatggggtggggtggggactgaggcaggggatggggtggggacccaggcaggggatggggtggggacccaggcagggaatggggcgatggggcggggtggggacccaggcaggggaaggggcggggtggggacccaggcaggggatggggtggggtggggacccaggcaggg

SEQ ID NO: 33278 - DNA, 1048 bp, Homo sapiens
agacccaaaaccgccagggccacctgtggcctcctcgtcctcggccactagcctgccgtggcccgtggtcatcggcatcccagccggcgctgtcttcatcctgggcaccctgctcctgtggctttgccaggcccagaagaagccgtgcacccccgcgcctgcccctcccctgcctgggcaccgcccgccggggacggcccgcgaccgcagcggagacaaggaccttccctcgttggccgccctcagcgctggccctggtgtggggctgtgtgaggagcatgggtctccggcagccccccagcacttactgggcccaggcccagttgctggccctaagttgtaccccaaactctacacagacatccacacacacacacacacacactctcacacacactcacacgtggagggcaaggtccaccagcacatccactatcagtgctagacggcaccgtatctgcagtgggcacgggggggccggccagacaggcagactgggaggatggaggacggagctgcagacgaaggcaggggacccatggcgaggaggaatggccagcaccccaggcagtctgtgtgtgaggcatagcccctggacacacacacacagacacacacactgcctggatgcatgtatgcacacacatgcgcgcacacgtgctccctgaaggcacacgtacgcacacacgcacatgcacagatatgccgcctgggcacacagataagctgcccaaatgcacgcacacgcacagagacatgccagaacatacaaggacatgctgcctgaacatacacacgcacacccatgcgcagatgtgctgcctggacacacacacacacacggatatgctgtctggacgcacacacgtgcagatatggtatccggacacacacgtgcacagatatgctgcctggacacacagataatgctgccttgacacacacatgcacggatattgcctggacacacacacacacacgtgtgcacagatatgctgtctggacacgcacacacatgcagatatgctgcctggacacacacttccag

SEQ ID NO: 33279 - DNA, 1022 bp, Homo sapiens
ctcaggtcacctctgacctcagggctccgtccgagtgccctcccagccaccctgcggtgctgcgacggtggccgaccccatcttacccggtcagcaggaggggtggggctgccagctccacccggggcccttgcctgccgggggttccgttagcctcgtaagaaaaggcaccggggcccctcgtgcattcagcaaagcgtgaggcccactgcgtccccggagcctggtcctgctggcgtgcagcgcgcttcctgacccgctctggttctgagagcttttccctggaggaagctcaccctgcctggcttcaaagacgacaggtgggctctggggagaggtgtcagggacctctccccaactggagcttctggggaccccatggctttcaagatgtcccctttttgttctctgtcctccccagggtagaccctacttctctcccctgaggaagtcctgactccttggacggtgacagcttcaggcatggccctggtaagggctgcgtgtggctgatgggtgctgtgggaggcctggccaccctgactgggggacagtgggggctccacgcggcccacagctggcagccaaacagatgttccccagacaggacaggctgcaggccgacgcctggtcgggtttcagtctggagtaggggagggtggaagggagacctcaggcgtctggccaccttgggcagcagggaggcctcaggcagcgggtcatggggttgcagaggacaggctgcccctccccagggagtgggcggagggatgggcagtccgagagggctgtcccctagagcctctgaaggagacactgggaccgcagaccccacgcctgcaccctgcctgctgtgaggtccaggcccccactcagggccacccttgacttgtggtccagcccatcttgcgcctgcccacaggaggtgctgactagtgctgtgtggtcctcaacggacaggtctggcacagcctagcctctgggtcttgggctctggactttgtcatgctgtggccacgttg

SEQ ID NO: 33280 - DNA, 1040 bp, Homo sapiens
ccacccctgcagcaaataacttgatataaaacctgggcccaggctagtaatacccttgaagcccatgacagaagcaggcacagtgatagaagcaaaatcacgtagacattatcaatctagccccctccaattcctacccataaagcccactgaagatgaatttacaatcataaagtacaaaacatgccaagaaagaaccacatgagggaagtcagcagatgtgtgaacagcaggaacggactccgccaccaaaggccttcaaaaggtgaatcaagcaaaaaagagaacattaattaaacatgtttaacatgggtaagaattacaggaataaaagaagtaaatgaacaagaatacgattgcaagggagtggtagaagaataggcagttttgaagaactaaatggaatatctagaatgaaaaaccatgcttgctaaaattaactcaatgagtgagtttaaaaagcaatttagacccagctgagagctgaatttgtggtatatgcagaaattacttctgatgcgaggcagagcatgatgacagaatgaggagatcccaaacatctatgagagttccattctgaatgattagaagaatgaggaagcaacagtatttaaaaagataatcactaagaaagttctatacttgatgaaaaatgtgaatcctaagattcaggaacagtgtgagacttcagctggggaaaaaagatgaaactacacttctacatttaggagtaaaactacagaatacaaaagacaaaaaaattttaaagtgaaaaataaaaccactcagattacatcaaaagcagttatcatgaaagcagcctatcaattacaatgataaaagccaagcaatagtcaaatatcgatttttttcaaagtcacaagataaaataagtagtaacataggattctgtacatagcattatttgttacctattggggcataacaaaattccccaaaactttgcagcttaaaaaacattcagtatttcaccattgccatgagtcaggaatccaggcgtggcttgagtcctctgcata

SEQ ID NO: 33281 - DNA, 1419 bp, Homo sapiens
tgggtttagacctaggggtgatggctccagtcctgcccactttgccccatcctctgggtcccgagcctaccctgggcctttggactcctgccaggccttgcggcaggtgcatcacactgttgggttcctaagtgccacaggcctgggatcagcagacatgaggaacaccaacggtgtccctggaaagcaatccccggggctgggtgaggcaggaggagtgtagcaggtggggaagctggatagaggtggccaggatgggagctgtgctctgtgggccatgagaagggtggaaggacttgggggcagggagagattttgggtttgtcttcataagggtcactctggctgctctcagggggattgaaggagcaaggcagggagacacagtggcgttcatggtcatgggggaagggctgctttccagcggtagggctgagaaacggtgaggaagaagcctggggtggcgggtggcttgcactgactctgggctgcggtcctacctaagctccagggaggacggggtttctgaggagacctggggaacaggacacatccatggaaccccccggtggaggtggatggccgatgagcctggggcccagaggcagcacttgaagtcacaggagctaagagcaacagtgggtaaggcaaggagaggggtcagagaagcgtggcctgggtcagagcgtgccttccagggaggtgagtgaacctaaggggaacctggcaggaggagggatgagtagggtctgcagtagagacaatggggctggcagggcagagttcgggcaacgcggacctgcctggggagaagcggcttggagccgatgtggacgggtgcacatccagtgaaccacagtgtcagggcgtgatccccggggtggggaacgtgaggaccaggaggaggggctgtttgagcagggaattgggtgcagggaccttgggcgcaggtctgaggagggggatatgggcgaccccttcctcttctcacaccaggacgccggggtgtcgctcgtggaggatgggggatgggatcgtttcttcatccgtgcatcttttcagggatgtttccgttgtttccggatgttttcgttttttgttatttcaaagaaatctgcaaacatttgcacgtaggtttttatgtgaatgtaagtttttgattctctggaacaagtgtccagctgtgtgattgctgggttgtgaagtaagcgtatgtttcactttttaaggacccgtcagactgtctcgccagcgtggctggaccagctcaccttctcaccagtgatatgtgagagctctgcgttcttgccaacgtttggtgttgtcactatttttaatgttatccgttttagctgttctaataggtaggtagtgatctctctcattcgggctttcctttgcatttcccgcgtgactagc

SEQ ID NO: 33282 - DNA, 1026 bp, Homo sapiens
catatttttaaaaagaaacggggtttcactgttgcctagggtggttttggattccaggacttaagcgatcctcctgccttttgacctcccaaagcgctgggctgacaggtgtgagccacgcgcccgccacactaatggtttcgcagtggggtttcatggtgcttgtgtgtccagcacttcttttgatcaaggaagggagggcaatgttgctgacgttaccaaaggtctagcctcttgctagatccctccaagatgtaggtggttggtttttaatactcagtgacattggtggatctctgttggtttagagatggagaccctgcagctgagagaagtctatacaaggacattgtggtgatattagtagggagtcctaaccactgaccactttgtctcacgcagtgcacctccaggcctgtcatttcagctaacacacaagaaggtttgaagatcagaaccgtggtggtttgtcacttctggtactggctggtgaatgtgggaaacactagataggaaaagtttccagaaatcctttcattgtgtattgaaggaactaggaagggagatggaaggtctccggaaaggattcttcttcaggtcttctgctgttttgtaatcgtgaatgtaatttgtattccagagtgattgcatagcttctgattaaaatagtcatgcagatagtcatacaggtaaagaaatattatagtgtcataatttctctgttgacacttgtgtcactactgagttaaaactttttttcatagaagttttcaggagtgattcctagtggataatggaggtgttttgctgggaaactagggatccttgatttagaagcatttattggtatagaactaaacagaacatgctgagctcacagctcaagagctgcactcttcagtttccaggaggggccagtgcagatgtcagagaagggaccgagggctgcaggaccggggttgtggaaggtggggggtggatgttctgcttctctagtctgagagcaagtcctcctgcagggtggta

SEQ ID NO: 33283 - DNA, 1021 bp, Homo sapiens
acatctgcacctcacctatgctaccctcacctgtgcccccccacccgcacctgtgcccccctcacctgtgcctgtgcagccgtcacccatgccattcctcacctgtacccctcacccatgcctgtgccgttcctcacccgtgcctgtgcccccctcacccgtgcctgtgcctccctcacttgcgctgtgcccccctcacctgtgctgtgccctttgccttgtggctgctcctgcacttggttctctctctgttggtcggttttcccattggctgtgcagctccctggtgtgcacgtggctctgagtcttcctctcgtgaaaaccccttccttgcccccgtcctcctccagctactactccctgtctctgccccttcatgtctctcttcctgttttacctaaatcagatttttgccccccaacactccacccagatgttcctcttgaggacaggatgatgctcctgaaagcggtcagtccacagcggaccccactgcctcgagacgctcccatcactcggctcccgtgacaccatcctctgggctctccccacccctcgctgcatgtcctcacttgcctatgctgtcttctctagtcttggaggccttttgttttatgtcaccagccagccctccagaggttgtgtggcttcacagacggtctccaagctcctgtccccacactgctgccctccccaggcctctctccctgaggccatcccgtgtagtcacctcccggagctctcttcgcatgtctggaaggcagttcaaagatacgataccaggcgcaaaaccaaatgccgcatctcggccttggggccccagacgagccccagacctgccttactaagccacccttcccaagtcagttgacagcgatgtcccccggcacttgttcagtgacagccgagaactcggaggttttctcgatttctgtttctcacgtttatccttgagtccacgatggctgctggggctgcggccttcgcggccaggaggagggtaagggggaatcagtgccgc

SEQ ID NO: 33284 - DNA, 1755 bp, Homo sapiens
catcaaagcgaacatgcaagaaaacgctatgaaggggcttcagaaaagaaatcatcaaagcaaacatgcaagaggccgggcacggtggctcacgcctgtaatcccagcactctgggaggccaaggtgggcagatcacgagttcaggagatcgagaccatcctggctaacacggtgaaaccctgtctctactaaaaatacaaaaatttagccgggcgtggtggcaggcgcctgtagtcccagctacccgggaggccaaggcaggagaatggtgtgaacccaggaggcggagcttgcagtgagtggagattgcgccactgcactccagcctgggcggcagagcgagactccgtctcaaaaaaacaaacaaaagcacacatgcaagaaaatgctttgaaggggcttcagaaaagaataatcaacatgcaagaaaacgctatgaaggggcttcagaaaagaaatcatcaaagcaaatgtgcaagaaaacgctatgaaggggcttcagaaaagaaatcatcaaagcaaacgtgcaagaaaacgctatgaaggggctttaaaaaagatatcatcaaagcaaacatgcaagaaaacgctatgaaggggtttcagaaacgagaaaccgttaaagaaaagatgcaaggaaacaacactgtgaggggtttcagaaaagagaaatcatcaaagcaaacatgcaagaaaatgctatgaaggggtttcagaaacaagaaatcatgaaagaaaaggtgcaagaaaacaacgttatgaggggtttcagaaaagagtaatcatcaaagaaaacagcgcatctgtgaggccggtggtccagacgtggggctgtgggacccaagtggtgaactgtggcctcatcctgggccgttgggtcctgggctatgtgcaggcggaggtgccgtccttggtcccactggggaaggtcgggagtcattgctgctgaggaccacctgagcgcttgccccaagccttgccgtgcctggtggagtcccgtaccagctgctgtcctgcccctgccagagaccatgggttccactgctaggcactgagcacccaccccctgtgcccggccactagcggagacttgatgctaagcctgggttactctgttttttttgttgttttttttttttttctttgctttcatataaatcattggttgtaactaccgcgatattagccataatgtgtttatgtattatttagcatgttattatttgcttactgttgattttgaaatgagggggctgcccagggagggcctgtagatgtgctggggggctgtggggagtggagacagggccgcctggcatgtggcctggccctgcctgcatgtgtgtctcagcagctcctctccatggacaggtggggccagcctggctcccttgcccggctatggctgctgtctacgtgagcgtccgaccttttggtccttgggggctgttctgttcctaggatctcagagcggccctgagtagtccacgagtgcagacccacagtgtggactggagatgcatctcgagtggtggccggtgctgggcctgcctcatggaggctggggtgtgggagggtggcatgggggccttgagccagcacattctgatcaggtgctgcttccttcctctaaggacctagtgaatattgagatgttcctgacggccaaagaggtggaggagtccctggagaggcgtgagacggccacctgcctggcctggtgccatgacaacaagtcccggctccggaagatg

SEQ ID NO: 33285 - DNA, 1034 bp, Homo sapiens
agcttctcgggaagatcgcctgagcctgagagttcgaggctacagtgagctgtgactgtgccactgcactgcagcctgggtgacagagtgaaaccctgtctctaaaagttaaaattaaaacgcaaacttaaatgtgccaaaatgttgttttttagacatgcaagaaagcacttcagccaagcagaagggagccagctggacgaggtgcgccaggccatgggcatgctggccttcccgcccgacacgcacatctccccgtacaaggtagggcgtgcgtccctggggtcggtgtcatgctggggtggggatccagggtgtgtctctggtctgtagctgcttccacacgtggggcgggacgtgagggccccatcccagccacacagcctgtccagcctgccaagacaagcttttcttgtttgactcccattttgctcataagaaatttgaatcagggctgtgtgtggtggctcacccctggaatcccagcactttgggaggctgaggtgggaggactgcttgagcccaggggtttgagaacagcctggggaacatagtgagaccccacctctacaaaaaaaatttttttgaaaattagctgggcatagtagcacctgcctatagtccagctacccaggaggctgaggtgggaggatcacttgagcccataaggttgaggctgcagtgagccaagattgtgccactgcactccagctggggtgacagagcaggaccttgtctccaaaaaaaaaaaaagcagttgagaaaggttcaggaagcctttcagcctggagcgttcagccggggcccagcttccttgcctgtccccctggttctcctttctctacagcccctgagtcaggagttaggctgcaccgtcttccgtggttctttctcttgctgacgctttgtattttatctgtaaatattggagcctccgactctccgcggtcactggggtagggttgggggttctgccatcactaaccaggcaccctgtgctcagacctggccccaacccagcagctggctgctcc

SEQ ID NO: 33286 - DNA, 1048 bp, Homo sapiens
ggtacacagagattgccttgcaggcccagctgctgagctgggtgctctagtaagcggttaaaaagtgcagcacacgactgggcgcggtgactcatgcctgtcatcccggcactttgggaggccagggcaggcggatcgcctgagtccaggagtttaaagccagcctgggcaacatagcaggaccctgtttctacagaaaagttagttgagcatggcatcacgtgtctgtagtcccagctaatcaggaggctgaggcggctgcactacctgagcctggaaggtcgaggctggggtgagctgtgattgcaccactgcattccacctggtgctgaaaagtgacaccctgcggggagtgggcctctgagtgtggttttgagtgggctggtgcttttgctccacatagcgcagcaaacaggtgtcttgatcttccggcagaaatgtctggagaaattgaatcctgcttgacggaggtagagagctgctttaggctgctggtgccttttgactttgacccgaacccggagacggaatcccttggcatggcttctggcatgtccgatgcccttcgctcctcctgcgcgggccaggtgggcccctgccggtctggcacccctgacccccgggacggggagcagccctgctgcagtagagacctgcctgcctctgcaggccaccccagagcgggcggcggggcacagccatcccagacagccacaggtgacccctcagatgaggacgaggacagcgacctcgaggagtttgtgcggagccacgggctgggctcgcacaagtacacgctggatgtggagctctgctcaggtaactgccttcgcggggtctctgtggcgccaccctgccccggctcccgggtaggctcctccctcactggcacccggcccaggagcctggggatgcaggggcctcccctggggagctaggtcaggggtcaccaccaggtttttcctttctgtgtggcctctgcactgggctccccccacccatgccaggcctctgtggccacagggacacttctaagagctcatggcag

SEQ ID NO: 33287 - DNA, 1022 bp, Homo sapiens
gggctgggaagctgctgggagaactgatcctcgggtctcagctgcccagaggtgcctcagcagtgaggctgcaggcctgtgcggggtggacaccgctgctgcaagcctgggctgtcctcgcctgtatagagctctgccctgcgccggacactgagggtgccacagcgggggaagccacggcagggcagaactggagttggggtgtccagcggaggagaggccgggggggtgggggctggtgaggctgggctggaggggcgccatcctgtggcgtgggctgtggaggggaaggttctgtgcccggcgtgtgggggcggtgagtagaagaggctgtgggtggtctcgccctccagatgggatggctgcagccaaggagactgagacacaggcagtggagctgcgtgtgaggggaggctttggtgttaagccacagtgttcttttctaagataataaaacacttccttctcacagcatcaggtttgggattcccgggggcaggcatgggcgtctggcaggttcccctcaggctagagcagccttccttgcatggtctgcctctccggggcctgtgggagacgccagtcggcgccctcttgtgacctctgtgtgcttctccccagagggcctgaaggtgcaggagaacgaggacaaccttgctctcatccacgccgcccgcgacacactcaagctcatccggaacaagttcctgccggctgtgtgctcgtggatccaggtgagcctcgaacctgggacctgtgggtggagggacgtgtgcagagtgccatgcatggggggggtccctttcttggggggactgtggcccggtgactgaatggcccttaacccgcgagggctctgtccctcacccgcagctttgtcctctgcatcccaggtgtgccagggaccccccgggccagtggacctggcatgtgcctcccagcaggacagcttcccaggtcctgcccggccggcccctgagctgttcgcacccccgtttcgcagcgcttcacccgcgtcggga

SEQ ID NO: 33288 - DNA, 1088 bp, Homo sapiens
caccgtgtctttcctttttaacatttcccacttggtttctacgtaatactgttttccttttgacgcagatgttctgtcttcagaaaatacttaggcgggtttgaatatgtgtgctgtgcatttggagtgcctctgagtggcttccgtctggggacagatgttccgtcttcagaaaatactcaacgctggtttgaatatgtgtgctgtgcgtttggagtgcctctgtgtggcttccgtctgggagcaggccgagggtgaatctcctggatcaatgtgcagcgtcatttggtagattgcgtgtccagccttgccgcgctgtagggtgggtgtgatcatccgtggctgcgtcattcgctgagctgataaaaatcctctggaaactttcacgttgcctgctgccaaattacatagctcaaatcaccaattactttgtattgtgtaattaacaaaatattaatttcctatcagccagtgagtcagaaacgcatcttaagcatcgttctctttagtaccgtcagcgtggctctgtctttccttctgctagttaccgggttacttgtttccgtggctgaaagatacgggtttgtttttgttctcgccgatgttgagtctgatgtggcagccacatgggtttggccgtggatgcatcctccattgcccacagaaccagagtcgtccccccgactctgtggttttctttctctgtcggccgcctgcctgcctcctccaccggcctcaccaccaaagctctgatctttggagttagatgccagaagcattctgccctctgatgttcagtgggctccaggatgcagctgacagcctcccggggaccctgtcagcccctgggatcgaggccccacctccttttcctgctgtgcgtgagggaaagttttctgtgatgctctggagccatgggagtgtctgacttccaggaggtgaaagggacagaaactgaaaacccaggaatgaaacgtggacccaccaggcacaggcaggggaggagggacctaaatcagcgctgctgggaaaccttgtaccgccctagggctgggaaacaaccttcctgggtgatggggcccctccat

SEQ ID NO: 33289 - DNA, 1044 bp, Homo sapiens
ggggccctgctgggcaggcctggcttcacgttccacctgcctggcccgtcagcaccacgcacctggtgcatcgagctcacggcttcatgtttcccccaactgcctgcacactgctgtggtcggcttgatggagttgcagcctacacatggcagcggcccgggctggggaagggccccatgtcagctgcgtggatgggggtacatgggctggtgcaggagatggcacctgggtgccacatgtgccccacagccagttgagggccacactcctcctggctggcccctagccaggatggcaggggctgctcaccccacattccctcaccaagtggaggggtcctgccctctggctctcagccacatttagggatctcggagagcctgggctcgcccctttcatccaggaggtcaagatgatgcgggtccgggaagccagggcctggccaggccgtggtgggagacagggctgatgggggtggcggccacaggcaaccactagaacaaagccgtcctggtacacagagggctggcgggccctggctgggtacagtggctcacgcctgtaatcccagcactttgggaggccaaggcaggtggatcacttgaggccaggagttcgagaccagcctggccaacatgacaaaaccccatcactactaaaaatataaaaattagccgggcgtggtggcgtgcgcctgtaatcccagctactcgagactgaggcgggagaatcgcttgaacccaggaggcggagtttgcagtgagctgagatcgcaccatcacactccagcctgggcaacagagcaagagtctgtctgaaaaaaaaatagccagtggtcctcggccgaggggagtagagggaagcatccctgcacctggacggggaggaagcggtggagcccgtggtgtggctgctgtgcgccggctcctgagtgttctcactgcgatccacggggcgtctctggtccgagttccgggtggcagaatgcatcgctgcttctcccacggggccttgggtgcagcaggaagcatttggccgggcgg

SEQ ID NO: 33290 - DNA, 1021 bp, Homo sapiens
ggtgtttggccttcccctgtgcctgcaccaccgtggccacgctcttctggggtccctgcagatgctatgagggcctctggctgtgtctgcaggtctgactcccagcaccgcttctggaagcccagcgaggtggaggaggaagtggtcaatgccgacatctccgagatgctccggagccgccacatcacttttgccgggaagtttgagcctgtgcagcactggtgccgtgccccgaggccagacggccggctctgtgagcgccaagaccggctgaaggtgaggccgtggcccgagggcgggggtgggtgtgggctggaccaggtggggcagccagaggggtgctgagccccacctgcccctgccctgggtcagggtgcttgtgagcactgagaagcccatggaaggggcttatccgtggtgggcagaaattgcttagccgttggccatcagagcatggtgtctggggctcctgcccacggccctgaagcctgacacctgggtacatggcttggggactctccaggggccaagacacacagtatcctccatggttgcagcccgggtctgtgctgggcctgggatcctcaaaagtgaggagaggccagggggccagggcagctcccagccgggcagctgggcatggtgcaggggggtcgctatggccatgctggatgagggaggcctagactttccacagctgcccaagaccttccggctccagaggagggacggagccatccccacgtccctgtggctctcaggacgccctcctctgaggggcgcgtgattccaggttgtgtacactttggctctgtgataccacccaccctggtcgctgtttgtgcccaagtcgtggtggtggggggaggtggtcaaggcaagcggacccctccccgccatcagccaccgtgtcctcgctgtgcagtgccctttccatgggaagattgttccacgggacgacgaaggacggccgctcgacccggaagacagggctcgtgagcagcggcggcagctgcagaag

SEQ ID NO: 33291 - DNA, 1071 bp, Homo sapiens
aggctgagtgcagtggcagaatcatagctcagtgcagcctcaaactcctgggctcaagccatccttccacgtcagcctcccaggtagctgggactacaggcacacaccacaacacctggctaattttttaaattttttgtagagatgaggtctcactgtgttgcccacggtgatctcgaactcctagcctcaagcgatcctcctgcttcggtctcccaaagtgttgggattacaggcatgagccaccactcctggccaggagtttatatgtatactgtggatactagatcctcatgtgatttgcaaaaactttatttatttatttatttatttttgaaatggaatcttgctctgtcgccaggctggagtgcaatggcgtgatctcggctcactgcaactaccacctcctgggttcaagcgattcgcctgcgtcagcgtcctgagtagctgggactacaggcgcgcaccaccacgcccagctaatttttgtatttttagtagagacgggatttcactgtgttggctgggatggtcttgatctcttgacctcgtgatccacccacctcggcctcccatagtgctgggattacaggtgtgagccaccgcactcagctgatttgcaaaaactttcttccatactgttgtttcactttctggatagtgtcctctgaagcacaaaagttaattttgatgaagtacagcaatttatctgtttttttcttttgttgcttatgcttttgctgtcacatttcagaagccatcacctaatccaagatcacagagatttacacctagtttctaataagcattttataatttcagctcttatgtgtagatctttgatccattgtgaattaagttttgtgtgtggtgtaagagcccacattcttttgcatgtggatatccagttgtcccagcaccatttgttgaaaacattatttttccccattgaattatcttcgcaccattattgataatcagttgaccaaaaatgtacaggcttatttctgggcacttgactctattccattgacctgtttaaccttatgccagtgccacagtgccttgatc

SEQ ID NO: 33292 - DNA, 1017 bp, Homo sapiens
tgtggccctgaccccgtaccccaacaacctccttccctgtgtcagagcccgtgtgagtaacccaatagcaggcctggggaccacagtgtggctggccccctcctctgcaggcctgggctccgggggcaggtggcccctgcatgtaacttatgttagaaatgcacaatgcttgttctctggtgccacaaagaaatagtgctcgaacattaattttctcagcaaggcagtttttactttctgcagaaagggtgcccctcgcagatggagcaatggcaagagcacacctgaacaagggaggggaaggggttcttattcctgacacaggtagccctactgctgtgttgttcccctgttggctaaggttggaccacacagtctaagccaattccaattggctattttaaagagggcagggtaagagtcagagtggtggggtgagtagtttgacgggaaggacggttaggaacaggtaactcaaggtgacttaggtcagagcaggtgaccgggatgagtcaggatggagcaggtgaccagggaacagatgtgaactactgattaggactggcgggaaaattgtttactgaaactagaagcaaggggcgaagagaaccaggaattttaaatggagaatcaaagaagagatctggccgggtgcagtgggtcacgcctgtaatcccagtactttgggaggccgaggtgggcggatcacgaggtcaagagatggagaccatcctggctaacacggtgaaaccctgtctctactaaaaaatacaaaaattagccgggcgtggtggtgggcacctgtagtcccacctactcgggaggccgaagcaagacaatggcttgaacccgggaggcggagcttgcagcaagcagagatcacgtgactgcactccagcctgggcgacagagtgagactcttgtctcaaaaaaaaaaaaagagatctgaacatactgacttactgattctttgaagacaaacttggagttcactatatttaacacttaggaccccta

SEQ ID NO: 33293 - DNA, 1057 bp, Homo sapiens
ctgtcttaggctgagtgtcagccggcggcaggtgaccgcctggcccttgcagtccctccaggaccaccacgaagcacgacgcacatcctggagctcgccataccggctcccaggcctcaccctaggctctagggtgttgggcgccgcctcttcagggacctctggcccaggctccagttccctgcggatctgatgtggaggaaacagctgtttcctgggctttgcatccggcctagaagatcctgggtggagggacccatcaccctccgaggctcacacccactgcccacctctcctcctggcgctcgagtcccttgcctcattccttgggctgtctctggcacccatcgtttcggttgcctcctcatcctgaacgtttgcttttcttttctcaagaggaagttcagaagcagaaggaactttccaaagctgaaatccagaaagttctaaaagaaaaagaccaacttaccacagatctgaactccatggagaagtccttctccgacctcttcaagcgttttgagaaacagaaagaggtgatcgagggctaccgcaaggtatgtctccgccaccctggtgtcctcacctcggaggctgatggactcatggtccaagccagcggggctacaagctgctgtctttgcaccttggtccttggccaagcctccccttgccacgggggcatgggatgacctgtgaacgagacagggtgcaggagtcacagcatagctggtttgcgaggcagctgagggcggcaggaggcagagtgagcagggaggccatctgagccgtccgctgttgtgtgacagacgactcggctatgatcaggcatctgtgagatttgagacagcgctggtgcaccggggcctggggcacctcggaaaggtgtctgggctgtccgagcgcttgggtcccaagggttggggacccagggcatgcagtatccaaggcgggaggcccactgaaaggtggtcacggctgtgcaaggccaccctggtgtcctcctggccacgggactctgagcgccccccaccttctgtgctgggcaaggcccaca

SEQ ID NO: 33294 - DNA, 1605 bp, Homo sapiens
cagctacttgtgaggctgaggcaggagaatcgcttgaatccgggaggcggaggttgcagtgagccgagatcatgccacttcactccagcctgagtgacagagtgagtctccgtctaaaaaaaaaaaacagaaactagaaaagaaccaaatggaaatttctaacaggtacacagttaacaacattaacaattcaaagggtacaggtcagatgagggaagcagaggctgagttgggaaccagtgtgtggacggcagcccccagagccagagggagagacgccgctgtggcgggaggcttgacctgtgcacacgtgagagcttccggatgccgcctcccggacagacgctgttgggaattttccacagcagagaaacacagtgctgtgggtttaagggaggcgtgacctccgcaggacatcaggggctgcatgctgggtaggggctcagggagaggctgcagtgctgagggtgcttctgggatacagggctgcgacagaggagtgaggatggctgggctgtgaggccgctgggggcactgcaggaagaaggcaggtaggctgagccttcccaagcagaggccactcggggacccaggaacccctcagttagggcttctcagtcactgagcggaaggtgcccccagagggggcagcagcctgtgaggagcaggcgtgtctgggtaaccatgtggctcctgctggcctcccctgcctgtccccaaagcacagggctcagctccagagggagacgggctgggctgtcagtggtcccaggtgcatcccactttccagcagcacttggtgccagcagaggctgcaggtgtggcaggagggggcccagccgtgagggcaccaggttcaggcccggcatctcagggtggagagccagggctgtcctgaacctccagagggggtgagctgggaacttgtgtgaaggggctttttccaaaaggaaaacgggagctactggctcacggctgatgccccagacagcctcgaggatctgcaggtccccagacaccaagcctgggtgctctccagcagacggcgtggtacccacagctaatgcctgccccttcctagaacgaagagtcactgaagaagtgcgtggaggattacctggcaaggatcacccaggagggccagaggtaccaagccctgaaggcccacgcggaggagaagctgcagctgtgagtgctgggcgaggccccaccctggagggagaatctgagcacctgggccccagctcagcctctgccccgcccctacccctccagggcaaacgaggagatcgcccaggtccggagcaaggcccaggcggaagcgttggccctccaggccagcctgaggaaggagcagatgcgcatccagtcgctggagaagacagtggagcagaaggtgggtgcgggaagcccagctcaaggggccgtctggcagcaccttctagaaggcccttgggcctgctgctccctccaagcagggagaagccccgcaactcatcttcctcctccagactaaagagaacgaggagctgaccaggatctgcgacgacctcatctccaagatggagaagatctgacctccacggagccgctgtccccgccccc

SEQ ID NO: 33295 - DNA, 1034 bp, Homo sapiens
ggctctggggagctgggcagctactggggagggacccaggggccacctgcacatctgcccctgtgggtgggcccccaccccagcttctcagcccccagggaggggccagggctgctgacctgccctggctctcacagcttcctgcccccagcctggtcgtcctctgtgagggggccccagtccccctgcaggcagcaggactccaccccccggcccccttgagggcccgcctgggcctccccactccccggcctgtgagacccacttggccggacccagcgccgtgtttgtactttgctcttctcggtatgttttccgtcatgaccgccgtgtggagcttccataggagctgcaggatacagaaccttgcccaccccaaggagcccccacccccgccccggccccctcgcgctgctccggcctgtgctctgaccggtgaacccgcgcatcgccccccagaccgtccacacggccacgtgaccctgcacctccttccttctcgcctgttctgttccctggctgtccatctgaactgcttttcaggctcatatggggtgcgggggctactgaggacggacccctcctggggtgaatctgcaccacgagggggctggctggccaaccctggcaccccctctgagctccatttcagtcagaggccagcaaagggcagcctgtcccctttgcccgcagcacctgcccgtcgtggtgccgcctgtgagacaagcatggattttatgtttccaagcaattgaacaaattaaaagaacgaagagtcacattttgtgacactttgagatttgaattctccgtgtccatgagtgaagcatcatggggccactgctgtggggttggctgcaggttgtgtggggaaggcggctgtcacaccgaggcagaccggagtccttgggacagactggttggcaaagctgaagatagagacctttggcccttttgggacacagtttccagcccctggtctggtgggaccctggatctgggtcagagccttcctcactcagggccgccgaggc

SEQ ID NO: 33296 - DNA, 1028 bp, Homo sapiens
gtctggtcccctcaggatacaggaggggctgggtcactgacatggctctagatgccccaccctggtggcagggctggggtgcaaggggacaccgtgttgctgatggggagactgaggcacagggccctgggggttccaggagcaggaggaggccagggctggcctgtggggctctggtgttggctataggtgaggtggaccccgcagacattagcgcagcagggcagggcactcaggtggctgccgtggggtggatggacccggggtgagggcgccggggcacctgccacaaccagtggcgggcagggtggctggcaggagggtggctggtgggtgggctgcggctgtgagagagcagtcggggacgatgcctggcgtcccggcctggaacggtggcaggtggactttgccaagttgtagggtggggaggtggggcttctggttttggagggagctctgaggggagtgcgtgcaggtgagggtcatcgtggcacagacatggggggcagttacgacttgcggactgatggtgtgtgcgctgggtccctgggccagtggggtaagcaggtgaggaagggaggctgagtccatgagagaaacagctgggggaactcaccctgggggtctccaggaggcctgggagggagctcagcaccgtggggtgcctctttccagcctgtgtccacactgctgcttgctgggcctcagtgcccctgatgggcgtgtgcctggagggggctggcagtgagctcactgaggggagggctgcttccctcctggggaatgccagcccatccttgcctggagtcccggcaggaaggcagcaccagccctgaggaaggagaaaaaccagttgggctgtgagaggggtggtgggagccctggacatcgagatgggaggaggcagggcctccagggtgccaccgtctctgggtgcccgccagacttggagctctgcagagggtggtgtagggtcttgatttccgtgggcccatgctgcccagctgcctccaaggctcctggctctg

SEQ ID NO: 33297 - DNA, 1024 bp, Homo sapiens
atatggtatatatacatatatatatataacatatatggaagaggaaaaggctggtacaacggaggcctgcgaccctgggggcacaggaggcaggcatggccctgggcggggcgtgggggggcgtggagggaggccccagggggtctcacccatgcaagcagaggaccagggccttttctggcaccgcagttttgttttaaaactggacctgtatatttgtaaagctatttatgggcccctggcactcttgttcccacaccccaacacttccagcatttagctggccacatggcggagagttttaatttttaacttattgacaaccgagaaggtttatcccgccgatagagggacggccaagaatgtacgtccagcctgccccggagctggaggatcccctccaagcctaaaaggttgttaatagttggaggtgattccagtgaagatattttatttcctttgtcctttttcaggagaattagatttctataggatttttctttaggagatttattttttggacttcaaagcaagctggtattttcatacaaattcttctaattgctgtgtgtcccaggcagggagacggtttccagggaggggccggccctgtgtgcaggttccgatgttattagatgttacaagtttatatatatctatatatataatttattgagtttttacaagatgtatttgttgtagacttaacacttcttacgcaatgcttctagagttttatagcctggactgctacctttcaaagcttggagggaagccgtgaattcagttggttcgttctgtactgttactgggccctgagtctgggcagctgtcccttgcttgcctgcagggccatggctcagggtggtctcttcttggggcccagtgcatggtggccagaggtgtcacccaaaccggcaggtgcgattttgttaacccagcgacgaactttccgaaaaataaagacacctggttgctaacctggccctgtgctttctgtctccagttctgggataggggaggg

SEQ ID NO: 33298 - DNA, 2095 bp, Homo sapiens
ttatattcactctattttgtgtatttcaaatatcaacgtggaaaataacttaggagccatcccatttatgaacttgggacttaaactttttaattttcccaaaatgttttaagtgccctagttacgtatttaaatgtgatgagaacaacaatattttaaagagcagaacgccaacaacataaagcaaacaagttctgtgagcacagcctttccttgtgtacttgatgtgtgctctcattccccacaactgatggtggttcaaatctaaactgccaaatggagatgaagaggactcatgctttaagcacgattactttgagtcatttccttttctttccttccattttctcagccacccaaacccagcaaccttcagttttgggctgatggttggtagagtgaggacttactgcacaattttgagtttgtgtaagcttttgtgaagagctctgatctcagtacaaaaattgtcctctcctgactgcattaataccagagtctggcctctgattataacagtaaagattttattttaagagtatgaggtaattaactgagaatttgaaagaatgatggacaatttatcgtatctattcgtatgtaacatataaactaatataacttttggagccatgcacaacaaaattataaggtcagcaggctgcaggtgcgacttgctttgtttctatgcaatcagcttatccagggctttcaaaccagtacttgctgaagtgtgcggacccaaatgaagcattaagcagagtcctagaatgagtcaggaagataatctgaataggtagaagacaacccactcctcctaatcctgtggggcttacatgggtacagccttctgcctattcagattatcttctccttctaaaagtaatcaaatcttacaaagtttactcacatggcagaatgtgaactttttttgtttgaagattcagtgtaaaacatgcaaaagtagctggaattaggcttactaagctacaggattctctttaccaagcaagaacttaaaagaagtgctaagatggtgctgaagttcataatccaaacgtattttgtcctgtgctatttatttatttttagagacagggtctctctatgtggcccaggcttgagtgcagtggctatttcagaggagagcaatcatggtgcacttcagtcccaaactcttgggctcaagtgattctcccgcctcagcctcctgagtagtggttactacaggcacactcagccttcctggctctgccctgtcctttttagctgggcaagtgggcaaataacctttctaagtaaataattaatcagcagcaacagaagccataaggctttttactcatatattctgatctacgtgtttggttttgcctttttgtttttgttttgttttttggtgggctgctcatggccatagaatgcatacaactttggataagcattttagtcttctgagcctcagtctcttgttttgcttgattgtagtaagtgtgaccttgttctccaaatacgtggtaccatgtcctgactccaggcctttgtgtgggctgttcttgggtgtggactacctgccacctgtccttcctctttgagcataattcatggctttttaatggccacttgtgacctttctcccctgttgggttaactcttagaggtaggactctgtcattgccttgggcagcattgcctctgctggtgcattctcatggcatacactcagtaagtgccgaataaatgggtatatggcttagggtaaacaaacagcccattttaatgccgatatctggcctgtttgcctctctgttttgtaagtaatggagcatctgggagaagaagctgagtctagaaaggaaatggcttggctaaggtcactctgaaacattgcaagtatataagtccaacaagtagtagaacagatctgtactaccaccaagatggagcaagaaatctacctcgtcaatttctctatccttggtgaagataaaaaaatataaagtacacagaatacgaaagaggagatgacatgggggctttagaggattaggcttgtatttgtaaactgtatgatttgctaattcctttttaatga

SEQ ID NO: 33299 - DNA, 1026 bp, Homo sapiens
atggtgaaaccctgtctctactaaaaatataaaaaataagctgggcatggttgcagtgcctgtagtcccagctactcgggaggctgaggcaggagaatggtgtgaacctgggaggcggagcttgcagtgagctgagatcgcgccactgccctccaccctggttgacagagcaagacccctgtctcaaaaaaaaaaaaccaagacagatttcaaattagttttgttttagtatctgctttcctaaaaccacctggccccagatgagttttcaaagcattttactttctgtaatacttagtggtttcaacaaaatatacaaggatagaaattgcagtgttggttagctgagtgatggcctcagctcaaaaactccagtagtggataggcacagttgctcatgcctgtaattgcagcactttgggaggctgaggtgggaggatcacttgagactaggagtttgacaccagcttgggcaacatagggagaccccatctctacaaaaatttttgaaaattagctgggcttggtggtgtgtgcctatagtcccagatacttgggtggctgaagtgggaggtcacctgagtccaggactttgaggctgcagtgagctgtgatcataccaccacactccagcctgggagatagcacaaccctctctcaaaaaacaaacctaaacacaaaaccccaatagtgagactaccctagtgggtgtgtagaaaaaatgctttttttttctggaaggaattggaacctcaatttttaagttgacttgagttggcactgagagagttgatgatgtgaattaaatttgttatgccgtttgctggtgcggtgggtggctcacgcctgtaatcccagtgctttgggaggccaaggcaggcagatcacctgaggtcaggagttcgagaccagcctgggaaatgtggtgaaaccccgtctctactaaaaatacaaaaaattagctgggcgtggtggtgggtgcctgtaatcccagctactcgggaggctgaggcaggagacttccct

SEQ ID NO: 33300 - DNA, 1046 bp, Homo sapiens
tcctctgggcctttgtgtggtcaatttttgttcctttcttctgcccatgtgcccccttaccccatgtgtttgggggataggcatgctttccctcttccttccttctgccaggtctcagcttgggccccacactgaatgctgtgcctgactcctgcctgttttgggaggctcttgtcttttccatcgtcacccactcccattctcattctgttccagccacacgggcctcttgcctgctctgaagccctgcagctctgctgcctccgactagtgcccttgttccttctttgacctggaatgctgtccccaggtatctgtgtggcttacccctcaccctccttcaggtctttgtgcttctccctctcgggcaccttctctgaccactgatttaaagtactctgttgtgaccaggtactattacagtttatctgtgatcctggtgctttatgaagccaagacgagaggatcactccagcccaggagtttgaggttgcagggaaccacgattatgccactgcattccagactgggtggcagtaagactctgtcccaaaagaaaaataaaatttaaaaaaagtattatatatatacacacacacttctgagacggagtctaactctgtcacccaggctggagtgcagtggcacaatctaggctcaccacaacctctgcttcctgggttcaagcggttctcctgcctcagcctcccaagtagctgggattacgggtgtgtgccaccatgcccggctgatatatatatatatatatatatatatttttttttttttttttttttttttttttttttgtatttttagtagagactaggccatgttggccaggctggtctcgaactcctgacctcaagtgatctgcctgtcttggcctcccaaagtgttcggattacaggcgtaagccaccatgcctggccaaaaaaactttttttaattattctgttgctatctggcactccacatctgccttagattttctccatagcacatacctccaacattccatgtgaattcctggctgcattgggtca

SEQ ID NO: 33301 - DNA, 1129 bp, Homo sapiens
agccctagatcttgagcatggcatgtggttcctgcctgtctttcctttatgtatctatgtgtatatatgtaaatatatacaacactttttaaaattattttattttattttattttatttttttgagacggagtctcgctctgtcacccaggctggagtgcagtggagtgatctcagctcgctgcaagctccgcctcctgggttcacaccattctcctgcctcagcctcccaagtagctgggactacaggcgcccgccaccatgcccggctaatttttttgtatttttagtagagacggggtttcaccgtgttagccaggatggtctcaatctcctgaccttgtgatccgcccgcctcggcctcccaaaatgctgggattacaggcttgagccaccgcgcctggcctacacacattttttaaaaaatgtgtattttttctttcctctgtgactctggccagtgatcctgcctgtctttctagcatctttgctggccagtcctttgtggttgctgtgagatctcatcatgctgcctgtagctcttgtgatgagccgtgccctgtcccatggatctttgcatgtgctgttgcttcttcctgagttgcctaattttgtgttgctgtggtggttttatggctcacctctcatctctgtgaagcctttccctatttctaccagaaccgggtgttgcagaccctgggcccatggcacttgtgtgtgtgtgtgtgtgtgtgtgtgtgtgtgtgttttctcccaagtttgtcatgcctttgtgagtactgggccctcttatgacagttagcatgttgcacaggctcttgccccattctcttctccaggttgtgaatttttcaaggtgagggccctttgatatgtcttcagtgcctaaatgtggaaagcacttagttaacaagtagagatagtttttgggtattattctgttttcctaatgatttttatttcataaaaatgtgaatttctagatttttggttaaaatatgtgttagaaataggaggcttctgtgttctttcccctccaaaattcggagttggtgtaatctttgtagagccttgctacacaaatctttcagcagcaaagcatcttcttctcattgaatcctcacagcag

SEQ ID NO: 33302 - DNA, 1048 bp, Homo sapiens
gggcgtggtggcgggcgcctgtagtcccagctactcgggaggctgaggcaggagaatggtgtgaacccgggaggtggagcttgcagtgagctgagatcgcgccactgcactccagcttgggcgacagagcaagacctctgtctcaaaaacaacaacaacaacaacaacaaaaaactgggttgagccaagtaacagttttgggcttgttactgtaccataacctagtctccagtggttctcaaagtctggtccccagactggcagcttcagtggcctggatgctagttagaaatgcacattttcatgtctcagacctactgcatcatgaactctggagtggggcccaacaatctgtgttctaatgtgtccttcatgtgattctgatgcccttgagttgagagctactgtctgaatttcctgactgataagtcaggaggctgttggcgtcagtcttggtgaaagagcttggtggttggccattcttgggattgtgggtgtggagaaaagtggacaggcctagctaggaaggcctctggagtaaaattgataagttgtgttgtttgggataaggagagatgaggggaagttctggtgccagtgatagccctaagtttttgtctgacagaaccagatggctagaggtgccatttactgtccagatagcattctttctgtgtgcatttacattaccttccatttcaggttcagaaacaagagaaagcccattaagaaataaaaatttgtggacttccttagctcaagtaacagtttctcaatgaaccccaccttgatacccctccccccatttaaaagtgtaccccctctgcagggctgggcgcagtggctcaggcctgtaatcccagcactttgggaggctgaggcaagcagatcacttgaggccaggagttcaagaccagcctggccaacatggcgaaaccctgtctctactaaaaatacaaaaaatagctgggcgtggtggcgcacacctgtaaccccagctactcaggaggctgaggcacgagaattgcttgaaccagaaggtggaggt

SEQ ID NO: 33303 - DNA, 1034 bp, Homo sapiens
cgcccggccttttttttcttttgtgagacaaggtctcactctgtcacccaggctggagtgcagtggcgtgatcttggctcactgcagtctccacctcacaggctgaagtggtcttcccacctcagcttcccgcgtagctaagaccacaggcacatgccaccacgcccagctaagttttgtatgttttgtagagacaggattttgccatgttgtccaggctgatgtcgagttcttgggctcaagcaatccttctgccttggcctcccatagtactgagattacaggtgtgagccactgtgccccgcctacgtggaattgttttatatgagaacagaggttctaccatcattcagtgatagcagggctgaaatatatttcaggcagactagtgtgatatattagaaaatgagggtattttaggtatgtgtaaatcatatttgcaaacttgggttttccatttcagtcttttccgcccccggaggaatgggttggagcttggtccgtctcacggcctggctctggggaatgtcctgaatatctcactgctgtcctagggttgagacctccttctgctcagttggattcacggaattatcagagtgggctttagctgacatctaagccagtgggcaaggttggagcagtgaggcctactgtgtctgaagtgttaaagctccccagagaaccgggcacggtggctcatgcctgtaatcctagcactttgggaggctgaggcgggcagttcacgaggtgaggagatcgagaccatcctggctaacatggtgaaaccccatctctatcaaaaatacaaaaataaaaattagccgggcgtggtggtcggcacctgtagttccagctactcggcaggctgaggcaggagaatggcgtgaacacgggaggcggagcttgcagtgagccgagatcgcgccattgcactccagcctgggcgacagagggagactccatctcaaaaaaaaaaaaaaacaaaaaaaaacaaacaaaaacgaaaaaacgaaaaacctcaccagaaatgc

SEQ ID NO: 33304 - DNA, 1034 bp, Homo sapiens
tgaaaagaagaagttgtctttccctcatcctcccaagcctctccaactagaactgcattggaatgtaagctccttgaaggtagaggatttttgggggtatacgtaacataaaatttaccattttaactattttaaagcatttagttctatggtcttaagtgcattcacattgttatacaaccatgacactgtctccagaactttttcatcttctcaaactgaaactctgtcccataattccccatcctcctttttcttcccccagtttctggcactcaccattctacttcctgtctctatgtattctattctggggacctcatgtacgtggaattttacagtatttgtcttttttgtgtctgccttatttcacttagcatagtttcttcaagattcgtccatattgaagcagatatcagcatttccttccttttaaagctgaatactactccactgtgcagatagtctacattttggttatctattcatctgttgatgggttacgtctaccttttggctactgtaatagtgctcctgtgaacatggttgtacaaatatcttctggttcctgcttttaattcttttgggtagacagactgtttttcaccctgttttgttcaatgttataatcccaacacctaaaatcagtgtcttgctcatagtaggcactttatatttgaaagaatgaaacattcatgaatgttatgtcttaatttatcttacatggttttcatctctttatcagcccttttccttgctgattctctcagatttatcttctaatctattatatttttagctgtgcctggtctgctatattcaactcaactgagtttttaatttcaataccaatacttttttttttccaagtctgcaaatcatgaaaacagtaatttcctgttctcctgtagaagaccttccatactgtcccatgcctggctcctggaggatctctcactgctggtgggaggctgtgtttacctcaggggcatctctcagtggctctcccggggagaggggggctccccatgagc

SEQ ID NO: 33305 - DNA, 1032 bp, Homo sapiens
gtgagaagtgaccagaagacgagtgtgagccctctgtcacgcccagacagggccactagagggctccttggactagcggtaacgccagtgcctgggaaggcacctgttacttagccgaccttggtctagcggtagcgccagtgcctgagaaggcacccgttactttgcaaaccaggaaagggagtctccctttccgtgggggagttagagaagactctgctccaccacctcttgtggaaggcctgacatcagtcaagcccacccgcagccatccagaggcctaaccgtctccctgtgatgctgtgcttcagcggtcacgctcctggtccactttcatgttccgccctgtacatctggctccgccttctagatagcaatagcagaattggtgagaatattaaagtctttgatctctctgagaaatgcatagaagaaataatgtaagctgtcccctctctctctctgcctcggctaccaaacagggaagggccccctgtctggtggacacatgactcgcttgaccttacctatcattggagatgactcacactccttaccctgcccccttgccttgtatacaataaataacagcgcagccagacattcagggccactaccagtctccgcatcttggtggtagtggtgtcccctgtgcccagctgtcttttcttcaatctctttgtcttgtgtctttatttctaccatctctcgtctccacacacgaggagaaaaacccacaggccctgtagggctgatccctacagttctatgctgtgttctttcttggttaagttttcttttttcctggaggctatttttggtatcttaagacagtttgtatgggaagtaaatttgagtccttgcagttcagagtatgctacttttgtttttgtgaggtggagtcttgctttgtcgcccaggctagagttcagtggcgggatctcagcttgctgcaacctctgccacttgggttcaagtgattctcgtgcctcagcctcccgagtagctgggactacaggtgtgtgccaccgt

SEQ ID NO: 33306 - DNA, 1061 bp, Homo sapiens
tatctcaggagatagcacatgataaaaagaagtaatggtgtcttgtctcttcagatttgggttttataaacctgagccaaaccacatatgacacccaatgtgcactgagcacttctgacatgctaggcactgtcccaagtgcattctcctgtcgccttgtccatgatcctctggattccacctcaccgcatcctgtctcactggctctggttccaggcaggtgggtgagatggagtatgagtgcaggagtggcaagtcattccctgggcagcgctgctctagtgctatggggacaggacagttttcagccacacctttcagaatctcagcccttgagaaaagcttcatgatcccttctcccatttcttgcttttctcagttgtgacatgttttactgatgatctttgttcattaggtgtatctggtgtttgtctaaaaattggaaatcctcagtatagtgatactagtaatgttggtcctgacttagcagggctgagtctaacttgattgggcacctcttgaatggaaggatccatttttctcatgttcatcctctgctttgggttcagtggagagtctaggtgcatgttcaataagactcgtatcaggtgtcttaaccacatgactgcagcgggtcttggcgtggccccacccacctcgccctcctgacagatgcgagagcgggaggtgcgaagaaagaatcagtccagattgtgaaaaaagtctgagattgggcaaccatggatgacttatgtgtggaacacatttccaaaggaagaagtttctgccacgaaacttttcagcaacctgtgttcattcacatgaggagattttttttcctttcttttccttttgttgttctttttctttttttttcctttttttcttttcttttttttttctttctttttttttttttttttttttttttaaataatagagagacacaatcactgacaaaacggccagaacaagctcttacaaggccatggaggcagcctcctcgctcaagagccaggcaggtaatgtggtcagcgccctttccttcttggcttctgggt

SEQ ID NO: 33307 - DNA, 1049 bp, Homo sapiens
gaggagtgtaggccttccagtgcaggaaggtcagggacctaggcaacctgggcggggctcatagagctctgcggcttgccactctgaatcctcagcgaccactcctccgagtgggattttctgcagggactcaaaccaactcagtggtggtcgagacctgttcacggatggtgggactggggctgctttacagtttgatacgtgtagataattaagcattttgtgatgtttggacacactggagaaaaggcagtaagaattatttactgaaacatctaggagcttactgaaatatgaaaaggcaaattttatacaaattatttttcctttttcctttctttcttgtccaagttcaggttaaaatcttagaaaattaaatgaaaggtcatttacagttccaaagaagaatattaaacatttttcacttaagttgagatttttgctttaaagagcttttaatgagtttttctgttatcataattttggtccggttattcacttgagttgttgcttatactgttgtcaggtacagtagagagaacatggagcctgctgagatcttctctgttattcctgatcctaagtcatgtatatcgaaggctttgatttagagtaatgcatgaggccagtgtagcggggtcgaggcctgcccatgagtcaggggagctcagtctccctggcctaggcagttgtcctgaccttgagaagacatagatgaagcattttatcatcattagacttaaattttaattcttcagaatgtcagaagttgataggttgttaaatacatttatataatacattaaatatgtgaaattaatacaccttcctacattttgaaggtgatgcatagatcccatagtgtgcatcatgttccttatatgaaaacgtttaaattactgggtcttttccattaaactacttttgtatggcttagataaatcttccattagtgttcatttttatagaattatgctgttaaaactactttaggtgaacaaataaacttgtctattatatattaacgcgactgaactacagtaaatgtt

SEQ ID NO: 33308 - DNA, 1248 bp, Homo sapiens
atccaaggccccggaccaaggggatactgtaatcaggttatgtacaccaacctctgcatcagttgcttctatagagcatcagccctcatgtttcattgtcttaatgtcggggagcagcctggtgtcctgccccaggtgtccgcatttttgcatggtaaggaaaaggcttacttgcccttcagctcataaaagcagaaggtgtgctattcacagtaccatgcgagtagcccacagttaattcccggcagattctttggctgtgttttatctttaatgaacgtttctgactaatattttgttgtaaaccattaagtaatgtaacgcatgtaagatgcttagggtgcctggccaggactccgtggtttcctgttgtgacagtaataatggttataataataaaaatgataaaattgccatcattctatttttatccaaaagtataaattttgctttggcatgaaaagtggtcctcttgactgcattatgcatgcgaggatgaaataaacctagaagtggcagaacactggatttgtgtgtgtggcgctttagggtgctggactgtatggctgagggctggttgggttcctctattggctctgctcaaatgttgcaggatacatagccccaaagatggtctaggagcaatctaagctgtgttactccaaaggacatgaaaaagctcaagagtaaaattaaaattctcaaaaaaaaaccccacgaaatttaaagatggggaaaaaaagatggtataaaaatggctctggttcaataagcagtcacccaaagtaaagactctatcttgaaaggcttttggtgaaaatgaagggatttcatttgaaattacagcatgatgaattttgcatgggtggccagccagctagcccataactgatagatgcattagaagtcagccagcgcataggtgctccctctatattatggagaaagcaaaaccctgcaaatgaccaaatggtgtccaaagagcagcatgacattggcatcagctgaataaccaggggcacatgggggaacgtggatgggaatgatagtgtatctcagcggggggtggggtgacatcgttccctggggacattgggaaggtgggcaggggcaagtgaactcagcactctgcagtgagagggacagtcccatgtgtggcagcattgtcccacttcagatgccaggagtgggctcatcctagaggagcggagttttccgagaggaccatctcctggtttcctgaaggag

SEQ ID NO: 33309 - DNA, 1047 bp, Homo sapiens
tataaaagcttagattgtagctgttctaaaaacgtaagtactccattgtaatagggtggcatcttcaggtagtgcacatattggcaatagaggtcctgaattgtttttctaagactgatctgagagccattgggccatcaagcctttatatatctgcttctaaaattgccccacctgctctagatggatctttgggcctttcctcagtgttcatgcaaaaattaaatgtcttttttcagcatactgactccaggtgtagttacatctcagtgctgtcttgagtatatattttatctcttatacctgtatctcccaactagaaacagctccagtgtttttaagagaatgtttcttaaaaccaataggaaacttaagcgaggtttcatgacacaacctttcatgtcgtgaaaggcagagggtgactgtgtgtgatgtgcagagtccttggacaggagtcgggggctcctctgtcccactgctgcttcttgagtgggtggagtggtgcttagaggatctccgagaggtccccgcagctctagggagatctgattttgtgttttttgtttaagtacttcacacagaagcctaggtagatttaaaatggggtgctcagggactggggaacaagacggggtggggtggggagatgggcatttggagagtctcatgtagctggagacgttaagagctgagcacaccacaggaaaggagggaggatgctgtgtgagagccatgctgtcaggagcaagcttgctgctcctgtgctgccctggccctggccttgcttgcccatggtgtgtgtgtccagaggtgtgtgtgaggctgccagaacaagtgctgggtctgtcacagagaagtttaaaaaagaaaactaagattataaattagcatctagttccaaaaccaaaaaaagtgcctgtggatgtatataaaattaagatgataagaaagtgctcctgagaaggctcttgccagaagcctgatgtgagtgtgtggcacctgtgatggcagggctgtgagctgggcttctgtcctcctctgtgtccc

SEQ ID NO: 33310 - DNA, 1035 bp, Homo sapiens
cctgaaggaatgtatttctaaggcaaataggcaacttggtactatcttattctgagtagagagtggagaaagtattttcagactgaagaaaactttgaaaagtcaggagctaagctgctcggagctcagtgccgcagcatggctgtggtggacgcgggaaacaacgggaaagttcttgacagagtctgtgtccgctcagtccctgcacttttcctttccaaatgcatctcgttggatatggaatagatcgtagatgttgtagactgagatttgggactatgttgggaccgtacaggtgaatgtgccacctccacaaatggcttctccgagtgagtcacgtcacctggtgcgtggaggtggagcctgcggctggagtaaggcttgctgtgggacgccctcgtactttgctctccttgcgggtggttgccgagccgagagcattggatcctccccgactgtggctagttgtctgtccggtggctgggagggggtgtggtgggaaaaagtcggaatctctgcaatctgtgtcatggactgtactattgtaaggtctatattctgtatgtgggtcccagaccctgatcaggaaatgagcctcatgtgtgtcgttaacatttatatatttccattcaaaatatgtattcagtgtttatttcctcaaaacagactttgttaatgtaggaaatctctccaagtggaaacgtgctaactttttctgtaaatctgaaataaaaggtgctgttccttcctctgacccaggactgctttgtgttttctgtctttctctccatgcattttttttctcatttttaaagctttttaagtttgttccaccacgttaagggaagagcatgggttggtggatagcgctggggctctctcccctgagccatgcagaaggcccctttctctgggccttggttcccccatcagatgggtcagcttgggcgactgtgtgggtgactctctgagtggggccccagacagtgtggccactgcttccccatgccctgtgctcccctggctccccctcca

SEQ ID NO: 33311 - DNA, 1034 bp, Homo sapiens
catgccaggcagtcgatgcatgggaagtgtgaatactgcctgccgtcagcgtggcacctgccatctggattagggtgcctttgatttctgttgattttcaaatctgatttgaaatatcttggatgtatccttcagggttgtgatcctgttacttcctttgccattgctgaggactggcctctttctgtaacagtcatctggttttaatctgattctgtatttgtacgttctgtttgggccagacgtttgcccatgcatgttattatatatccttgagtagcaaaatgggattttctgccactggagacagaagcagacggcttcccttgtggtaagaggtgcagaagggactgccgggcgctgcttacccgcctgctctgcccccgcagctgtgtgagaagccgggcagcctcctgctctgtgaaggaccctgctgcggagctttccacctcgcctgccttgggctttcccggaggccagaagggaggttcacctgcagcgagtgtgcctcaggcaagttcccacgggcgggcagctctgcagcctggccggccacctgctcctgcaaccccctgcaccaagtcctgccctgagctgcctgcagaggacaagccccctccccacccccaccgcctggccctctctggagcttgtagcccacagctggcaggtgtacccacctctcagtagctgcagggtttgctctgatttcagtcgtatgtgcccccttggtacctttccatcaggtggcgggcagggtggcgggatgacaggtcatgggcttttcatcccgtgggctggcctgagcctgtgctatgtgtgaggcggccaccacagggcactgccgctcagacagtgcagcattaagggtacaggtaacctggttggtcaccgaacactgaagtccataggaacatggagttctttatgaagacacagtgtcaccttgagcctcagtttcaacagaaagaacagctccaggcttgtcctgggttgtcagtgctgttgttctgcctccatgttactgcatcagg

SEQ ID NO: 33312 - DNA, 1074 bp, Homo sapiens
ggtaatccttgatggctggatctttttgctggagaatgcttggactagtgagcaaggttggaaacagggccaggtgctttagcagcatggctgcctctgaagaggagttgcttgattttagtggctcagaactgcaatttaattcttgttctttgcacctctctctccaccccttctttaactttttgttagggattcactcatgtttcgtgtgtaaagagagcaagacagatgttaagcgctgtgtggtaactcagtgtggaaaattttaccatgaggcttgtgtgaaaaaataccctctgactgtatttgagagccgaggtttccgctgccccctccacagctgtgtgagctgccatgcttccaacccttcaaacccaaggccgtcaaaaggtacaggtgcacctgcgcagccttgctgtgggttcagatgcaggccagacgcaggcccatgggcgcttgggaaggtgggctgttgggattgtcaccaaagagcattaattatcttgagtgactaactggacatcggctgggttgggttttctttgacaaaggacctgtctcccttttccttctttccatcctaaatatcaccctaaagatgcttaactataggagaggggcaacctttggaccatttgatagattttgtttaccctggcttttttttttttctttatagagatagagtcttgctctgttacccaggctggagtgcagtgcagtcacagctcactgcatccttgacctcctgggctcaagctgtcctctcgggctcaagctgtcctcctgcctcagcctcctgagtagctggaactacaggcacatgccaccacacctggctgatttttgtaaatttttttttttttggagaaaaaaaatctccctctgttgcccaggctggagtgcagtggcacgatctcagctcactgcaacctctgcctcccaggttcaagcgatcctcctgcctcatcccttcagtagctgggattacaggcacgtgccaccatacctacctaatttttgtatttttagtagagacggggtttcatcatgttggtcaggctggtcttg

SEQ ID NO: 33313 - DNA, 1034 bp, Homo sapiens
attattagttgctcttttcactatgactggagtcagtgtttggggtccttagggtgtgtttctttgccttcaggtaaaatgatgcggtgtgtccgctgccccgttgcctatcacagcggggatgcttgtctggcagcaggatgctcagtgatcgcctccaacagcatcatctgcactgcccacttcactgctcggaaggggaagcgacaccacgcccacgtcaacgtgagctggtgcttcgtgtgctccaaaggtgaggggcctgggggtgtctgcggcacacgcctctcacactcccaggagccacatatcaaggcaggctcattccttgtctgcgctgtgttcattgatgttgacagtgttctgtgcgtcttcacgttaatagtatatcacagtagctctaaattaattgtaatcatttcgcaaacatacaggaaattatttgtggtgaaaatgacatttgctctcgtgctgatgtacagatcgctgttttaaaactgatgtttataagttaaggctgtaataagtgtagactgtgaagcactgaatctgggctgagccatagcagacaggctaagcctggccgcctcgccctcctcttgcaggggggagccttctgtgctgtgagtcctgcccagcggccttccaccctgactgcctgaacatcgagatgcctgacggcagctggttctgcaatgactgcagggctgggaagaagctgcacttccaggatatcatttgggtgaaacttgggaactacaggtgtgagacatagaatcgtatgcttttatgtcttttctgttcacatgtgttcgctttacagtacttaaagtattgaaattattatcgctgtctctgaggagtctgtgaatcctgtttttaatatttataatagatggtggccggcagaagtttgccatcccaaaaatgttcccccaaatattcagaaaatgaagcacgagattggagaattccctgtgtttttctttgggtctaaagattattactggacgcatcaggcgcgagtgttcccg

SEQ ID NO: 33314 - DNA, 1089 bp, Homo sapiens
aattgggccaggttcaagtggagcatctgtacttgcaaaccaaattggcagcatattaaaagaattacacaccagggaaaataaccctagaccttgcattctagtgctctgcttatctgtgacttcagacaaagatggagagagctgaccatcagtataatttagctgaatgaaataatgagatattttaggaagaagaacattgaatgtcagaagttaaatgtgagatccaagaagtaacagtgaacagacaagtttgtgggtatgtggatatgtcttaaataagtcaggttgtgtcaaattatgatggatgatgatgactgcgaggcaggaaggaagatgaaaaggaggaggcattgaacactaatggtcacagggagcaccgggagcgtggtgacgccagggtgagctgcttgttctgtgagggtggagggaagagatttattaaccttagactttgttaaagtatacatgtgacgtctacatgggaaactgctaaatgaatagaagtggaaggtgtaacttccacaccattaaagggtaaaaaggagaatgaagaaaagtcaatttagtagaacctgcgggaggaagatgggggaaggagaaataatagtaattagaaagcacagattaaaaaaaaatcaaaatgtcaataatcacaatatatgtaagtggtttaaatgtataagttaagactaagattcacattagggtcagtacatagtaacaacaaggaaaggctcccacaggccttaatgtttgtagttattggggtggaggagacacaggagacagcatggagaggaagaactagattagatgcacgtccgacagttggaaagatcctaaaggtagtgttcaaagaaaaaactaagagaatgtgattcacagccaaacaaatctatacataggattctggtagcagatggcagctgctcacttccagaacaaaaaatgtacacaaagtacatcttcactgaaactgtgggacaaacagacccatccactgaaagtccaacaggcagaggaaagtactggagacctgcagtgtcacccggacacagggggtgcagagacacgggagtgcgg

SEQ ID NO: 33315 - DNA, 1084 bp, Homo sapiens
aatctcttcttacgagcccacaatagtgccgtgtacttttcagaggcacatgtactgaggcgtgaggtccgagccagggcgtggacctgtatgtgaacatgggaggaggggacctgggacctgtgagggtgtgtgccagccggtggggtgcacctgaaaagcatggagagcagttccttgtgaccgagtggggtttaccccaggactgcaaggagggcttaacaaccctatcaggtaaaggaggaaaacaaatccagagtcattttcatgaacaccagaaaatcatttgagaaaattcaaacctattcctgatgaaaacttcccaagaaaccaggactacaagtatgcttagcttgctaaaagacatcagcggctgccagctgatgctcagtgagccagacacttgtggccggttcagaaataaggcaggacgctcacgccgctcctgtacccccaaggctgcgggtgctgggtgatgcaggcagggcagaaacagcagagcagcaagaggcaaacagtgtctctcggagaatgtgacggctgtgtttggtgatggccttatgtgaactgtagtgacaacagtgagaggccaggtccacaggttttcccctgccctcctcatgtatgcagagccacaaagagcattgatgcgtgtattgaatggagcaggcttctgtggaaagttcggcagtgtcactgacggacacaagagatgatatggatgagtggcggtacaggctatgtctcagctgggaaaggagaggctgtgagggtggaaatcttccccagtgcaagctcgttgtaggtgcgataaaaatagcaaaaacgtttaaatatacctggacaggcaatttcaaagtccatgtagaaggaaagatctgcaggtctagccagtgctttatcttgaagccttactgtgggaagggtgggcgtgtcctgggggtgacagtgttccccatggcattcctgtgactccagcggggcccaaacccaggcggatggccagggggagtggggccaaagccagggccgggcagcccacgtaccacgcactgatgcctcccctcacaccacttataaaggc

SEQ ID NO: 33316 - DNA, 1802 bp, Homo sapiens
acatcagcaccgcggctcagcgcgtcatgacaaagcatctgcagagggcagatgagcacccccacttctgtgttgaagagtggcactctgggttgattagtgcattttattattgtgaaaagcatcttgcagagaaccacattctggtaccatttctggttttaaagggtggcctgtgtgggtatgtagaaaggacacggggccagcggtcccagacaggggcaccctgggagattgcaccagggctgggtgcgtgggcagttgtgtcagaggccgcgtgtgaatagtgactccgaagcctgccgcttcctgggaccatgtttatcccagtgtttatccctgttcacacacgtggttttgtttgaacacgtgactgttacgctttatgtggccttttgatttctccccacgcggttgtgcggtggatctggcggctcctcaggtggaggccggggccgtccattccctgctgctgggtggagatgttgtctccagttcctgcctttggcctccaggcacctggatttgagtgggtcagttctaggccacatcgtgcttgcatttgtgattcccgtggcccttatcaggttgctgcctcgaaagccttcctgccggccctgcagccacccctcatctcagccaacgccacatcagcgccatgggtgcaaagtcagagctcactgtcactcggatctgcatttctccacctctgcctggatttgctctttgggaattgtttctttgcatcctttgctggttttcggttgggtgagtcttttttttttttgagacggagttttgcttttgttgcccaggctggagtgcagtggcgcgatctccactctctgtaacctccgcctcccgggttcaagtgattctcctgcctcagcctcccgagtagctgagattacaggcagccaccaccacgcccagctaattttttttgtatttttagtagagatgggggttcaccatgttggctagtctggtctcaaattcctgacctcaggtgatctgcctgcttcagcctcccaaagtgctgggattacaggcgtgagccactgcgcccagccagggtgagtcttgttcttgtccttgagtgccacttggctaggctgttgctgctgaccttagctcccttgtttgccatcatggaggatgctgggagctccagctccctgtcctgtcctccccggcgctcactaaggctcggtcctctccacgtggtcctgacctgtcctctgtgagcaagagaaacaggactggtttgggggtgtcctgtctcagtggacacaggacaccacggttttcagtacaacaaggaacacaacttgttcaatgtgctttatgatggtgaaaattccctttaaaaataacatgcgattgctaacacttgaccgaatatatcacttgaccttacaggaccgtataatagacgctggccccaaaggaaactactctcgatttatgaatcacagctgccagcccaactgtgagaccctcaagtggacagtgaatggggacactcgtgtgggcctgtttgccgtctgtgacattcctgcaggtacaagctctggggaccctgcatggggctcctggctatgggggcagagtggccatcgctgagggctgcgtggggctggactggaaaggctctgggggaggtgggtgctgatgtggagtctcttttggtttgaatatctcttttaccaagcaaaattgaaaggccatgggtcaagccagtacagatacaaaaataataagagtatttttgttgacctaatacacgccccttagctttt

SEQ ID NO: 33317 - DNA, 1034 bp, Homo sapiens
gtggttgtgtgcagaaccctgccgcccctgaggtgagcagaggcactggtgtgcctgccaggctggggcggagctgcccggaacccttgccaggccaatgtgtagcttggtggcgcccttgaaggccactggggggtaggtgtgtcctcccccggggctggaggccgggtgcctggtgggtgggcctgacctggcccacctcatccctccagcctgggatctcactgctctgcacatgtgcactgacgtgaattttatacgtttgtagaaactctgatgtaacttcttctacctctgaagcgccctcctgggccctgctgtcacgtggctggtgcggcttccccgagtgctggccccctgcccgctccccatgggcacccaccactcaaactctgcgtggtgaggcccggggaaagccaggccgggccctagcactgctcaggggcctggggctcctgggatttctgtgtgtttggaagcctctgtttttggagtggggggcgtggaaggcgggaggggctgacagtgcctggggccagagctgggcgaaggaggacatcctcactggacgagcactgcaggcctgacgagaggctccgggcagctgagggctgaagcgcctcgggatgccccacactgcccagagccacgggtcttgctgtgctgggggtggggtggccccaggcagctgccactgcccaggtgtgagtcgctgcagacctggtccctgagggtgggaggcctgcttgtgctgaagctgccatgtggtctggcccccagaagggctcctgagcgtagggagttgagccccgcagccgtggcggcatctcctcctccttcctccgccccatgcccagccttgcttccggctggtggcatgccttggggccgggcagcaggtgagaagctgcccccggagggaggggccaagggctgggtcagtctggcctgaggggtggatggctggccctgggggaaggctgggcctgggaggccctgtggacagcaggcctgaggccacgaggtcctggggc

SEQ ID NO: 33318 - DNA, 1027 bp, Homo sapiens
gaaggtggttgccccgccgggcagggggctgtgtgggccctcgtggggccaccttcctgtcagtgcccgagggacggtgggacagttgcccctgcgccaagggagcccactgccatcccccgtgggctggcgctgcagtcgcgcaccctgtgttgcctgctgacttgcttatgtctgtttggaagctgcttctgtttggccacaggcctgtgttcctgggctgatggccacagagctgacacttggggtttgagttccagacttgcagaccctgggatccgcttactcctccgcgccacggctgctgtgcttccagaggtggcgtgatgcctcccggggccatggtggggtgaaggatggcgagccggacataccattgttggatgtattttttttaaaacagcaataattagccattttaaaggagggatgtacctgtgtgtgtgcatgtgcacgtgtttgagcgtgtgtgtgtgtgcaagtgggttcttggatatgtgtagtgtgagcatgtgtgcatgtgtgagcctgtgcacgtgcatgttgtaggtgcataagcatgtacacgcgtgagcatgcatgtgtgtgtacacgtgtataggtgtacatgtgcatgagttgtgtacatgcgtgagcacgtgtatagatgtacgtgtgtgtgcgcatgtgtgcgtgtacatgtgtttgtgtcttgggtatgcataagcatgcacgtgtgtatgaatgtgcgtgtgtatgcatgagcacgtatgcatgtgtgatgcgcatgttcttgtgtacttctctgagggggcacatatgtatgagtgtatgagtgcatacatatgcatatggtgtacgtgtgtgtactttgtgtgtgggcatgtatgcgtatgagtacttgtgtgtggctggtgtatgggtgagcatgcacatgtgtatggatgcatatgtgagctgtacatgtagagtgtacatgtgtgttgcatgagcatgcatgcgtgcgagtgcctgtgtgtgtacttgcatatatgtggctgtgcaggta

SEQ ID NO: 33319 - DNA, 1059 bp, Homo sapiens
ctagattcccacagaaaggtattaggatacaagatctatatacaaaagtcaatagtatttccatataggagcaccaaacaatcaaaaattgacatttagggccaggcacggtgactcatgcccgtaatcccagaactttgggaggccagggcaggtggatcacttgagttcaggagtttgagaccagcctggccaacatggtgaaaccccgtctctactaaaaatacaaaaattagcagggcatggtggcgcatgcctgtaatcccagctactcaggaggctaaggcaggagaatcgcttgaacctgggaggtggaggttgcagtgagccgagatcgtatgactgcactccagcctgggcgagagagtgagaccccacagggtgagggctcagtcccacaagacggcgccccttcagatgctgatcccaagtccaggcatggtctgtgcttctgtccagctggctgtaaactggggctcccatggcccccttctggggttggattaatttgtagagtggctcgcagaactcagggaaacacttcgtttatggttctggcttatttttaaaaattgacatgtaatagcaataccacttataatgtcataaaaagacatgaaatacaattatccctcagtacacgcaggggacaggttccaggacccccagcgtatatcatatctgcacatactcaagtcccacggctggaccagcggaacttgcacagccctccatatatgtgggttttgtgtcctgagaatactgtattttagatccaagttaggttgaaacaatgcatgtataaatggacctgtgcagttcaaaccatgttgttcaatgtccagctgtgctgggcgtaaggtgggccctgtgagatgccctcagggagctgggaggaacaccggggagcacacctggatctgcggggaggagaagctgagagcctcccctgggggtgctcagcacagacatggagcaggatgaggccgccatgtcggggggtggacaggaagaggccaaggactgggcgtgggacccacatggaggaggctgggggag

SEQ ID NO: 33320 - DNA, 1033 bp, Homo sapiens
cgcggccatggggcttagttcctagcctaggaagggaaactgagactctgggaggggcaggaacgcccccaaggtcacttggaaagtcgggcaggatgtgctgttagggggaagacccgggcagggtttttgttccccgctgacgacgcctcctttgtgtgttcgcgccgccgccccgccatcgtggggcctgcgagtttgccggggtgcgtgggccgcgtggcggggccttttgtaggtcgggaggatctgagtacgggtgcgggcctgaccgtgggggcgccgaggtcgcagtctaaaacttagtagggcctcgatttccgggcgcgcttccgggccccggctggtggttggtggaacgtgcgactgtgaggcttgcggcccagccctgcaccgctcgggcccttcaccgctctggcgcgcctatagacaggtgtatgaagattctcacgacccgaaacagagttgctagtaaacaccgcttttccgcctttgatccatcgagggaagagggaaaaggatagagcttgggcaagccgttttggtagggatttcagcttttgtctttcacttgtcagttcccatagacgttcacaaacttaataatcttcgttctgtttctgcaccaagttcttgagccagacgtagggtctcagctctggagcctggcttagactgtccaactgactggggagactgaggtccagaaaagtgaagtggtctgcccaaggtcacatagccagctatttggcagcagatgaggttaagtcctacctgcaagatttgggttttgaattcattgaccaggagttttgggaccactgtcaataaaagagacattgaagggaatcttttgttactttcttggtgatttgctttttaatggacaaggacatattgggttcagttttatctgtgagtttgaggtgaaatagaggcattcgagtagcaagatatattgctggcttttgtattgcctgaatttgagcttccaaaaatcttactttaacacatcgtttattgatcttttctt

SEQ ID NO: 33321 - DNA, 1049 bp, Homo sapiens
attggctgtgtgccggctttcttcaacctcctctgagtcctgttctaagtctaagccgttgtgattagctacatcctgccaagtctgttctggaaatgaataaagcccttgctgagagccggaaacattggttccagttcctcctggggtgaaggtttgttttgcctttatttaatagcactcatacctgtaagaagggacatgctctccagcccttctgatataatacctatttattacttgatttgttgatcatctttccagctaggatatatgctccatgggtagttttttgttgctgtttcccatcccattcctagcccctggagcagtgccttacccagactaggcacctgtgaatagttagcaaattagttgatagagctgccttctgggtgctaggaaccatactgggtgtttcattcagcggtcactggttccacagaggtgaggtgttctactcaattaaagatgtggacactgaggcacagaaggcaagtatttgtccaaggctgtagggcttattggccagccacatcattgctgaccgcttaaccacataccctcatttgtataatgagcaagaggctcatatttcttctgagtattaaggtgtggttattgatatgactgagggtatcaaagttctgtttaagaggtgtttgtgaacaggtgcggtggctcacacctataatcccagcactttgggaagtcaaggtgggcagatcacttgaggtcaggagttggagaccagcctggccaacatggcaaagccccatctctactaaaaatacaaaaattagccgggcatggtggtgggttcctgtaatcccagctagttgggaggctgaggcacaagaattgcttgaacctgggaggtggaggctgcagtcagccaagatcacaccactgcactccagcctgggtgacagaacaagactgtgtctcaaaaaaaaattatttgtttttattgatttttatttatttatttattttgagactgagtttcacttgttgcgcaggctggagtgcaatggtgcgatctcggc

SEQ ID NO: 33322 - DNA, 1032 bp, Homo sapiens
ggtgcctgccaccacgcccagctaacttttgtattttcagtagtgatgaggcttcaccatgttggccaggctgaccttgaactcctcacctcatgattcgcccacctcagcctccgaaagtgctgggattacaggtgtgagccaccatgcccagccgacctgctgatagtttgataaaacagaagttttactttctggaatttctactcattttatgttttggatggtttctctctccgtaagcattcagtattcttgaatctcaagttttgaaaggagccctaacttcaagtctactcgctggcttcttaatgaagtgaaccatttctattgcccatttagttcttcctgaaaccctgacattctggtgttcatgtgactcttctttcccccttgctactcagagaaagcgtcgtggtggagcaataaattctagacaagctcagaagcgaactcgggaagcaacctccacccccgagatctccttggaagcagaacccatagaactcgtggaaactggtaagattgccagggacactacaactgtggggtgttaaagtggagagagaacactgtaccagggtgagctagtagaaggtgctttcagtgtctttagaaggcctatgcagtctcacactcaccatgtacaactcaaagcttcacagattctgaaatagcttctcaactgggctaactgttcaactctggtaatgtgcagcagtggggtaggatccatttaaaaaaaaatctagcgcaaatgagatagcccaccttttctatctgaaactgcatccccaattgctggaccttgtaaagtacttcgctttcctcttctgtttttcattaggacatgaaatcacccaagaaggcaaacttgtccacagagctccctgtgttggagcttggtataggcagaggccagattggatttccccttctgcctgctcaagaagtggttgatggctggcctaagtccctttgctctgcatatattgtttttataactaggatacctgcaaactggcattttat

SEQ ID NO: 33323 - DNA, 1028 bp, Homo sapiens
actattgtcgcctaggctggagtacaatggatctcagctcactgcagcctccacctcccgggctcaagtgattctcctgcctcagcatcccaagtagctgggattacaggtgcccaccaccacacccggctaatttttgtagttttagtagagacagggtttcaccatgttggccaggctggtctcaaactcccgacctcaggttttctgcccgcctctgcctcccaaaatgctgggattgcaggcatgagccaccgggcctgtgcttttctttttttctttttgagacagtttcgctattgttgtctaggctggagtgcaatggcgtgacctcggctcactgccccctccacctcctgggttcaagtgattctcctgcttcagcctcccaagtagttgggactacagccacgcgccaccacacccagctaatttttgtagttttagtagagacagggtttcaccatgttggtcaggctggtctcgaactcctgacctcgagtgatccgcccatctcggcctcccaaagtgctgagattccaggtgtgagccaccgcgcccagcctgtggtgttgttcttatactgaagactcatctggaagctgtttttctctcattaaaagcggggacagtcagaattgttaccagtgaggaaacactctggcgaccctgttcttatgcaccccagtagttgtgtgtgtatcacctgctgcttgccagcagcccctgggctcagtgctcaggacaggcctcagtttggtaccatccacaggcaagctgggtatgactcacaagagaccataaagactcagtacgcgcactgtcatggctggggcactgggagtgtcataccctttccaggtgtccacacctaattagtgggtcatcttggcagagggtgggggcatgttggagctgtagaaagctggggtcatttctagccacagaagaatttgcttttgctcccagctaaacccaaggctttccccaagggccagcactgttaccagagcctccttttctagatt

SEQ ID NO: 33324 - DNA, 1034 bp, Homo sapiens
gctagtgtttactggggtccctcataaccctcttgggctgtcacactgttgagatgccatggcccctgcctcctgctctccagctgagagagaccacagcagacacagttagctctccagacccctccctgttgtagcctggcccttgctttcctttaattagtcatcttaggcataggtgggtgggattctctggccccatggctgctctgggacaagggcaaactcggaggctcttctttttaatgccttctagatcgtgcagaatggacgtctcatcgtttccacagaatgcggccatgtcttctgtagccagtgcctccgtgattccctgaagaatgctaatacttgcccaacttgtaggaaaaagatcaaccacaaacggtaccaccccatttatatatgaagtattcagagccccccaggagagacggatggacagacagacagccaggttctccagtggtatctgcctccattttcctgagatcaaaaagactgtttcgaaaccaacatctgatatgtaaactgctcttttgtttccaaccccttccttttgttatctccagtttgatgctatggcgctggacccagggccctcccaggccatctctgttcctctggggtggtccagttctagagtgggagaaagggagtcaggcgcattgggaatcgtggttccagtctggttgcagaatctgcacatttgccaagaaattttccctgtttggaaagtttgccccagctttcccgggcacaccaccttttgtcccaagtgtctgccggtcgaccaatctgcctgccacacattgaccaagccagacccggttcacccagctcgaggatcccaggttgaagagtggccccttgaggccctggaaagaccaatcactggacttcttcccttgagagtcagaggtcacccgtgattctgcctgcaccttatcattgatctgcagtgatttctgcaaatcaagagaaactctgcagggcactcccctgtttcctaagaacgaaaaagtgcaataaaggcc

SEQ ID NO: 33325 - DNA, 1036 bp, Homo sapiens
tccccgccactgctctacaaaaaattaaaataaaaattagccaccatagggaccgggcatagtggctcacgcctgtaatcttagcactttgggaggctgaggtgggcagatcacttgatgtcaggagtttgagaccagcctggccaacatggagaaaccccatctctactaaaaaatgcaaaaattagccaggcatggtgacgagcgcctgtaatctcagctactcaggaggctgagacatgagaatcgcctgaacccggggtggggggtgcagggctgaggttgcagtgagcagagatcacaccattgcacttcagcctgcacaaaagaatgagacattgtctcaaaaaaaaaaaaaaaaaaaaaaaaaaccaaaaaattagccaccatacagcgtatcctctgctttgatggtatgatcgttgtataaacatgctggtatgattattatggatctttggggtacatgagggtgcacttagaagccttccctgtattgtagaaattgcgaccacggtgaaattaggttatcattaactctagttcatatttgcctagtgacctgaggaaataggttgaagaaaaatgtagaacttcctgtgtcttaactaaaattaacaattttaacttttaaaagtttaaatggttaccatacacgctttagaaatggtgtacctgcagagagcatgtctgtgattcagtattttttctatgtgtacacctatgtaataaatatatcaagataaagaatataggttggcacagtggcccatagccatgatcccagcactttggaaggccgaggtgggagaatcacttgaggccaggagttcaggaccagcttgagctatgtagtgagactctgtctcaacaaaaaacttaattctaattagcctggccaggcgctgtggctcacacctgtaatcccagcactttgggaggccgaggtggaaggatcacgaggtcaggagtttgagcccagcctggccaacatggtaaaaccccattctctactaaaaatacaaaaaaattagct

SEQ ID NO: 33326 - DNA, 1009 bp, Homo sapiens
tcagagatcattctttttatgattttaagtttttcaaaaaatttaaggttttatggtctgttttggtaaatgttacatatgaacttaaaaatgtatgtactactattattggatggtttctgaatgtcaattagatccagttggctgatagtttttttttggttgatggttttgttcgcttctgtattcttgctgagtttttgtctactagttcttttgattgctgaaagaggaatgttgaagtctctgcctaaaattgtagatttgttcacttttccttacagtttatttagcttttgcttcatgtatgtttgaagctgtgtttgatgcatatacatttaggattgttaggtcttggtgaattgaccctttgtcatttaagctgtatccctcatccttggtagtttgcttgtctctaaagtcgcttttgtctgatactactaatatagcctctccagctttctgctaattaatattggcatgttatattttttctatctttttgctttaaacctatctatattatttgaaatgaatttcctgtagatagctgcctgattattcttcattaattgtgcttattcatattttcatttttaattgtaatgtgtatgtgaaatatacttattggagaccttttttcctggcctaataactaatttaatatttatttggtgctattataggatgctgctttgcattgtatttgataaagttctctttactagactttttgaccttgtaggctttgtaaactgatttgctagattacatgaacatggtgacacaagccatcttcattttagagtttgaccagtatgagttcaaatcataggcctctatatgtcatgggcctgtataacatttattttgtttttactatggaagtaagttttagctgggctctatggctcacacctgtaatcccaataatttgggaggctagaggtaaatatataaatcccagaaccatctaaaaatctataacttggtgaccaaattctagata

SEQ ID NO: 33327 - DNA, 1050 bp, Homo sapiens
atcaagaccatcctggctaacatggtgaaacactgtctctactaaaaatacaaaaaattagccaggtgtggtggtgcacgcctgtagtcccagctactcgggaggctgaggcagaagaatcgcttgaacccaggaggcagaagttgcagtgagccaagaacgtgccactgcactccagcctgggtgacagagtgagactccgtctcaaaaaaaaaaaaagttaaccatttaatagtgtactacaaggctgggcgctatggctcatgcctgtaatcccagcactttgggaggccgaggtgggtggatcagttgaggccaggagttcaagaccagtctggccaacacggtgaaaccccgtctctactaaaatatgaaagttagctgagtgtggtggcgcatgcctgtaatcttagctactgggaaggctgaagcaggagaatcgcttgaaccggggaggaggttgcagtgagcctagatcgtgctactgtatttcatcgtgtttgacagagcgagactgcatctcaaatgaaaaaaaaaaaaaaggaaagaaaaaaatagtgtactacaatctaattacttttcctaaaaatacttggtaattatttcacttaggtgaaagtagcccaccaaggcaaacattgtctacgagttactagttagagtacagtccctattgcccaggctggagtgcaattccgccgtcatagctcactgcagcctccaactcctaggctcaagagatcctcccacgtcaggctttcaagtacctgggactacaggcacgggccaccacacccagctaatcaaaatttttctgggggggatgagatcttgtatgttgcctagactggtctcaaactgttggcctcaagcaatcctcctgccttagcctcctgggtatttgggatgactgggatcacaggcgggagccactgtacctagctgtttctgtctttaaaagcacacaaaatcaggctgggtgcagtggctcacgcctgtaatcccagcacttcgtgaggccgaggtggacagatcacttgagggcagagg

SEQ ID NO: 33328 - DNA, 1147 bp, Homo sapiens
atgggggcatgtgctgcactctcttgacatgtgctgtggaacgtcgggagtggggcgaggggtctcttctgtggaacatggggagtggagcacaggtagagactgagagggccggcctgtctcacaccaaggctgctgcatttgctcaccttgtgttgtctttgcagtagacagtgcccaggcgtcctgtgctctcgttcactgctgctgcagatgccaccatacataaatttggcttgggacatgttgagttcagagtgcctttgagatatccaaggggatatgtgaattaggcaattgtactgtagacatttgacccctaaatccaacttctgggagtcgtgtgtattgacggtcatggatgtggttggcggaagaagagcatctagtggaaagtgactgagaagggagccctgaggatctctaatgctcagaagcaaaaccgtgctttccaggactgcagcctcttctgtagtatccacgtttatgtctaacctgccttaaataaatgtggagctgggggagggtaaataaatacttacatgcatggcatttttaaatgacatgaattaatcattttaaattaattaaaaagaaacatttaaaaattttatctttttagtgtttcttcaaaaacaacattaagtcattaattctggccttttggcgtattggaagcattgaaaagctgaatgaaatcaagaaaaagttctggagaatagaagcttccagccttttgggttcgtgacccgcctgtgggaaggaggcctgccatccctcccctctgttggctcacactcctctaacttcttcctcttcctctttctcccacacacaaatgcgtgccatgctcctctgcccaggccttgggttaaaggcagcactaggccttccaccaagagacatgagtgaatgatcaggccaggcagcagagtgcacagcaagcttcagggcgaaggtggccgcgacacttgccaagtgagatgtcagaggcctatgccccaagaaagcatagatcaggtcaggtgacgagacggtggaagagaatcccaggtggccgtggcagcatgtgcaaaagtgtggtacaccagggacttggacatggtgatcatggaaggtttgagaacaggaatagtggcgctcagtc

SEQ ID NO: 33329 - DNA, 1028 bp, Homo sapiens
gtgtgaatgtcagcacagtgaaaaaggcagaggacattttggtacaaatttgaaaatagttttgactcgtgggcctgctgaagggtgttagggtgaaaatcctattttgctagccattagtagttaaccacagatttcttgaaacttgctcaactttttaatatctgtctgctgatacatatttaacataggtgtcaaccagatttgtttttagtatttggaaaataatgctttcccttctaattcttcattatagctttaacactgaaatttgtcagagaacttagttaattatcaatgatatgttcaggttggcaactaggcttatagcatggccttaccctcgctgcggctctaggctatgctggaccatctgaatggggtcctcggaccacactttgagaaccacagctctgttgggttgtctttttcttattgacttgtgggatttctttatatacactcagtagcagctctttattggttgtatgtgttgcagatattgcctgtttcttttttgtctgtttttcactatgtgatggtgtcgctttatgaacacagattcttttctttttttaaccttgagatgctaccagggcagccactcaccacagcccctgctggggtgtgaatgtgcaccacgcacttcacgtccgggtgtgcagcataaattgcagagtgtaaggtgaagccggcctgattcactcccagattagtgcttccacgatctactatatctccttgtagattgatcttaacctgaaaataaaaaaataaaaatttaaaataccaagaggacttcatttttcttttctgttttcgagacggtcggtctcgcccagtatggagtgcagtggtgcaatcctgattctctgcagccttcacctcctgtgttcaagcaacccttctgcctcagtctcctgagtagctgggactacaggtgcgcaccaccatgcctggctaatttttttatttttaatatagacggggttttgccatgttgctcaggctggtctcaaactcctggg

SEQ ID NO: 33330 - DNA, 1032 bp, Homo sapiens
ggcttcgccatgttgcccaggctggtctcaaactcctggactcaaacgattagcccgtcttcacctcccagagtgctgggattacaggcatgagccaccatgcccagcccaggagcacatctaaaaatgctctgtgctctggctcaggaaggaatgcatgtagccaagtgggggccaaagggtgggggcaaagctgcccattaagtaccttggaggtgaaggccaggtcagcagtggggatgtgggtaccctaattgtggacattagccacagatgctcctgtcatctgtgcagtggctaagatcttacgcagagtgcaccctaggagctgtgctggggatgccatcacccccctgcactgacagcagcctgattgccggctcctgggagctgggcaaggtgcaagagcctgggaggtcctctgaggacagtgtgctaggtgaggaagggcagcagattgtggtgactttctaaccttcctgtgttgtctcacagagaaatttcggcagaggcggaccgggaacctcagcagctgcagaactactggtcagaagtgcgctacacggtgcgctgcatctaccgccaggcaggaaccccgctggcagatgaccaggaccagtctctggtgcctgacaaggagggagtgaaggagctcgtggataggtacatactgccctttcctgttgtggccccatgcaaacccctgccctccctgctgcacttggagccactcctttcaggatgggctttccttacagtgctcagctgggtttgcttagcctttggtgcctgtcaagactgcagcagatgaactggcaaaagtgagccccctaggtcaaacgtcttgaatttttctgattttgatgaaacgctattgcctgtataattacacaagaaatgtttctgtcacttgtttgtgtgaagactgataataataccttcctttttgagtccccctgtgccagggatgatgcagagtacttttacaagcactcttgcctttatcaacccaaggagaaaggccgagttagc

SEQ ID NO: 33331 - DNA, 1003 bp, Homo sapiens
actgacaccatctgcaatgacagccggagcccttcctcctggccatcagttcttgagcccagagaagcccacacaccctgcactgcacctttaccctcacatccatggacatgtgcctttgcacactgttccacacctgccacgccctctcatccaccccaccttgtatgcaacgccccccttcacacacagtaaggtaagtcagggcaaaaagggtctgaaagctcactcttcactgagatcctacaggagtacatagtcaaacaaagaaatctgtgaattagcaacttgcataggatagcatctgctctggataggaaggtctccaagtgtttcctttcaccataatctcttaagcactgtaattgtgaacctttacagttgtaacaatcattaaaaacaactgtgaaggtcatagttcttttattcagaattaaatagaacagaaggatttttcaggtgctatttctaacaggttaaacctagggaatatttccacaggagaccagtaatctacttgtgatcttccagggcttgctcttcttcttaatttgataggtaaaataatgtgaatacaacatgagtcctctaacactggctggactctacagggtctaaaatgtctatgctgctttagcatttagaaatacacgagcctaaataaaggaagagccctaagtgtgatgccacagaaaactataacgccctgcaggtgatggagcactggggaggggagggtacagaaaggagaagctgccagaaacccagtgtgaagagcccattcaggaagtggagtgaggatgtagaaataagttgatttttatgcatttcttcccagagaacctcatgtgtatacttagtatcttagactttacagtgaaattcttaggctggtttctttctttggaccttagatagctttgcctctctagttattttgagcttaactttaccagaatgactcaccgtaattctgattgttttcttttttttctttgtacca

SEQ ID NO: 33332 - DNA, 1035 bp, Homo sapiens
ttagagatggactcttgctatgttacccaagctgaacttgaactcctagcctcaagcagtcctcccaccttggcctcctgagtagctgggactataggcacatgccaccatgcttgttgttttttgatgtactctgataatctttgtcttttcattggtgtatttgactattcacatttaaagtgattttttgatgtatttagattaatatcagccatgtttgtaattgtttcctattcattatgagtctttttctgccttctctacttttaattaagcgttttatggttttatctcctctgttagtatatcaattttatttatcttttttaaaatttctgcagttgccctggagtttacaatatacattttgaactaatctgagtcctttttcaactaactaatgtaaaaaaggtaacatttaacagattactcccgacccttccctattccctgtgacattgctgtcattattttcacttatccacatgtttatcacccagtacagtgatgatgattactttcaacagttatcttttagatgaataataataagaagaagatattttactttgtctttattccttctctagtattcttcctttctttatgtagatccacgtttctgaccttctatctgaaggaaatcttttgacatttcttgcagggcaggtctgctggtgatgagctccctcagtttttgtttgtctgaggaagtctttatttctccttcacttttgaaggataatttggctggacacataattctaggttggtggtttttttctttgaacactttagaactgtttaacttccctctgtccttgctggcatggtttctgatttctgacaagatgtcctctggaattcttttcgaattcttttccctgttcttctgtaggtccacttgcccccacccagctgctttcaagattttctcttttttttttttttgttttttgttttttgagacagagtcttgctcagccgcccaggctggagtgcagtggcgccatctcggctctctgtaaccac

SEQ ID NO: 33333 - DNA, 1001 bp, Homo sapiens
gactctttccttggccgtgtcgtctcctgatgagtccatcactgatagtcttcgtttctcttagattgtttttattgccagcatttcttcccatctctctgctcacacggcccccttgttcttgcatgctgtctactttttccattagagcctttggcctaccaatcattttcaatttcctgtatgataattgccatccatgttatctccatgttcctgcaaccattcagttgtctctctcagcctctggtgagattgttgttagaccttcttctgttctgcattcctaacactctcttgcatgtttctcatctccttttctcccagttccatgttctgagaacttttttgggatcagtcctccagttaagtgattctgtagtggtgcctagcctgccacttaagtcctgattctgactatatttattatttataagttttaatttactttttttttccaaagatacttagtagctctttatattctcttgttccttgttttttttttctttctttaagcatttcacacatagttactctgtgtttgaatgaaaccttgagcatccagattcgttttctgctgatatcacctgtgatgtattatttccttttgcggatggagtatattaggaggttatgttttgctcagcttactctgtgagaaccacagccctccatagtggatgcttccctgtgagggttggcgtctgctgatgcgagagctgcctgagacctgggctcctcttgagggcctccagactgctgcccccacacgtcactgtggcgatggtgtacggctgttccttcccctcacctccacctcgcttctctcatgacctcctgatacttcttttcatcctttgcctttgtcgatagcagttggttaccaaagtgttcagtgtcatttctctcagatctagagctaagtagcccctcttacctagcaaggcccagaccaggggggaagaacggccttcaagagaagagcaaagccgagcagg

SEQ ID NO: 33334 - DNA, 1023 bp, Homo sapiens
aataaataaataaaatcatcttgtcccagtgattcaagatgccacctttgtcctacaataaatttctttctttcttttttttttttttttttttttgagacagagtttcactcttgttgcccaggctggagtacaatggcatgatctcagctcactgcaacccctgcctcctgggttcaagcgattctcctgcctctgcctcccaagtagctgggattacagccatgcaccaccacacccggctaattttatatttttagtagagacagggtttctccttgttggtcaggctggtctcaaactcccaatctcaggtgatctgcccaccttggcctcccaaagtcctgggattacaggcgtgagccaccgttcccgtcctgtcctacagtaaatttcaatatgcacttgggtctgtttctggaatttctcttcctttcctctctgtttacttgtgtcattattgcatttagttagttatttttagaggctctacatgttgtaatatctcgtagggctgttctctcctcatagcttttccagctcagtatttcccaggctatttcatgtttgtagttctatatgaactttagcatcaatgtgcctggctccatttaaaaaaagcttgttggggccgggctcacacctgtaatcccagcactttgggaggcctgggcaggcggatcacctgaggtcaggagttcgagatcagcctggccaacatggtgaaacaccatctctactaaagataaaaaaaattagccaggtgtggtggcgagcgcctgtggtcccagctgctcgggaggctgagatgggagaattgcttgaacccaggagccagaggttgcagtgagccaaggttgctccactgcgctccagccgaggcaacagagtgagactctgtctccccccacaaaaaaaaaagttgttggtatctttgtcaggattccattacacttatacattaatttagggagaattgatgtctttatgatattgatcattccttccaagaacaagggatgt

SEQ ID NO: 33335 - DNA, 1031 bp, Homo sapiens
ctcactccattgtccaggcagtggtgcaatcacggctcactgcagccttgaccaccaggcccaggtgatctttccacctcagcctcctgggtagctgggaccacaggcgtgctccaccacccgctgcctgagactcagttttctcaacagtcagaagacataatgaaaatggcatgaggccaacagaatgtcttttttttttttttcagcttactcaaaagataattgacaaagtattttattatctcttattaatactacatgaaatcttattgaaaagagaaaaccagttgcatcagtgtattactattaattgtagtaaaatcttttaaacagatccatctaatttcaatcagctttgaccacacaggatttccataaatcttttataacctcttagaattttcccattcacttccttttcccaactttctatattcatttattttcttttccatctgtttttcaacttaagaccacttttaaataacctctaaactagtcaaaatcactttttcctttgacaaaaccacatcctcatgtttttcttataaccttccttaccaaaacacatcttactttttcttatgtattttatatgtagaactgttttcctgcttatctctactttgagttaccatgttagtcagaattttagcttttagtaaccttaaattatagtgaaaacttaagaaataagcaattattaatattttgtttatctgaaataagccaggcacagcgttcacaccttgtaatcccagctctttgggaggctgaggtggaggatcacttgagcccaggagtttgaggtgtgagctgcgattgtgccgctgcactccagcttgggagatagagtgagaccctgtctcaaaaaccaaacagaggataaagaatttaagctttccagtcaatgaagctttacattattggcagaaatcatgtcaacaaacagaaaagcgggctgagaaagtgcatatcgttatcaagggttacggaagagaggaattcagtcaactgagaaggttttt

SEQ ID NO: 33336 - DNA, 1027 bp, Homo sapiens
gcaaatggtgcacaaatttttctagggtttgtactcaggagtctgactcctgggttctagggtatgaagatctttctaaatattgttctagtttacgtgcccaccagcagtaaaacagaattcccttgccttcccatccttggcagacatttcacttttgccagtctggtggggtgtatagttatggccttaatttgcatttagctaattaccaaggagattgagcatatttttatgtttttattaaccattttgattttgtctcctgtgaagtgtctatcatcttttgcccattttttaacttgttgtctttttctttttcttttctttttttttttttctgagacagggtctcactctgttgccctggctggagtgcagtggtgcaatctcagctcactgcagccttgagtcaggctcaggtgattctctcacctcagcctcccaagtagctgggaccacaggcccacaccaccaagcccagctaattttttgtatttttaagtagagacgggtttcatcatgttatgcaggctgctctcaaactcttgagctcaagcgatctgctggcctcagcctcccaaagttgggattataggcgtgagctaccagattttttcttattaatctaataattctttgtatagtcttgatattatccataatgtgtattgcaaatatcttctctaactctggcttgactgtttatggtgtcctttttttttggggggggttttttgagacaaggtcttgctctgtcacccaggctggagtgttatggcacaatcttggcttattgcagcctcaattcctaggcttaaacagtcctcccacctcagcctcctgagtagccggaactacagtcacgcacttccatgtccagataattttttttttttttttagagataggatcttactatgccccagctggtctcaaactcctagactcaatgagcctcccatcttgacctcccaaagtgctgggagtacaggcatgagccactgtgcatgccagttcttatttt

SEQ ID NO: 33337 - DNA, 1051 bp, Homo sapiens
tactgctaataataatagtgatagctaccacttactgtttactatgtaccttgtgctaaacacttgacataagttaactcgtttaatcttaaaccaaggaagtagataatgattctcattttacagatgaagaaactgaaatagacagagatgaagaaatgtgcctaaggttacgcggtttagtgaactgggatcagaacctgggttctctggccttagactataaaccatagataggaattgagcacatttattaatcagcattgcaaggctggtggaattttgataaacacccaaaccagattcttttctgcactagtgataccagacagattttggaaatataaacaggatagggtgcattaaagttcactcacatttgttcagttaaacagatggttggcttatctttagttgcttcactcagtcatttccaaaaccacacccaaggccaggcagtggctcatgcctgtatttctagcagtttgggaagctgaggtcagaggatcacttgaaaccaggagtttgagaccagccttggccacgtagtgagaccatggctcaacaaacaaagaataataaacatatttactattatgggacgtctatgtgccagacattgtgctagacattttacatttattatttctaattgccccaacaacctgggaacatatcaccgagtgtattttattacaaatgtggaaactgaagtacagaagacaataagcctatgaagtgatcgtagggcgttgctggtacaaagtcaaaacctgcatcattgggccctgcgcctctatgtctgtggggagaagggattgttgatgatgtgatagctggaaaacataccattcatcaaaataaatcccaggtggattaaaaagaaatgtttaaaattatagaggcactgtggagaaaaagcaaaataaaatgtttatcagagataacgccttaacattttcttggaacattttattagatgtgtgcctgggaaggaatgataactttctttttaaaaccagaagaaatcacaaaggaaaaggtttgtcaa

SEQ ID NO: 33338 - DNA, 1038 bp, Homo sapiens
gagaccagcctggggaatccgcatctctaccaaaaatataaaaattagctaggtgtggtggcatgccccggcaatcccagctactcaggaggctgaggtgggaggatcactcaagctgaggctgcagtgagttgtgatcgtgccagtgcactccagcctgggtgacagagtgagaccctgtctccaaaaaaaaaggagacgtgttcccagctgaggaaccagctaacatgaaattcctaggatagggatgggcttgatgagcccacagaggcagaaggcagccagtgtggttcggcctgggagtggcagagtgaggttggagagagaggagggagcagatcctggaaggctgtgtatgctgagattgagagtttccattgcattctgtgtgtggcagaatcattggagggctgcagacagggaaaggacaaacggtattttaaagaaaattattctgggtttggtttagagagaaaattggctggggcaagagaaaaagctgttgtccaaatgagagatcatggctgcttgggccaaggtggcgtagtagaggtaggaagaagtagatttgtatggctttcattttgaaggtagtgtgaataggacttgctgatggatggggtggaagaagtgaaagggaaaaaaagaatcaggatagcaccgagacttttggcttgagcagtttacttacgtaaaaacaacaagaagctaagtaaaaatgactcgggatagttgagtcatttttgagttgaaactgatagcacctagtgtgtgccaggcattgttctaggcactggggatgcagagataagagagtaaagttcctgcccacaggttgtttagaacacagtaagcatcaaggctgggcgcggtggctcatacctgtagtcccagtgctttgggaggctgagataggaggatcacttgagtttaggagtttgaggctgcagtgagctatgattgcaccactgcactccagcctggggcttgaggttttgccagatggtttggtagagttggagatgttagcaagaaagg

SEQ ID NO: 33339 - DNA, 1347 bp, Homo sapiens
cagggattacaggcacctgccaccacacacagctaatttttttgtatttttactagagatggggtttcaccatgttggccaggctggttttgaactcctgacctcaagtgatccgcccacctcagcctcccaaagtgctagggttataggtgtgagccactgcacccagccaataatgaaaaattttaagagtccttaagtattcagcagtagataggaaatggctcagttattcaatatcaatttgagcaaatgttgtatactatgaaaaacaattacaaagatcatgtagaacaagtgaaatatgaaaaatgaaaggtatcagaaatgagaaaatatgaaatatatactgtttacagctatatgaaatatgtacatatatatatggagagagagagagagacaaaagagaaatgactaacaaaaatggttgtgtaatactttttaaatgtggaacctgacagcatgcttctaaaatttagatggaagagcggaaggccaagaatagctaagacactcctgaagaacagctaggcaaggagatttttcctaccagatgtcaaacttaatataaagtggtaattaatatagtgtcctttgggcaaaggaagatgcagagggatcagtagggccaaattgcatgcattgaaacagacatgctgtagtcggcattgcagctcagcggggtgggggatggacttggcaatgatggctgctgggatgcttgggtagaaaagtcacaagtggaaataattatatgagacttctatactatacataatcacaaagcaatcccagtgaattaaagattaaatgtgaaatgcaatactttaacaattttaggactaatataggtgaaaatcactggccttgaacctctggcctaaggagagatgtcttatgacacaaaaatcacttatcgtaaaagaaaagatggataaatttgtctacatttaaagtagacaaactttttccttattaaaagataccataggccaggcgtggtggcttatgcctgtaatcccagcattttgggaggctgaggtgggtggatcacctgacgtcaggagttcgagaccagcctgaccaacatgatgaaacccatctctaccaaaaaatacaaaaaatttggccaggcatggtggtgtgcctgtagtcccagttgctggggaggctgagacaggagaattgcttgaaccctagaggcagaggttgcagtgagctgagattgtgccactgcactccagcctgggtggcagagtgagaccctgtctcagaaaaaaggtaaaagataccataaagacagtaataataaaagccgcaacctggaaggtttgtcccacatgt

SEQ ID NO: 33340 - DNA, 1025 bp, Homo sapiens
aacagcagccatttatttcctagcttctgtggggcaggagtccaggcacagcgaactcaacctagggtctcataaaggctgcattcagggtgttggctagggctgggttctcatcaggagacttgactcagaggatccacatccaggctcttctagactggggacagaattccttttcttagggctgaagcattcttggcagctttacttcttcagagccagcagtagagacagagactcttataagataggtgctaaactcttctgtgatacagcccatcatcaccttttgtgaattccgctacttagaagcaagtcagagatctcacctgtgctcaaggtgggaggggattacaggagctgggggcctggggccactgtgaagtctgtctgtcacacttaccaagtgtggccaggagagatgcagaggacaccgtccatgcccttagagatgctgtctgtgggaggactctgcagatgagttggtccagtagaggcatgaagtaagtggggctgtcttttaccacagagcacatggtcatgaggcagagctggaggtgaatttgaatgttgttgtattcagacgtaaagtaattttgctgagaaccagttgtcatgaggtatacttacttaccttacttacctaaagattatcacagtatttaaactgtaacttaagaggtaaaagtctattaagtatgttgatgaatataacctgcacagtggctggcagcaagtaaaccctgtttgggtgttcaactttaattttttgttgaaatatgtaagcaggagagtgcacctaccgcaagtgttcagtttgttcatttttaaaaactgaaccccctgtataaccagcagtcaataagagcaacggtagcagcacctcagaacacccccagcacctccttcagttcacttgtcccatcccaggggtgacaactgtcctgtctcccaggacaaccaaaacaaaggttgttttgcatcttctgcacttttaatgaatggtattacatggtgtatgttct

SEQ ID NO: 33341 - DNA, 1536 bp, Homo sapiens
atgatagctgctggttcaaaatacggacctgctgatcctaagctattaatcttaaacttctgaaataaagacagagatggaaggagttagaatagtgctggtccatattttccccgaaatgagaagtagacttggaatccttttctatatccaggatcctagttcctgcattttttcctctggttcttattagcatttttcactttaaaaagtaaaaatacgtattacagttgccaagtttaaattattgggataaaatgccctaccacagaattaaaaccaaaataatgctcatgtgatgtcccttaaggtggtgagtgggttcaggaccctcagccacctgctcagcagggagaaggcagggagggaggggtccctactcgcacaggacagcgggggacaggccagggcataccattcgagtccatcacagaagtggctctggcagactctctttggaataagaatagaaataagttttgtatctgaagttggttaagtttctctgaaattcgcatcagtcaacacccaggtcacagcttcctttatcctctcttggagaggatcagggaaagggttgagagagccctgccttctcagagggcggccgagcgggctgccccatctgccatggaggcaggtacaggctcatggcgtggcgtccacagctcctaccatatccttcttgcttctctgcagagaatctggacgaggctagagaacagaaagaaaagagtcctccagaccagcctgcggtcccccacccgcctcccagcactcccatcaagctggaggaaggtgagctctgggtggcagcggccgccactgtgggagggtgcacggctcgtgcgcgctgtggcggaatgtggcgggagtcgtgttaacagcaacacggaagtgtgtgcttgcatcagcgccaggacgtgacacctttctcctcctatattgcttctgtcctgggtaactccaggcaaaacagatttgtatgtgagctgtgaccaggtaggaaggccggcctcgggggtcggaacccaccatggttgctggtgtccacgttgcccattgctcgcacactcctcgtgccgtgttgtcatgcagatgccaccttcggaggtgccctccgctgtgtgagccacacgccggctgcctctcagccaccgtgtgtctgtggtgtgtgatcccgggtgtctgtccctcggtctcgtacatccatgtctctcgtgaagcccgtggccctgcctttcttcttctgtaacctgatggctgtgactgaatgcatagattctctccttgtgcttttttctccctgtggctgcgtcacaagcaggagacggatgcgctagagagtacctgttaccctagtaagtaccgtgctgcctccgctctccaccggtgccctgcgctttgcctcattctcctgcttctttgttgtttattaagttttgttttctgtttatttaaaataaaaacagaagccccccttttttgtacccagtcccttggaggccttcctggaagtggttcagtcacctgagt

SEQ ID NO: 33342 - DNA, 1003 bp, Homo sapiens
ccttgggaggcaggtggtggcagaatgggagcactgaaccggaagagtgggccagacccctcttggaagggactctgctggtggtgtgaatgatgccacagcacctgctcctcaggtcagtcccctggacatgcaggcgcttagcactgcacggtgagctggaaatagaggacaggggtctgagccttgaggtccaacctctggtcaggctgggagaggcgtccacagacatggaagagctcaggaagaggctgtgcagctcctcaccccccagagggaagcagcaagtgctgaggaagcatccaggagcagggctggcatcaggggaagggggaggagcacaggggctggggtgagggcccaggagggcagccagtgtgcagactgctcctcatcccaacactgctcttgccgccctcgctcctgaattcagagcgttaagagaagcgacacagcagcgcggcctgtgtgagctgcacgagaactttcacactgccttgtcgtcacgtgagaaaaagtaaaaagttaagattgattttaacaatagaccttatctaaccccaaataccaaaatattatgattttaacacataatacaaaaaattaagatattttaagtatttctgacactaagtcttcgccacttgggcatatgtcacaggtagggtacgtctcagttcagactctggcccctggcaaccacgctggacagcacaggtcaccggtagcactgcttttccccatgtggcgcgtgcacacgctcacacagagggacagacagtgcggcgggtggcaggttgtgtgtttcctctactttcgcatattctaaactttctacaatgagtatgaactacttaaaaaaattctaaagtataacatatttgtaggaacctccctcaaatcaactcaccttggcttgctttgtttggagttgctatgtaaagaatcccaagaagaaaattaataagctcaggtataaacctctgggacaaagccacatact

SEQ ID NO: 33343 - DNA, 1017 bp, Homo sapiens
cttggcctcccaaagtgctaggattacaggcatgagccaccatacctggccagtgttgatattttaaatacggtgttcagggaaggtccactgagaagacagctttttttttttttttttttggggttggggggcaaggtcttgctctttaacccaggctggaatgcagtatcactatcgtagctcacttcagccttgaactcctgggctcaagtgatcctcccacctcaacctcacaatgtgttgggactataggtgtgagccatcacacctggccagatgatggcttttgagtaaagacctcaagcgagttaagagtctagtgtaagggtgtatgaagtagtggtattccagatggggggaacaggtccaaaatcttcctgtttcaggaatagcaaggatgtcattttagttgggtgaattgagtgagggggacatttgtagtaagaagtaaggtccaagaggtcaagggagtgccatatcagaccaatactacttgccttgtagatggaataaagatattggcatttatgtgagtgagatgggatgtcactggaggattagagcagaggagtagcatgatctgaatttcaatcttaagtgaactctggctgacaacagagtgaaggggaacaccggcaaaagcagaaaccagttaggaagccactgcagtgctcagataagcatggtgggttctgtcagggtaccggctgtcggctgtgggcagtgtgaggaatgactgactggattttgaatgcggaaccaactgcacttgttgaactctgctaagtataacaatttagcagtagcttgcgttatcaggtttgtattcagctgcaagtaacagaaaatcctgctgcaatagcttaaactggtaacaagcaagagcttatcagaagacaaaaataagtctggggaaattcaacaataagttaaggaacccaggctctttcttttttttttttttgaaacggagtttcgctcttgtcacccgggctggagtgcaatgatgtgatc

SEQ ID NO: 33344 - DNA, 1050 bp, Homo sapiens
aaaatgtagtctgctttaagctctctaaagtggtctaagttactggttcctaagtatggatgagcatcaaaatcatctggaaaatttgttaaaaatacagtaatgaaggcacctcactgtcctttttcccaaacatacttctgcattctgtttgagtaggtagggactacacatttttcacaagtatcctcttgggaatacccaggaatgcttacttgagcaacctcttactaatatgtaccttgataaggtggctaggtaaacataaatatacaaaaatccatagatctcccatatattagcataaatcagctagaaaatataacgtttaaagatctagttcacagtagcaccaatatatcgaactctaaggaatcgataaatatgcaaaaactttataaaaacttctgttaatgtttctgaaagatataggtgaccactttctagataggaagattttatattactaagttgaattttctctaaattaacacagaaatttaaaataatcttgatcaaaattctagtagaggtatttttgaacttgttcactgcaagaataaatacataattgcaaagaatatctcaaaatcatcaccaggcctggtgtggtggcccatgcctgtaatcccagcactttgggaggctgaggcaggcagatcacctgaggtcaagagtttgagaccagctggaccagtgcggtgaaacactgcctctactaaaaatacaaaaattagctgggtgtggtggtgcatgcctgtagtcccagctacttgggaggctgaggcaggagaattgcttgaacccaggaggtacaggttgcggtgagcctagatcgcaccactgcattccagcctgggcgacaagagcaaaattctgtctcaagaaaaaagagaaaaaagaaaaagaaatcaacactaatatggtgagacttaatgtatgtgacattaaaatagtgattggatgttaaaacaggtatagaacagaaagaagagtgtatgtgtgtatctgtatgaatttatgatgggtgtaacatatatgtattaggga

SEQ ID NO: 33345 - DNA, 1100 bp, Homo sapiens
aaatttgacaacttatagatgaaatggatgagttccttgaaagacacagaaactattaaagctctctcaagaagatatagataagctgattagccctatatctattttattgaatttaaatgtaaaaatcaatatttagttactggaaaacttttaagtgtggttggaaatggtatacgaactttttcaactgaattttatgaagtctaatcacaggtaaaggttttctgatgaaaatttagtgtctgaattgagatatactgtaaaaaatgttatatatcttaattatttcttcacattaattacatgttgaaataatactttgggtgtattgggttaaattaaatattatgaaaatcttgcctgttttctttttacttttgatgcgtcagctaggaaatataaaagtgtagctcacattctgtttctgttgacagtactgctttggagcacagtgtttgaatgatctatcatttcaaagacctttcctcagttcgttattcatggctgtctgtattccacatagataaggtctgaaatactgctaagtggcatgttttgttttatgcttttataagtttgttgatcattactgatgtggacttttggtgcctcttaggctcattgctatcttccaaccattgtttgcaatttttacctagagataaagagaaagagacatttggtttcagagtagttagattgggatcatgaaagagcaacctcattttgatgcttcaaaaatagcacatcccccgtattactgggatttgctattcttgggattacttcaagaacatccttgtgttactggtttggatgcttctgaatgctgtgaagtcagtttcatgtacatggctcatcagtttagctctctcttggctttgtttagacagttggagcatgatggcctaaacagcttctttcaattaaacattttaaaatagtttacaaatagtaaacaaactccagtttttgtgactctttgtctcgcacaacaaaaacacaatctgaccatgatcatctggcatcttagggtgaaatatggttatactttggcccataccgaaagcaagattaaaaaggggcaggagagatag

SEQ ID NO: 33346 - DNA, 1036 bp, Homo sapiens
ctgccctggagcagtgagcttggtgggtcctgtctggcatgagagctgcctttgggagctggatcccagcctctaccactgggtctggtgcctagcaggctatggataaacttctgctgactccggcctctcctaagccactgcaacgtggtcggtgtagtgcacagtgtgtgtgcagcgtggccttactcacagcctccacattagagagaatctgactgaagtcttactgctgcctcgtgtgaacataaatgtttgccagaaccatgagcaggaaatgttaatctgccttgtttcctgtcctttacacggaagaatttttttctgtatggaatgcgtgccttacaaataatgagtggaaatacccatcgctaatgaaaagttatacttgactgttagtcagctaaataatctgagatttctaatacttttaatttggcttttacaatgcaatttatcttagcttttttgatttcttaggtcatatctttagaactatatatttgaatgttaatgtaattttcatattgaaattaaaatgttgaactgcgatgttaagtgtttcctgtggaaaaacgttcacattttctctagttttaaagttgaatcaagctgtttgaagattttcacatttcttctagattttatcagcttgttactttatctgtcactttctgtgatttgcagctggagggggttcctcatgcagccctgtcctttcaagaaaacaaaaaggtgattatttcagaaatcagagtcttgtgttgaatcttactgattttcttgtatttctgtaatgtaatgtatcttgtatttcttgtaatactgtattggactctgtgtatatctcttctcagatgagtgattatatgtgtgaatgttgctggaatctgataaccaggcctgaatagttttgtagggtggcttttaaaaattactttcatatcagaattgctttgtcataaattttgaacgcatcataaatttctaatgttcggggtcagcagactttttttgtaaagggacagagtgtaaa

SEQ ID NO: 33347 - DNA, 1078 bp, Homo sapiens
taaaatgtgctctttcctcattgcacttccatgttggagggcttgtctcttggtgatcacacttcaaaattctcacagccccccttgaaccgtttaggtgttagacggtaccgacaaccagtatttgggcctgcagattggacagccccaggatgaagatgaggaagccacaggtattcttcctgatgaagcctcggaggccttcaggaactcttccatgggtatgtggactacaggtgatgcgctacaaagtggtttgtattcagacctggacatcttaattatatctttgcttccaagaagaagtcctttgatactgttttctgagttctgaatagctgatgaaaatgaccaattgaggaataatcatactttttcttgatctaaatcttatacttttgagttatcttagcataaatgtataattgtattttaagtggaaatttgtcacttaatcttgatttctctgtttttaaagcccttcaacaggcacatttattgaaaaacatgagtcactgcaggcagccttctgacagcagtgttgataaatttgtgttgagagatgaagctactgaaccgggtgatcaagaaaacaaggtgagggacataggcttgagacgacttggtgtttctgagcttgtgtgaggatttaaaatcgccctggctactgtctactttattgctttcccatccctgggcctttaaatttcccctttaaataccagctcttcccaggcctgttgttttctgcctttccaggtactacccacagccttgagaattgcctgagttctgcctcctttgagagtgtgccccagacaaatctattctgtactgaatgtttccttgtctgatttcttggatcattcatttgatggttgcgtatggcctgcaacgtttcttgttttggttctactgaactgttctaaaagtctctcttcatattatctttttacatgtaaatgtaactgtcttcacttttaattcctcaaggacaaggaatagcgtttcacagttcgtcccatcaatcagaattatagcctttggcatctccctatctaccaggcccacttcctct

SEQ ID NO: 33348 - DNA, 1028 bp, Homo sapiens
ttccttccttccttccttccttctttccttcctcccttcctccctcccttccctacttccctctccctttccctttcccttccccttttcccttccccttcccgcctgcctgcctgcctgccttccttccttccttccttcgtttctttctacatatacacatttttttaaatttcaatggtttttggggtacaagtggtttttggttacatggctgaattttggttacatggtgaagtctgagattttagtacacctgtcacccgagtagtgtaccttgtacccaatatgtagttttttgtccctcaccttccagccttccgccttgtgagtctccaatgtccattataccacactgtatgcccttgcgtacccacagctcagctcccacttctgagaacatatagcagaaacatgccaaagtatactcccactaccagaatgtgattgtgcctgattcttctcaccagtacaaatatttcaaaaaaagttaaatatgtatcagttttttgggcagaagttgatacttctctttatttatttattttttttgagatagggtctcattctatgatgcccaggctggagtgtggtggtgcgatctcggctcactgcagtctctgcctcccaggttcaagtgattcccacgtcagcctcccaggaagctggaattacaggcgagggccaccactgccagctaatttttgtattttttggtagagatggggtttcaccatgttggccagactggtctcaagctcctgacctcaagtgatccacctgccttggccttccaaagtgctgggattacaggcgtgagctaccacacccggctgatatttctttttaaaataacttaccttcttttgaaagtaatacatgtttaatgaacagaatttaaggaaaatataaaaaaacgaaataatctttgtaatcaaactactgaaaagaaaaccaaagttacattttggtgcatattctttttcattttcatcattgtaatttgcatttctttgattacttgtgag

SEQ ID NO: 33349 - DNA, 1076 bp, Homo sapiens
acctccacctcccgggttcaagcaattctcctgcctcagcctcctgagtagctgggattacaggcatgcaccaccatgcccggctaattttgtatttttagtagagacagggtttctccatgttggtcaggctggtctcaaactcccaacctcaggtgatccgccctcctcgaccccccaaagtgctgggattacaggtgtgagccaccatgcctggccttacatttttataataagaatttatgttgctgacattagaaaagaaccataatatccaagaatccaagaataattaaattatgtacatatgctagtatatagtgtgatgctttggagaatttttaacaatatggagatgtataatctggattgtaatattgagtgaaaaaaggcagaatacaaacctggtgggggtatagtcggatttcagttaagaaaaataatatttacatatatacatttctcacactggcagataatcaccaagataaattttgggattgtggatgatttttttcttctttatatttttcagatattctcaaattttctaaaatgagcaagtataacttttgttatcagaaaaaaataatatacaaaagtaatgttaatttgctggtgaccaggttaaacctttttatttttattttttgagatggaatctcactctgttgcccaggctagagcacagtggcatgatcttggctcactgcagcctccgcttcctgggttcaaatgattctctggccccagcctcctgagtggctggaattacaggcgtgtggcaccacacctggctaatttttgtatttttagtagaggtagggtttcaccaggttggtcaggctggtctcgaactcctgacctcgtgatccacccacctcggcctcccaaagtgctgggattacaggcgtgagctactgcgcccagccagacctttttattttatttgacaaaagaaatacttccatgttatagaagactaaatattgtttgggctgtctgcagtatggtcttcccttgatttgttcaaaatatcgtaaactttgcttatttatttttattgtggccgactg

SEQ ID NO: 33350 - DNA, 1088 bp, Homo sapiens
tggatcttcagaacagcacggaaaagtttggagggtttctccgctcagccttggatgttctttctcagatactagagctggccacactgcaggacattgggaaggtttgtgtcttgttttttctccttgggttgtggctggcacacttgatgtgcgtcttctgggctgagttcatctaggatggagcctggttctccagggtgcctccgggagactcctccctgccccacgtgcttgcgtcacaggacccaagtctgactctgccttagccatgaagtttagggggaagtttctatttgtattctatttttgtctgttatcatgtattagcttagacccagtttagtttggaaaatcagtgggtttcaaaatgtgtttgtagagtcctttatttcttaacttgaccttttcaagtggaaaggggcaaaacagacgggtaagggggcggggcgggaggtgtgacttgctcttttgtgcctgaggaagtaacagagctggggttgacagtcatattctctgacacagatagtctctgacttatctcacagaaagtcagcggcagagcctgagttaaaagtctcgtagattttctttttcttttttttggtggctaatttcagttttatttatatttgtttatttatttattatactttaagttctgggttacatgtgcagaatgtgcagttttgttacataggtatacacgtgccatgatggtttgctgcacccatcaacccatcacctacattaggtatttctcctaatgttatccctcccccagtcccctcactccccatgggccccggtgtgtgatgttctcctccctgtgcccatgtgttctcattgttcaatttccacttgtgagtgagaacatgcggtgtttggttttctgatcttgtgatagtttgctgagaatgatggtttccagcatcatccatgtgcctgcaaaggacatgaactcatccttttttatggctgtatagtattccatggtgtatatgtgccacattttcttaatccagtctatcattgatggacattcgggttggttccaagtctttgctattgtgactagtgccacaata

SEQ ID NO: 33351 - DNA, 1044 bp, Homo sapiens
tcggccaccaatctttaaatggctaaacaaaagggttgctaaaacataatccaaattgacataagaaataccatttttccaaccaaaattttggcattcatatggctacttttacgtatttcagctgcatttgaacatctttttcaaactttagggtggttggtgtatcactgaggtcttggatgacactttagctttgattttgtttttatgaattaaaattgtcataccaaaatttttatttcaagcaaatccaagagcataaaaaattaaaatattacttaaaatactaagagagaacagatatatattttactaagcatatgttgaatgaaattgttcaaatatttataacaggcatagagtagaattttcttaaaaatatttttgatggtataccaatttgtattttctcagaaacatttgccttattcttttttctgttgtgtttttcttacctgattgaaagctcataatctgttgttattgtttgttaacctttaatgctctgatttcaggagttcaacctaagcctgctagctccatgcttaagcctagggatgagtgaaatttctggtggccagaagagtgccctttttgaagcagcccgtgaggtgactctggcccgtgtgagcggcaccgtgcagcagctccctgctgtccatcatgtcttccagcccgagctgcctgcagagccggcggcctactggagcaagttgaatgatctgtttggtaattaaaattaaaatttatcttatttttaaaaagcattccagggccagtatagtactttgcaccaagtaaatgtacaataaaggcagtggatctaatacattgaaagcgtttacagaggtagctaaagagcagcacgggtgtcctcggctcagaatttcttcctgtgtgtttgccactttgccattcattgacatggtcatggacatagggctctaagcccttgaggaaggctgggccagacctcaggggagatgcagccccaaaccacgtgcagtcctgtggacggatgtgtagatgtgccactgagga

SEQ ID NO: 33352 - DNA, 1034 bp, Homo sapiens
actgctgctgcctggccctgcagctgcctggcctctggagcgtggtctcctccacagagtttgtgacccacgcctgctccctcatctactgtgtgcacttcatcctggaggccggtgagtccccgtccatgaacggtgggttcctatcatagttcctgtctgcttcaccatgtttttattttgtgctgcctgtttgccaggtactaagctaggaattggggatggagaggtagataaaatatgcatcaggaagggctgggccccatctcttactctccaatatattggagtctacactggaatttaactggaatttgcttttttagtcattttatttagattttgaagtttcagctttcatcaaaaatacctctaaactttatgtctctgtgatctttggtcttagctgttttatgtatttagtcttatatgatcataagattaataacattacattcagaagattatttgttttctgtcagagttaaaatgtttgtttttatactgcattgtaatattaacgtactgtaaaataaaagtggcttgttcttttcaaggaacagtatcctcaacaagggtcattagccacaatttttaaaaaattggacgtcatagtttacatgttagagggcgttttgaagctttgtatttttaaattaaatgttatagagtgatgttttcatgtttcataattgttttcatctgtgcatttgtagccaacttgaaaacaaagatccagggattactacttaaaagccagacttcttggaggttatagtgatgattttgatagtatcttgagccgtctcataataacctcagggtgagagatggccaacaggagacagtcgagggacttagaaatctgaatgaaatctgaagttcaaatcttcagacatataccactaaccaagagattggtacctcagtctagtattgtctgtttgtctaaaattggttctaaggaatctaggctagtctgtctatccctttcaacttttgtgaggctgcacaaatgtaaaatgttgaataaa

SEQ ID NO: 33353 - DNA, 1069 bp, Homo sapiens
tttgatggcaagaggtgtgatcttgtggtgggactgtaatcagtcagttctcagtgactgtgccctgctgtggtgtttcctggaatgttcctgtcttgtcctagaaagtctggcaggggcaccctgactccactgtccagtcctctccccagtccctcgggcttctgcagatttgaggcttgtttggatcccagaaggttgtggcaggagacaccttgcctctactttcccctttataattcaatgtccaaagagagccctgagcaggtacctcacgccagctgcctcacggagctcctcctcttcctggctgtgaggatcggtatcagtggcctcctgctctctcccccttgcctaacacgagcacctttgcttacttgggtgcccttgctcttgaactgcccatcggacgtgcgtgacccaagactgtgccgcagtccttgccttgtctgtgctcattttctttgttcatttttttccctgtaacgtaaattgttatatttgtctgtatctgtgtctgaatcagtcctgcacgctctccttctctctgtctcttgttctttctttaccccgtttatcacggggaccccgatgtccattgctctagttctcctgtcctaagcaccccatcccgtctctctggccttaccacaagtggcgtggctgcctcagacatcatgatggggacatgaagcacagctgtcagaaacaactgttcgttagatacactcgaatgcagctcatcaatagggatggagggtctgtcggatgtattttcactgaatccccgttcctaccttgatacactctttttaatctattcttctagacaggtcagaggaaccattactttgacttttaaatttttagcagctttattgaggtagaattcacatactacagatttcacccactctaagcggacagcttggtggccattagttttatccacagagttgtgcagccagctgcacagtctcagggctggactccagggaagattttagcccatttagtgagtggggcagaagtggccctggccctgcacgaggttgcctgcatgggcgtc

SEQ ID NO: 33354 - DNA, 1598 bp, Homo sapiens
gctgtatctgggcgggcagcaatcagaatcggctgcaatggggtgctcatgctgctgatgaagactcaaaaggggtgtgtgctacctaaggcagggcctagcttgaggctgaggaccccgggaccatttttggctcatactgccatgctgagctgaccatctgtgcacaagtcctgttcattttcctccttttctgttggtcatgaggaactcactgtgtggccctaggtttgggctgacagagctgtgctggtgccctggtgaatgatatgtgggtctgggccacgtgctctgcacaacctgccccttccctgctgggtgtaaacttctatctcatggtggattgctgctgggtgtgccccatgccagggtcagtgccatgctcctgatagacagctccagcgtctaatcactgggtgtccccagtggatgctccatctccaccagggccctgctgctttccacatggcttgtggtccctgctgtctttgccccacaccttaaacttcctggctgtaaatctcttactggggccaaggaggatggcccaggtggcagggctgcctgtccttttctgtgtgggccctgctcgctgctggctgccttccatgactccttggagagggatctgagcagccttcccaagtgaggggtggtttgcctcttgagcccatcgtcctgaataacacggaggaaggctctctgtaagaaaacgatatttattaatatttgggaataggcattgcaatgagaatatgcatgctgtagtaaactatgaatattcagggaggtcaagaaagacagcagtttttcaaggaaaaatgaggaggatcacaggattgttttgagataattatcttacaaggatgggaccagtccaaggttggacaggcagttgcgggacagatgtcctcagaggaatatttttgtatgtgaggctgagatggcctgtgtgcaaggttgtggttttgcagtcttttgtgatggatttgttatcaggtctatgagcatgagaaccctcccttcctggccttctctggctctgtaacactttgttagggtttttaatacaagtgactccattttctttctgacaactttcacatttcccccttttaattgagatctttctccaaaagcatagctgaccagtcatcctgcagtcaggctttgattgccccttggtgctgggatggagctgtcccagtttggtgtggtctggttccacatcatcaggaagtgactggtgaccaggagtcagtgtcagagctcatttagccacatttgagcaaccagggaggtgtggagggagtggccctcaggcgcagtctacctgagtccactgttaagtacggttttgtctgttccatgggtgttggcatcatctcaacgcgctgggccagcacgattctgttaggagttgtacttctgcagagacttaagcaacagataaaaaatttataaagggaaaatgcagagtgaaattaataataatatgacaatcctagtttgcataatgttttgagtcatgaacataggcttaaagacaaccagttgaataaatcaaatgaccatagggaattgggtgagacttttta

SEQ ID NO: 33355 - DNA, 1033 bp, Homo sapiens
acctttttggcaccagggactggttttgtggaagacagtttttgtactgaccagggagcaggggatggttttgggatgaaactagatcatcaggcattagatcctcataaggagaacacaacctagattctcataaggagaacacaacttgcatgcacagttcacaatagggttcatgctcctatgagaatctaatgctgccactgatctgacaggagacagagctcaggcaataatgcttgctcacctgccactcatctcctgctgtgcagaccagttcctaacaggccatggactggtactggtctgcagcccaggggttcgggacccctgatctaagacaccattgccaaatcacatgaagatttttcccttgtgttttcttctaagagttttatggcttagcttttatatttagatatttgactcaattgagttagtttttatatatggtatgaggtaagggtcacattcttttgcatgtggtcctaacagcattgttgaagagactgttctttccttattgaatgaatggtcttggcccccttattgaaaatcagttgaccatggactcatagttttgtttctggactctcaattgtattacgtggatttatatatctcgtcttatgctaataccactccgttttgattatcgtagctttgtagtaagttttaaaattgagaactcctccaatttgttctttgttttcaagactggttttgaaaacagttttggctctttagggtcccttgtaatttccattttcggcaaacaaacaaaaagacctttgggttgctgacagagatggttttgaatctgtagatcagtttggaaagtgttcccatcctaacaatattatgtttttcaatctgtgaacacagggtatctttccttttatttatatcctctttaagttccttcaaaaattttttatagttttcagtgtacaaattccttcactttttaatgtaggcagtaaaccacagaggtattagtagtacttgtgactttgtcaccaatgcataccag

SEQ ID NO: 33356 - DNA, 1045 bp, Homo sapiens
caaattgttttgtccaaaatgtctcgtttattataatttcattgataaagcccttgattgtagcccagggactttcacatattggctgcctcctgttggacccacaggcctctattggtgattccaaatcagccgtgcatggcccttgatcccctcctgtagagggactgggtgatggtatctataaaccaacagaatagctcttttccagtaaatcccccacagagtccagaaaaatatgcaagcagtccttttacttcaagtttctacccacacagggtcaacagagggaggagaggcagaggcagctgccctagaagcagccatcgtcccagtcccatagccagtgtgaaatcttagccctcttttccttacacatggccgtggccgctcttctagtcagcaccgaaatctcctccctgaagagcttctttctcttcctcccttcttccttcctccatttcttggtccactgaagtccctggagatcccctgggtcctgtcctctttgagttgtcattgtctttgcttctgttgctcatgccagggctacaggaaatttgctgcgtccccctaggtactgttgtcagagtggactctgggtcaaagagtcagacctttcattggtgtgcttcaagtctaagctttgcaagctctttctctatgttacgtctgcctccttcctctttagtttgtcttttatttgtcctagccttgaggagtgaaggttccaggaaattgaggatgggaatatagtggaaaatccattccccacaggaaaatattctgaaatttctggcttgggtgacaggctgtcattgatagagctagataacgatgaaggtgatgataatgatagccaatcctatgtagcactcattaagtaccaagcactattaagtgcttgagggagaataaatcatacaatcctatgtggctcgtattcttgtcatatgcattttgttgatataaaaaaaaaatcaaggcacagaatgattaagacacatacctgaggtcatacagctagtaagttgcagagcaagaa

SEQ ID NO: 33357 - DNA, 1054 bp, Homo sapiens
ttccccaggaggatttctgtactagtcgctattgctgattatgctgtgtaacaaataacccccaaacattaatgaacattttttcctactcgcaggtctgcaggtcagctgaggggactctggcccaggatgtgggttcaggtctgcttttgtgtctctcattccagaaccctaacttagggcacaccatgtacctaggggatgctctcctcatggtggattaggagagcaaaaaaggacaaaaccacatgagcacattgaaagcttctgtttgcgtcgtgaccactcatgttccattggccatagcaagtcccacagctgggtctgacgaggaagattattcttcccaggagagggaaggagaaagcaagtatttgctgaacaggaatcaaatccattgcaccttctcaagccaaaactaggttaggagtcctctttgggcacccatggtccttaatgcatccttctgttacagctttggattctccattgcccttacctattccgttgtctgtcttccccagtggattgcaaaaagattgctatggctgagatgtgtaagtcttttatgagatctaggtgacagctgataagtgtagttatggtcatgatggtcaattctttaacagtttattaacaaaataacaaaagttacaaaatgaaaatataaaggataagttattcgaggactatggttggactctagttctgaacattatttaaactcgatgttaacatgctgtagataataacatatccacagaacagaagctaggtcttccattggccataacatatgcctctaaatgccctcccccctaccaaagtagcatccagaggtatgtgctattacttgagagatcattctgcaatttaaaatttaaactcgacaaattattaataccataaacatttcagtgtcaaacactgaagatgcaatgataacacctggctatcctgctcaggtagctcacaatctgaagggtagatggtggtgggagcagagcagttaacagataaaatgaaaagtagtaagtggagctcttatttgttg

SEQ ID NO: 33358 - DNA, 1050 bp, Homo sapiens
gtcaacaagctgctgggcaattctgtgcctcagtttcctcatctgtgcaatgaggttaataatagtacctgtttcctagggctgctttaaggatcggatgggatcatgtgtgtaaggtacttagaatggtgccagttgtacaatgcaaggtcgccataaatgttagttattgttattgttatcattataataaactaggacaatcatgatcatggacagcttcactttaggtcctaaggccgggcagaggtgagggaaatgaccccatttgtgaggtcctattatactctaatcacttccgttatattttttagatttctcctccccacatccctttgaggtagataaaatggtgttcatttaaggaaactaggctcagagaggttgggtgacctgcccaagatccacagctcatttgtaagaacaggatggacatggatcagctgcccaggtctctccccagcccctttccatggtggcctgcatctggcagatcaaggtaggggtgtcccggctctgccagcatggcccaaagcaggacaatgctgaagagctgtcccagctccagaagcagccccaggatcatccaaggccatggctggacctacactgcagttcagcttctctctctgtccaatcctgattccatcttctgtctccgaaataagcatcctgctcatgcatatgtaggtgtgggttggactgacagctttctcgggaccgagaactttcagcaccaaaactgggaatgtcctgggtctactgggaagagttggttccctgtgcatgctgaactccaccagagtctgcctcctggggaccccttctgtgactgcagctcacagcgagctcagtctggtgctcaagatcaggctgtgtccgccacgcaccccagagaagttgtagaaggaaaagagaagctcagggctgctgctgctgtccactttgctaccttatgctgtccagcttggggcaagactcggttctttcccagattgaggtgaaagtcatcaaggcactagaaggtgaacgcgcgaggtccagggctgg

SEQ ID NO: 33359 - DNA, 1031 bp, Homo sapiens
tgttgcccaggctggagtgcagtggcacaatcttggctcactgcaacctctgcctcctgggttcaagggattctcctgactcagcctccccagtagccgggattataggcacccaccactactcccaactaatttttgtatttttttttttttgagagagtcttgctctgttgcccaggctagagtagagtggcacgatctcggctcactgcaacctccaccgccgaagttcaagcaattctctgcctcagcctcccaggtagctgggattacaggcacctgccaccatgcctggctaatttttgtatttttagtagagaccatgtttcaccatcttggccaggctggtcttgagctcctgaactcatgatccatgaggatcatggcctcccaaagtgctgggattacaggcatgaaccatcgcacccagcccaatttttgtatttttagtagagacagggttgcaccatgttggctagactggtctagaactcctgatctcaagtgatcttctgccccagcctcccaaagtgctgggattacaggtatgagtcatcatgcccagctctttctatttcctatattgccctggcaaccatgaatctcttttctaatagtttatcttgcagatctttgcatatcagagcacagaacacttttttttttttttttttttttttttttttttttttttttggagagagggtcttgctctctcacccagactggagtgcgatggcacaatcacagctccctgcactctccttgaccttcctggctcaagcgatcctcctgcttcagctttccaagaagctgaaactacaggtccatgccaccatgcctggctaagttttaaatttttggtagagacagggatctccttatattgctcaggctggtcttgaactcctaggcttaagggattctcccaccttggcctcccaaagtgctggaattacaggagtgagacactacacctacctagtctttcctttttttatttgagtaataggtagggtctcaatgcacag

SEQ ID NO: 33360 - DNA, 1050 bp, Homo sapiens
cctctgccccttttcttctcactggctggagtgcagatgtgagggcaggagccagaggaaccatattgggccatgagtgggagtttcctgttaggcagagcaagaagacagaggaagcttgggtccctggtgagagagaaacaaacctctctctcgagtttaagccacgattattctgggtctctcttagagtcactatacatgaatgacagtttctgtcctcctgccagtgtgtgcctttcactaaaccagaggctgcaaagagacagccaagctgtttttactttctggatattgaatctcactctgtgccaggtgtggtcttgggtgctggagtgtggtgtggccagggcagatgcagtcaccttacctggggaccatcacacaagggcctgcaggaggggctgagctggaatggggctcaaaggtctcctgaggaggtaacatttaagctgagacctgcaggaggcagggccaacgcaggaagggaatgtagtgtcaggcagaggaaacaagagaatggcaaatttgcggcttggcaagaagttgtggatggaagtggagagtgcagtgacacgatcaaggctactgtgtcgctggccactttgtccaggacaaagtttaggataaaaactctcacaccaagagaacacagcctgccctaacttccccttctgggtgggttgtggtcattgggaaatatttagtgattggccgtttaacttttagaaagattcttcctagatttgggaccccgtgagaaattaaacaccaacctgcatctggaacttttcttcccagcgtcaatgttacgaagttatccagtgggtccctcttggtcatcccaagctaaccaccctcagggaattaatcatatcgctgttcctgccaacaacaatattcattcaggagaaagcaaacagtcaaaattgcacactgataagatgggtttggaagctcataaagaagagaattttctacagctagacaaattacaattttctcgccgggcacggtggctcacacctgtaatcccagtactttgggagg

SEQ ID NO: 33361 - DNA, 1047 bp, Homo sapiens
acttgcaccattcataggaaacacatgttggctggtaattgttttgaactcattttgagctgggctgcaccacgttgggctgcccttgcgttttcgcactggtttgagatggccgtggaatttgcaaggaattttcttcccaattccagaggctccacgagggggccgttccttggccaagctggcagaagagcactgtttggcttcctgcctcctggagggaagcactttccccttattgggagagggctgcccccagcgccccttggccccgcattcttatcgggagattggaaagaatcaaagggtctcacggccctaattgagcctgaagggcttccttccctcccacctgggagttttctcagaagaagaaataaaaggttgggtgattttcccaagagtttctgttggagttttacagctgcaaggaggcgtcattccgaatttgggtgtcacccagcttttcgaatgctaatatgcatacgatttcctggggatctcgtgaaatgcagattctgattcagtgggtcgggggtggggcctgagattctaacattctcgctgattgggctgatcagagtcccatacatgacgttctcagaccttcccttccagcgcatcagaatcagggctcgttaaaatgcagatcgcggggcccctcctgcagaggctctcattccacaagtctcgggtggaacctgaggatttgtgtctctagtaagctcccaggtcatgctgatgttgctggtttggggagaacactttcaaaccactgtccaaaaccaatgccctgagaagaagcgagcgcgtttttccatggggttccctactgtccaggcaccaggaatggctctgcttgagggcagaagatggggtttgactgagaaggtctaggctgccgttctccattggacgtattttctggagctgttcgcttaccctggaaggccccttttcttcctctctctccaaattgcctcccactcatttccaaagctcagtgccggcgtcacctcctccagggagccttcttttcctccaggc

SEQ ID NO: 33362 - DNA, 1027 bp, Homo sapiens
cacttgagtttccattcccagcaccagggtggtgccaagtacacagtgacgtgccactccctttggacacgtttattacatttactgtcctttgttccccctggaatgcaagctccacgaaggcggggatcttcgtctgttttgttcactgatatccccagagcctagtgccctgctgatatagtaggcacttgataatgtatttgtcggatgaacgggtaatatagtcactcacaggcagctttcaggatgagaatgtttgtctgatcctctcatttataaaaatcctcacaacaactactctccaccctgtccccagtgttgaaagaatctatagagtagaaataatcagcccattggctatttcaataatatatttagttctgaaaagctcttaattgactctgactcctctctgagtcctttccttagacctcccttaaaactctagcctggtttgttcactgtaggacgaaggagtttgggagactctggctctgaaggctgcctaggagcttggcaaaagcgtctgtccggagtcctgcaataaccacgcccctcacccctttacgaccacacccacttattcccgaccacgcccacgcatccctcctttagtcccagcccctgtccccttcaggaccacgcctaccccctccctgaccactcccatccctataggactagcctctcctcccctcaggaccacgcccctctcccattccaggccacgcccaccccattcaggacctcgcccacctcctcctcggaccacgcccgttctcctcacgcccacgcccagctcatcttccattcaggtcttctactgcgagtggacttttggaagcctctttgatggttgcagcattagtagtatttctctgcacacattatcctgacgccgattcagaccacgttcccttaccccctgactttgctcaaagagacagatctccatacttcttccctccatttgctatcttaactccacccaccatcatcacacgcatattgtaggaaatttaga

SEQ ID NO: 33363 - DNA, 1213 bp, Homo sapiens
accttctggacccccgtgccagttaccgtcctcattttaaaagggtacttggagccagacgcagtggctcacacctgcagtcccagcactttggaaggctgaggaggtcagatcaattgagcccagagttcaagaccagtctgggcaacatagcaagacctcagctctacaaaaaataaaaataaaataattagccaagcatggtggtgtgcacctgtagtctcaactacttgtgaggctgaggtgggaggatcacttgagccttggagtttgaggctgcagtgagccaagatcacaccactgcactccagccttggcaagagagtgagaccctgtctcaaaacaaacaaacaaaacagaagagaatttgacatgcagtttatctatccatgtcatatgcattgatcccagtgaagcagtcctcctccattctccagcctggccgcctctgggcacccttttccaggtggtgccactgggacaccatgaccatgtgaagctgtgcgcagacagccagaggcctccccctggagcaccagactccattgcctcttgctctcgggctttcctcactcaggtgttcaccaagtattgcagagagcttccgaagatgacctcaatgatttcctcctcctggtagtcacaccgttgtgtaagcccctgcccttgactgtgggctggacctagtgaatcatttctaaccatagaatatggcaaaaatgatgggatgtcacttctgtggttaggttcgaaaaaggccatggtttctgtcttgctagcagattctttctattgacttcttggcttgcatcctttgatgaaaccagcaggaggcccatgtggcaagaaactgaaggtgactttcagccaaaaatcagtgaggaaccggagcccccattcagcagccacatgaaactgaacgctgccaacagccactgagtgagtggacccttcccccttagagtcttcccatgacatcacagcccctggactgacacagcttgatggcatcagccagagaccgtgaagcagagcacccagataagctgtgcttggacttctgacccacagaaaccacgagataataactgttgtttcaagccactaagttttggggtaatctcctacaccatgatcaataactcacacagcacccactctcccactctgtgccattgtcctaaatgtcttctttggacaatttgcatctatt

SEQ ID NO: 33364 - DNA, 1051 bp, Homo sapiens
ggcatggtggtgcacacctgtagtcccagctactcgggaggctgaggcaggagaattgcttgaacccaggaggcggaggttgcagtgagccgagatcaagccattaccctccagcctgggtgacagggtgagactctgtctcaaaaaaaaaaaaaaaaattaggctctgccaatgagaagcacatgtgcaacatttggaaagcagaatttgctctggcagtggcagctggtgggcaggctttggcaggagtgagctttgcagtggtcatactctctatttatcagttcatgggtaagggactggtggggcatcagctggaattgcctacagtatcctgagttcagaatcaagcagagtgaccttgaagcctaaagcccagtaacagccttatcactttcactcctccagctcatccaacagttttctagcacctatttatttcctcatattgaatacctcgctgccaaaaatacctagacacatttctggttccttgactgaactctgctgatagagccattcactatgcaaagccctggggctacaggtgaacctgacataattaattccataacacgacactcacactctagtgatggagacagaaagttagaaagtaatgtcactacaatgtacctgtctgttagaccccactcagaggtgagtatacagtgaagcatgaagcttaagcttcagtgtccctcacttgcctgggtctctacccaggtctgagaaaggccttgcgattttgttttcacaattttctgggttttgtttctctttctttttcttttcttttctttctttctttctttttttttttttttttttgagagagtctctatctgtcacccaggctgaagtacagagacgcaatctaggctcactgcaacctccgcctcctgggttcaagcgattctcctgcctcagcctcctgagtagctgggattacaggcacctgccaccaagcctggctaatttttttgtatttttagtagagacagggttttaccatgttggccaggttggtcttgaaaactcctgacctca

SEQ ID NO: 33365 - DNA, 1152 bp, Homo sapiens
agacccaccagttgtatgaagttgggtgagccattaaatcatggaagcattttgtactcatctacaaattagggataaaaatagtttccttcctcttgacctcacatggtagccatggcaattaaatccatacatgtatacagtaggtgagcaataattgcagtcctaatgtgaagagcgatttttctaaagcattagtatgagcaagttctatcttttattcaaattctgcggtggttttcttgtgtcttcattcattcattcacttattcaacatttactgagcatctagtatgtgccaggcactgttttagataccagggacaaaggaacaaaacaaagtatctgttttgaacttacaatataacagagaaaacagacaacaagcaagatgaataaacaaaaatggaataagtaaaacaaatagtagagtcctggagtgattggggaacacaggatgcccttgagtctagagtgagagaaagagtgggactataaaaaatgaggactgaaagacagtgaggggttgggggatgcaaagtctcatggcttttactctgcattagatggaaaagtcttcggaagattttgagcagaggagagacatgatcagattatattttaacagaatcactctgattgccaaagtgaacacactgcagtgacaacaagggcaaaagcagtcatcccaggtagaggagatggtggctgggaccaggtgttgttaggaaagtggcgagaaacagtaggatatgatagttctgttatttgcacttggttgcgtctgttagcttgctgccactgttttgtgactgtggtgtgtgagcttatcttcagcggacataccttgcagctaaggttgagggatacatctccaaggaaattttgcatatgcttcttctgggcatctcagacactcatcctcatcaacactgggctactaccttaatttcgaaaacagtcaacaaatattgattcatgagatgagcctggccttttaggtaaatttctctgcttcaagtttcatcagctacatggggagtatcaatgctaatagtaaatatgaatgcagacaagctatgggtgtgaaatcttttttctaaatttttttttttattttcataggttattggagaacaagtggcatttggt

SEQ ID NO: 33366 - DNA, 1057 bp, Homo sapiens
acaaccagaagttcttgaacaaaattactggtcagccaaactggttttttgtttttgtttgtttgtttgtttgtttttgaagtaacaggctatatgttttagagcagttttaggtttttaggaaaattgaatggaaaatacagagctcccgtggcccctcccctccattcccaaaagttcttattatcagtgtcctgcattcacttgatgcatttgttacaactgacgagagccaatatgcctactttattataacttaaagtccacagtttacattggggtttattctttgtgttgtgcattctataggtgtggacagatgtataatgatactgatcccccgtgagagtgtcatacagaatcatttcactgtcttaagactctccagggcaccatctgctcatccctccctctcctcatccccaactgccgggaaccactgatctttctactgcttccgtagttttgcttgaagttttgccctgcatggcttattgtaccttgggatataagccaataatagtaggacatgtaatgaatttataaagaaaataatcaatatatattaatggcgcaaatttgttttactaaatgaggaccagatccaaaaaaacatggagactactgtcctagagatgaactgataactaaactactttctataagggtctacaagctattttacaatttgaaataaaaagttcatattttaaagatattatgttctaaataagaagttagaatattttaccacagagggatgaatttttgaatttgcaaagtgtctttgcctccgttttctcattttactcctttgtggaatgagaaagcaaggtgttttttatctctttagtggcaatatttaagtgactttcttggcctgtctccctttcttcctctccctctctttctctttctcttgtagtgatatgtgcaataacagaagttttttttccattgacctcagcttatcttatgactctcccagttttttcattggggataaacgtgtttttgccaattccagataactcagtcactcctagtttaaaacaca

SEQ ID NO: 33367 - DNA, 1031 bp, Homo sapiens
ttagtggggaggttaattttgtgttctattcaggccttcaactgattggacgaggctcactctcattatagatggcaacatgctttactcaaagtccaccaacttagatgtcaacatcatccccaaacaccctcataggaacatccagaaaaacgtttgaccaaatatctgggtactatggcccagccaagctgttgtgtaaaatgaaccatcacagagtgttcacagggaaggagctggtttgggcagaagttgagatctattcagaaaattattttggacccagtcacccttgcaaatggtgtgtttgagggaacaacagctaagcaaaagatatgggaatgtgaactgcaagatttgtattgttgatgcctagagtgagacagcatggtagcctccataagtaggtgcagcccagcagcaggagcaagtgtgttaggcaagctgcacagagtttgtcttcaacagtgacacctgtggccatgcaaggcaatgacagcagtaaatagatcagactccgcttctccaagtgaacctcagaagcaggaatgaccccttctagactgagcaagcctctaagtatttcaaacgattatgatacaggtgcagggtgggttcaggtgtgtggaaaggtgacctcagagggaaaagagcttctgctagttggacacaaaagcctttggtgattgactggcaaagttcagaggtgtccactgtgcccggagttggtaaaacaaagaatacaggttgctacataaaaattaataagggatgacttcctcccctcactttccagcatgcataaaaatagcagaagctttagcagagtcccccatgctgtaggtgacagagcttcagcagtgacttcttcttgtttcccttctggcttttcccaggaggcagcttaggtttgaagcagcatttcactttccatctctaaacaagtaccatatgtttacaactttgggagttctcactcctctttctggagtcaagggtgttccctgggtggtgagggaaagggtgtgtgc

SEQ ID NO: 33368 - DNA, 1028 bp, Homo sapiens
aaatttgatgaaatctttaacacacagagccagtgaacccactgcaaaaaaaaaaaagaagaaaaagaaaacattatcaaggttcatcataattaaattgctttaaaacagtgataaggagaaaatctcaaaaggaccctgtaacaaaaaagacattacatatagaaaaacaatgataataatagctgcagatctctcattggaatcaatgtaagccagaaagaagtggagcaaaatatttaaagaactgaaagaaaaaaaaaaggttggataaaaatcttatgaccagcaaaaagttctttataaagaaaggggaaataaaaagagaggattgaaaaggacatacaaaaattaaaagcagcagagcaatattacaagaagtattaaaggaaattattcaggcaaagtaacatgagatgggatgaaaacctggatctacacaaagaaaaaatgaacagcagaaatagtaaatgtgttggtaatgtaaagggtttcttttctaaatttctgaccactttgaaacataattggcagtttatattttaaaataacaaccgtgtggtttataacctgtagaggctgagtatgtaacaacagcagcacaaaggctaggaggtggttcattcttatactacaatgtgaagcggtgcaatactacttgaaggtaaaccgtgataggttaaaaatgtatactatcaacactaacgcatcactagagaaagaaaacattcaacttttgccaaggtgccaaggcaattcaataaggaaaagataatctttcaacaaatgatgctgtaacaattggatagccatatgcaagaaaatgaaccctgacatttacgctaaagcatgtgcaaaaactaacctaaactatatcataaatctaaaatgtaagagctaaaactataaaacttcaagaggatagcatagaagaaaatcgtagtgatctttgatttgttaagatttcttaagtaggacacagaaatttccaactataaaagaaaagtatctaattgtatttaatcaaa

SEQ ID NO: 33369 - DNA, 1069 bp, Homo sapiens
ctccatctctggtctgcgggaactactcctagaatcccgtaggagcgaagtgttccggggaaagtgtagaatttgatttggattctatgccacaaaactgcctagccccacactgaagcactccgtgggcactgataaatgtttggccaacgcgtaaaactaaatgtgcccttgggctgggcgcagggcctctttctgcatgttcgtcaactgtattaacatccacctttcctctggatggccctgggaggaggcccgccatgaaggccttcctaagccgccgggcagcacaaaggtgatttcacatcttcccagctgtttaggcctaagatgtggacatcgagccttcaacgtgggtatttttctcctggaatcttagtttcttcatttgcaaaaagtagacaggaacttctcccctgcggggttgcaatgggaattggagaaaatatatttcaagtgccttgcgcgatgcccggcaccgaggcacttggcggcactcaatatctggtattgtttggctattattactacttcttgggctgatcatgctccaatgcttctctcttaaccccttgctttttttttctttcggccctcagggcggctgagccccccagcctgcaccctccgcaaacacaagacgaaccgtaagccgcggacgcccttcaccaccgcgcagctgctggcgctggagcgcaagttccgccagaagcagtacctgtccatcgccgagcgcgcggagttctccagctcgctcagcctcactgagacgcaggtgaagatatggttccagaaccgccgcgccaaggcaaagagactacaagaggcagagctggagaagctgaagatggccgccaagcccatgctgccaccggctgccttcggcctctccttccctctcggcggccccgcagctgtagcggccgcggcgggtgcctcgctctacggtgcctctggccccttccagcgcgccgcgctgcctgtggcgcccgtgggactctacacggcccatgtgggctacagcatgtaccacctgacatagagggtcccaggtcgcccacctgtgggc

SEQ ID NO: 33370 - DNA, 1064 bp, Homo sapiens
agatggaacctccagaggcaggcaggcctccttgagctgtggtgggctccacccagttgcagcttccaggctgctttgtttacctaaggaagcctgggcaatggcgggcgcctctcccccagcgtggctgccaccttgcagtttgatctcagactgctgtgctagcaatcagcgagactccttgggcataggaccctccgagccacgtgtgggatataatctcctggtgagccgttttttaagcccgtcggaaaagcacagtatgcgggtgggagtgacccgattttccaggtgccatctgtcacccctttctttgattaggaaagggaactccctgaccccttgcgcttcccaagtgaggcaatgcctcgccctgcttcggctagcacatggtgcgctgcacccactgacctgcgcccactgtctggcactccctagtgagatgaacccagtacctcatgtggaaatgcagaaatcacccatcttctgcgtcgctcacgctgggagctgtagaccggagctgttcctattcggccatcttggcccctccccccaccggcagcttagaattttacttttcttcctcagtctgctaaccaggcatcttgggagagtttgttcattcattcattcgttcattcattcattcattcaagtattgttaagcacagctttgtgcagcatgtgtatgcttggcattgcagcagcagcagcagtgaggccagtgtaagggcagtggggaagctggggaggaaggtagggagaaaggggcagaagaggaggggatgagtccagagcgcctcatcttggaagacgttgcagactgttccaagatagttgcatttacttctgagtgagacaggaaatcaccagcatgttttgagtagggaagtgacttgctttatgttttacaaggaccagtgtggtttccatgaggaaaacagactgtaggggcagaggcagaagcagggagccctggtaggagactgctgtggcccgtgtaagagatggtgctgactgacggggcagggagaaagcctggagctttgtgtttgtttggacga

SEQ ID NO: 33371 - DNA, 1050 bp, Homo sapiens
atggttttgaggagatgccagagttagagagctcactgtgggaggagagcaggtgtgaagcttggcaaggagagcagatgtgaaggttggcgaggagagcaggtgtgaagcttggctgagtggggttgagagggctctaaggtgacgggtgcatcccaaggctgtgcgtgtgtgcgtgtgtgtgtgtgtaggagtgtgtctatgtgtgcaagtatgtatgagtctatgtgtgattcatgtgtgtatgtgtgcacttgtctatgcatggatgtatgtaggagtgtgtgcatggatcaaatgtgaacgaaagtgtgcatgtgttcctgtgtgtgtgcatgtgtgtatatgtgcctgtgtctgcatgcatatgtgtatgagtacatgtgcatgtgtctgtgtgtacaagtgtgtgtgcatgtgggggagttacttgtctgtgtgtacaagtgtgtgtgcatgtgggggagttacttgtatgtgtgtctatgcatgcttgcatacgtgtgacttgagagttcctgtctgtggatctccttgtgtcttgtgggaggcttgtggaggagaggcagagagcagctcaggccccacacagggtcctgccgtgacctgtaaccccatctgtggttctccgctccaggagctgtacttcagcaccgtggacactttccagaagttcgtggatgccctgttccttcagacgctccctggcatgactggcctccccccggaagagtgtgactacttgaggcaggaagtccaggagaacgctgcctggcagctggggaagtcaaatcgcttccggaggcagcagtggaaactcttccaggagctcctagagcaagaccagcaggtgcgggcatttgggaacccaggggctggggtctgcattttagaaacacacgaagaagcgtgagagatctcacgtcctgaacacccactagtgcctattgtaggtgctctacggagatgactgttgcctccctttcacaatggcccaccacaggggtgggatgagagagcagagcccttatctccctcaacaggaagtcg

SEQ ID NO: 33372 - DNA, 1021 bp, Homo sapiens
aaattgcctttcccacattgttttctatccaaaaagacagtgggtcgtttcatatcccattgctcagggaagttattaaaaattaatggaatttgtgaattaccccgttagaacaggttgtagaatggtgtttctcaaaatttaatctgctctaatgcagatttctgctctcagtccccttgcggtaggcagctataatggccccccagagaggcccacatcctaatccctaaaacccgtgaatatgtctggttacaaggcaaaaaggactttgcaaatctttgcgaatgtgattaagcaaaggatcgtgagatggggatattctcccgatgatctggcttggccccatgttatcacaagggtccttataagtgaaaaaggagcagcagtgccagagtgaggagtgaggaagactctgcagccattgctggacttgaagacggaggaaggggctgtgagcccgggaatgcaagtgccctctaggaactggaaagggcaagaaaatggattctgccccagaccctcggggaggagtgcagacctgccaaccctcatttcaggcttccgatctccagaagcgtaaggtaataagtgttgttttaagccaacaaatttgtaataaagtgttatagcagccacaggaaactaacacaccagtgagtaggagtggggcagggaatgtggcagttggtgcactccttagcataacagtaaagaacaccagtgctagaggcagtctgtctgagtttgaatcctggctccccacctcactctcctctccctctggctctgcaccccactccgggtggttttcatcatttcatcaccaagtctgctctcctctgtgccgagctttcaggcctcctcttactggacaaggtggtgtttggccaagttggtctctttcctcctccttgaaacacccgcttgactctcttgcttctcctcccagctcacttctttctccttctcagtctcctttgctggccccttcccagctccttaatttctgaacactgga

SEQ ID NO: 33373 - DNA, 1805 bp, Homo sapiens
gggctttgtaatgtgtgttcttttaaaaacagaggagattaatagccctaaaaacaagacactgtgaaacaaaacaagacactgaaaaaatatactttatgaatgaaaattatagtaatgaggctgggagtggtagctcatgcctgtaatctcagcactttgggaggccgaggcagatggatcacttgaggtcaggagttcaagaccagcctgtccaacatggtgaaaccctgtctctactaaaaatacaaaacattaactgggcgtggtggcgggtgcctgtaatcccagctactccagaggctgaggcaggagaatcgcttgaacccgggaggtgaagcttgcagtgagccgagatctcacaggagatcacttagcctgggcaacagagcaagactccatctcaaaaagaaaaaaagaaaattatagtaatgaaaacagaaatctaattggattagttaatggaatagcagattaaattgtggctaaagaaacaatgtgcgaactagaagataaatgtgagaaggtggtcctggaacacagctcagagatctaaagagatggaaaatatagaagaagagacatggagaataggatgacaaaatcctataggagtagaaggtatctaattctgaagaaataaaatagacaattttcaaaacagtaagtgagaacagagggagtgagagggaaataagaaataatattgggcaaaggaacattgatgattcaaacaatgaactgaagagtttagaaaggagcgctttagatgaagagtttagaaaacagcgcagaaccaaaataatgaagagcagtatccaggaaggcagagagaacactggaatcttatttctccttctagtctggaggagggcagaagtatgaactttatatttacaaattaaatatacaacttaaaaactgaagagtaatcacctgggagagaaaagaatagcccctcccatccaggagccagcttgttactcacagctgggcctgggtgttctcctattgaacaaccaaccaccgagcatccacatgatgaggcccctctgttacatgaaagatggagccaaaaatgagaccaccctgccaccatacctgaacacagacccaacgtgaacactgtccaactccccacccctgaaatgcccagacaccccgccctggctgagccaagcctggcttcattaagccctccccagcccacacctgggcctttctaacccctctacacattctcccttgctgcatcaagtgataacccaatctgttcagccttaggggagctctgatggcctgtgcagtgcattgacagagtaaaataactaagcagaatatgtgacttccaaggtagagaaaaaagtattccaaaatgcaggttagacacctaaaaaatgatgaatccaataaaagagaaaaacattgggaagaatgcacatttcataatatctagaaaagacaagattagatggtgggaaataagtccaagcatcccattagtcacaataaatactagcagatccattcagattgctaaaaaacacatttcctaatctagctatgtggcattacaggagacacagctagatcatcaaaagttagaaagtcaagttaaggaaaacaatatcccaggcaaatatccaccaaaagagagtgcatgatactaagatctgatgaattatactttaggcagaaaactttttttagggataaagagagtcattgcatagtgtaagaggaacatacaacaatttagccacaaaacacatgaagcaaaattggacagacttgaaagacaaaca

SEQ ID NO: 33374 - DNA, 1031 bp, Homo sapiens
cccagcactttgggaggctgaggtgggcagatcgcctgagctcaggagttcaagaccaccctaggcagcatggtgaaaccctgtctctactaaaatacaaaaaattagctgggcgtggtggcaggtgcctgtaatcccagctacttgggagactgaggcacaagaattgcttgagccccagaggcggaggttgcagtgagctgagatcgcaccattgcactccagcctgggctacagagtgagactccatctcaaaaacaaataaacaaacaaagaagaggatggaaacataagtaggctcggaccagggacacctggtgagccatactgaggacaacagagagcgattggggaatttgtctcgcctgaaaacctgtgtcttttaattgcattaatgtttagtccatttatgtttaatgtaaatcctcatgctgatatatatttgggttttcatatcagtttatgaaaattctcagatgttttccctttagatcttcccctgcctattctctccctcctctctttctgggactccagtgacaggatttctgaggcttttccactttatcccatatgtctcttacatgctcctctgtatttttcattcttttcttctccgtggttcagcatggatattttcctttgaggtatcttccagccactctctcttcagccatattttatcaggtgctaaacccatctcctgagttgttcatgtcagttattgtgttttcagttctaggatgtccatttgattccttgtatagtttccagttatctgctgaaattcttcgtcttatcatttaatttctggaacatattaatcataattagtgtaaaggttgtgtctgacgattctgttttctgatatctcgtgggcatgtttctattgtctgtttttctctttatttttagttaattctcgtctgggtatttttattggatgatgaccactaagcatgagaaattgtagataatttaagacttcaaatgatatgatcttcttccagagaggatttatgttacttcta

SEQ ID NO: 33375 - DNA, 1051 bp, Homo sapiens
gtcacaagagaaagagacacacaggaaccaagaaactacagagaagaccagaggaacaaaatgttgaaagctggaaagcagatgtccaaaaggtgatggatgtgctggagctggaacagctaaatctctgctggcagtgaggagagcaaagccccttatgtgccactcaggagctgggggctgcaggctggacctctctcacactggtgcaggggtgcgtgcacgctgggaaactgtgtagcagtaaccactaacgctgaatctacacacaccctaggacccagccattcctctcttaggtatataccagctaaagatgtgaacctatggttaataaaaggctgaacaagagtggagcaagaacaagcacagaagcctcacgcatcacggttccaaatgtgaaactatccaaatatccaacaactggagaatacattgtgcagattcgtgcggtggaattctacacaccgatgaaatagaaaaagctagtgctatgcctggccaaagatggatctcacacgcctcggattgagcaaatggagccggacataagacagtgtgtgctgtatgcttccatttttagaaagtttaaaatcagctaagatttgtgtggcagcaacttctaagatgactcccagtgatcccgcctcctgcttttcaaggccctgcagggtcccctcccctggagtgtgggctggacccagcaccttgcttctgatgagcagaacaagacaaaagggttgggctgtcactcccgaggtcaggttacagagactctggcttccgacctgctcacctactgctttttggttaatctgctctgaaggaagccgcctcgctggggctgcccatgtgcaaggaaccgagggaggcctctggccagcagccagcaaagaacagaccatcacattagcctgacagctagcaaggagctatatccagaaatacaccacctacgagaggctggatgcaaatcctgcaccagttgagccttgagatgctcaccgcccccaacctgccactcactatggcctgtgagaccctcagccag

SEQ ID NO: 33376 - DNA, 1047 bp, Homo sapiens
gaaaaccgccgggcgggggaggagggccgcaggcgggcggggccgggaggccggctgagcgactggcgcgccggcctatggcgcggggcgcggcgcggggggcgggcctggcgggcggggccggtgcggcgcaaggtttggcgaaggttacagctggagctaggagtgacaggcccacagtcatccgtgcgctgcgcggcaaaccctgtcgcgagggcgccccgagttgctgcggggcctgatccggctcctttccaacaatacgcgtctgcagccggcatttctagagctctctgcttcttcccgctggagaaaccagtgtgtgtcgtgttggaatgcttcgtcttgccctagaattcagcttgcgtcttgtggtgcgcaggtgacaggacctgccgaactcttggtacagacccctaaatcatggcagaactgtcttgatttcttttttgccacctttccgtttttgtcctctataggcaagctataaagatttaacccagttaaaaacaggagggagattcagcggagaggaggcatgcgagattctttggaaaaaattatataaatgtagttcttgctaataattacctgggttggatactttgacttactgttcaagttcctaagaagggattttacatttctgggtcttgttttaaaaactgttagaaagctcgtgagggggtagggacaagcagttttggtaataggcgatgctgtggataaaactgtgcggtaaaatgcccaagctagattcttcctatgcaaaataagacccgttccagaacactttgaccatttcgtggacttagaatttaaaggcgggtgagggcggggggggaggaggagcggattctatcactctgcatcctcaaggtcaaatattcttccatcagttattttggattgaaccattcttaaataggtctcaggatctctatgtcgcttccttatgacagaacctatttccgagagtgtgcctttgcatatctatagaagctcctttcacttaatatatcttataactcagattcaattgctgta

SEQ ID NO: 33377 - DNA, 1046 bp, Homo sapiens
gacctggtgggaggtgattgaatcatggggacaggtctttctcatgctgttctcatgatagtgaatacgtctcatgagatttgatggttttaaaaaggggagtttccctgcataatctctcctcttttgactgtcaccatccatgtaagaggtgactttgctcctccttgccttctgccatgattgtgaggcctctgcagccacgtggaactgtaagtcaatgaaacctctttcctttctaaattacccagtcttgggtatgtctttatcagcattgcaaaaacagactaatacacagatctactttaggtacagatttgctttaccatgttctttttttaatatgcctagtattaccttgtgtgaaggtgcctgaatttatttaactagttgatatgaagagtttccaggtttttgttatttgtaacacagtgctacagtaaacatttttgtacatatgtcttagtgaactttcatgagtaaccaccttactctcagcagccttaaaaaaattgaccaacaagtttctaactactctgaataatcatttgtcatgttaaaaattttcttggtggctatattagttttactacttttgttaaggccggatgttttgttttctgaagtagtcctgtgagataatttcatacaattaagcacagattttttatattgcatgtagaatattaagctcataaagtttataaaggcacagggttggctttatgagcctgtaattgcatcatacagggcccttgcttgcttcagtgatctgctgttgtagtcttgatagtcttaggtttttttttttttgttttttttttttgagacagagtctcactctgttgcccaggctgtagtgcaatggcatcatcttggctcactgcaagctccgcctcctgggttcacgccattctcctgcctcagcctcctgagtagctgggaccacaggtgcccaccaccacgcccggctaatgtttttgtatttttagtagagacggggtttcaccatgttagaatggtctcgatctcctgatctcgtgatc

SEQ ID NO: 33378 - DNA, 1030 bp, Homo sapiens
gcagcgaactatgattgctccactgcactccagactgggtgacaggacgaaaaggaaaaaaaaaaaagagaaaggtgctattaagtggcttacagtgcttaggactttaattagcatatccatgtttttaaatgtagaacatagggttttcataaagtagaaacgtggattctggtttatttgcagtacaaagaaaaatacagggcctgcgaggatgatcattttgtgcatgtgctgaaatcatactcttttagctttagaagttatttgtatacatgccaccattaccttccagataaagtttgtatccctcactgtgtattgcacataataaatacccactaaatggtggtgggtatttatttatgcaataaaggggcccttgatcctgatagggctgttagttccttcatgagtgtcacaagttgggttctctgggaaggcgggtactttgggaagcaaatgcagacaatttagcatgcagaatgttgattagggcttgctcgtagggtccagactcagggaatggagaagttgaactaccttgcatgcccaattatagcatagccttggccaaccccattagaatagcccgtgggagctgtcccggcttgggctgggtagccaggcctgtacgctctctgagtcagtcaggatgacttgcctggaagagggcaagatgtcgggtgaggcagttctctgtagccacagcagtacttgaaggggctgacggagcactcccagcagctggggctgcatggccttcagttgagggtctgggttgtacatcacagcgtgccatggttggacaatatttttcttagaaattttttgattgatttcatttgactcattggttggcgttctggagaaatatggggtaagtctctttctctttctctgtgactcttctcaaccccccccaacccaccagcccccttactaaataactatgtgtgtgtgtgtcttatgtacgaacagagttacagtgcacaattaaccttttcttctgatggaagttgactccaac

SEQ ID NO: 33379 - DNA, 1051 bp, Homo sapiens
attttggtgaaaagtaatagagtccaaaagccagagtcttaatatttcaaatatctgttttctttatgctcttttctatattctttcttttactttatgttatatatcctttatgccttccccctcaagtcttttccttatgtgaaagtcctgtaaacacccaaattgaataattatgaaaagacagttgcaggtaatgcagtgtcttgggtactgagcacaccagcaatgtgagtatgaactttgtagtgagaaaggaccagttaaaaatatagagagttcaagcatgacttgcagaagtaccatactagatcaaagggaatggtagagggcttctgtgggaagagtacaagttgctttacataaggcgaaagcctgctaatacaggatggtaaatacctaaaggaaaatcctgagagagtcatgattgtctcgatatcactgacaccaggcacagtgccttgtacacaagaaacctctagtacatgggatcgtgagagaatgagttaaaattcctatgttagttagtccctgcctgtggactcagagtgtgatctgagttggttttttctcccacctgctagtattatgaatatcattttatttaccaaacttctctttttcagaatttattctcctccatttagatttgggaagtagttagttcagcacagttttgatcacctgccaaggcctaagcattctactaaatggtacatgtggaggatgtcacagtttggcctgaagaactttaagcctatttgatgaggaacccattcccaggaggcagttagagaatagtataaaaggacatcatcacaaggcagcaggtcatgaggacagccagcactctataagtgttgggaggaagacagtggtatgcccttacataattagaaagggcttcttcaggaaggcagggcaggaatgattccattgccagttgggtgttagtgtttcagccgtgtctgtgctttctgaaacttttatgatcctattattattgtctttgatagtttgtctgtgtttaccagaatgctggtttcaataa

SEQ ID NO: 33380 - DNA, 1048 bp, Homo sapiens
ttactattcttcatataatcctattagtaacagaacttgtaatactaagcatataaaaacaatttgagtgtggtagtctttaacaataccttcaatttgtatgctatttggagaaatgcacataccccaaaatacacagatagacttttcattttcccatgcaacagacttgtgagaggttgaaaggtaggaagagtcagtatacattattctgttttacagatgagaaaacaatgaccctgggaagctgtgggcacaaaagccagctattaagtggcagaggtgggactgtgtgcaaaaacctaagatactatgattgctgaactagtgtactttccactcgccatcctacctccgtgaattaaagataactcaaatgatatataaacttttatgggaactatctatattgtttttacatttttaatagaaacgatttaaactttaaagtaaaaaagacaaattttaaaataagtgtttccatgtgggaatacacatgaattaggatgatttgggctaattttgcataagagaaagataagatgatttgaaggtccttttctcttggcacaagcctctgaagagggaagggaacgttaaaaaaaaaaacacttgatatatagtggtgctttttctttaaaacttttttatagaatttaaactaaaatttaacttcgtattgactaaattccatgtttggaatgagtgtaaaggcagatagacagtttgaaatttgagtgtttgccagttgtgttcctcatcatgccaggtgaataaacatgggtttttgcctgtgcttgtcaaaaccagcactgaccctcagtgctgtgaccattagaggtaagtttcaccacggtggatcatacgtgaagtaagttttaattaaacagataattcgtgaaccaacatacctaggagtctcctttcagttcacaactagaaatagtctctaatttggtcaaatgtttacccctctaccaaaggcttgctgcttaggtagagaaagcttagtgcccggtattctgtacgtgggtcatctgctaacagt

SEQ ID NO: 33381 - DNA, 1031 bp, Homo sapiens
tcttctgatatccttgtatcctctgggtttgatgtatatattattggattcaattacctgaaaatttgtgtaaaatttttgcatctgtactcatgaggcatattggtcttctttgtttcttataatgtcttttttttgttttttttttttgagacggagcctcgctctgttgcccaggctcgagtgcagtggcgtgatctcggctcactgcaagctctacctcccgggttcacgccattctcctgcctcagccttccgagtagctgggactacaagcgcctgccaccacgcctggctaatttttttgtattttagtagagacagggtttcaccgtgttagccaggatggtatcgatctcctgacctcgtgatccacccgcctcggcctcccaaagtgctgggattacaggcgtgagccacctcgctcagcctgtttcttgtaatatctttattggcttttggtatcagtttaatgctgtcttcataacatgatttgagaagtattgggaaagtttgtatagaattggaattacgcttttcttaaatatttggtagaattcacctttgaaactatatgggcctagcaatttctttgtgaattttaaactataaattcaattccctttatagatataggactgttcattctgtttcttcttgagtaggctttggtagtttgtatctttcaaggaatttttccatttcatttaagttattgaatttattggtataaagtttttctaatatgccttattctcatttttatacctatagaatctgtagtgatctcacctctctcattcctgatactggtaatctatgtcttctctctttcctgatcagtctggctagaggttaaagaacctgtttttggttttattgtttttctgctttctatttcactggtttctgctctgagcttttttctgcttagtttaggcttcgtttgctcttctttgtctagtttcttaaggtgaaaactgagatcattgatttaagaccttttctaatgtagacagtgctctacattt

SEQ ID NO: 33382 - DNA, 1056 bp, Homo sapiens
gtctgaatacattatgtacattgcaggaagtgatgctgtgctctctctacagaccagaaccccctgggaagaagccagtgattacaaaagctgagagtgctcacagttgttgtgtgatcacagccagtcctgcctgaggaagcctaagtcctatgtctttgggtatatagatggcagtggagctggagcatttgaggacacacgggccatgctagggacttgggcttttcccctgagcagctgtgaagtgttagggtttggagaggagtagtgcaacctgacttacttgccaatcagatgctgatcagaccatactggttgctgcactgagactaactaaacacggtgagtgagctgtgctggagggacagagggcagattgtgagcacccagtgaagatgcagttgcaggggtccaggaggcagatggctgggggattctgcatctgttttcgaagatggaactgtcaggattagatgtggggtagagataaggggaggagacaaggaagacagccaagggttttgatctgagcaactgcaagaatataattcctggcccggcacagtggctcatgcctgtaatcccagcactttgggaggcaggcaggtcacttgacgtcaggagtttgagatcagcctcgccaacatggcaaaaacctgtctctactaaaaatataaaaattaaccggacgtggtggcgcccacccataatcccagctacctgggaggctgagacaggagaatcacttgaacccaggaggcagaggttcccgtgagctgagatcgtgccactgcactgcagcctgggcaacagagcaagactccatctcaaacaaagaaaaaattagccggatgtggtggtgcatgcctgtagtcccagctactcaggaggctgaggtgggaaaattgcttgaaccaggcggtggagccaagatcacgccactgcactccagcccaggtgacagagcgagactcggtctccaaaaaaaaaaaaaagtaatttctatttactaaggaaaaggaacctaaggaaggaacatctttgtggtatgaa

SEQ ID NO: 33383 - DNA, 1003 bp, Homo sapiens
ttaaactttctataaattataccatactctatatatttttgtaacttcttttagttaaaaattttaaaattttttctatattgttaacatgatcttataatgtcttcattcttcgttcctaagtagttctccattgtgaactatgtaacactgtttattctcctggtaatgggcctttcaattgcttctcattttgggctattaataaagaaagtagaaaggaacattctttttttttttttttagacggagtctcgctctgtgccaggctggagtgcagtggcgttatctcagtcagctcactgcagcctctgcctcctgggttcaagcgattctctgcctcagcctcccgagtagctgggactacaggcacatgccaccacgcccagctaatttttgtattcttagtagagacgggatttcaccatgttggccaggatggtctcgatctcttgacctcgtgatccgcccacctcggcctcccaaagtgctgagattacaggcgtgagccaccatgctcggccgaaaggaacattcttacctgcttatccttgtgcgtatgtacagtactttttcttgcatgtatacttaggcatcagattccttgactgaagtcagtgtttttttgtaactgtcagccttatagactggagtatttgatgaaagctatggccctaaccagaatgttatacttaaacttttcttatatgaattactttgttacatgcccattagtggcctccttaagagttcatccttcctagattaaaaataactggtctaagttgtgactattcttcttaattgaaccatgaagtgaaacaagtagtatccagacattcagctcatagctttctgagcttctgtagccaaatatccttcaggaagtttacttgttagatatctaaagggaaaagaaactgccatctccatatgaaagtaagaaacaggacttttttgcatatcataaaaaatagggtttgcctgggtgcgatggctcatg

SEQ ID NO: 33384 - DNA, 1084 bp, Homo sapiens
agttagctagggctcagctgggaggttcttctgctgttcttgcttggggtctgtgatggcaggtggagctgaaacatccaggattgctttcctcatgtgactggtgcttcagcaagcatggctgggagctgtgacctttcaccacatggcagatggagaacactcagaaggtagcattccaggagggcatctgtcacactcggcaacatcttattgtgaaacccagtcactgtgggaggggcccaacctaggggcaagtgcagggaggcacagttcattgggggccccagagtaacagcctttcctctgacagttactttctggagagattaagtagacagcttctggactttgggatactaggcacccctgaggcaaagcatgagacaccataatgaaaattggggactgactgattcccccatccctttctggtgcctgactgacaaataggtttatcttccaaagatagaagtgtggaagatttcttaacgaggaagaggttgctggaaagaagaaacatttgagggatgagatgatcctttaaaaattataaccatgataatagaaatgaaaaactcaatagacggtttggaaggcagctctggaaatcttccagaaagtagaacaaaaagatgaagaaatggtaaacaggtgacaaaagaaattaggggaccagtacaggaaattcagtaaccagctattaggaaatgtgtccataatactagcacccttttccagatgtagaaactgaggctttgataggtaaatgatttatgtagggtcatgtggttaaccctggggtgaaatttagaaccagatctctttgactccattgagccatgtgcaaatggaacaggcagttaacactgagtatcatgtaggttagtgatcacactatggcggcacctgtccagcatttagggaatatccagtctaaatgaaccctccataaaagagaaacctgtaagatgattaatatggcacagaaacctttgagtatggagaggagagatgaggcagaataagtcaaattgcctttcttttactttacgcttaataactaaggtccaagttgagaagg

SEQ ID NO: 33385 - DNA, 1035 bp, Homo sapiens
tgcatgttattggccgggtgcagtggctcacgcctgtaatcccagcactttgggaggccgaagtgggtagatcatttgaggtcaggagttcaagaccagcttggccaacatggtgagaccccgtctctactaaaaatacaaaaattacccaggcgtggtggcaggcacctgtaatcccagctccttgggaggctgaggcaggagaatcacttgaacccgagaggcaaaggttgcagtgagccgagatcgtgttctgtactccagcctgggtgacagggtgagactccatctcaaaaaaaaaaaaaaaaaaaaaatacatgtattatgcttaaagcaaaaacctaacatgaaagtgttctaacattcaaagttgatgaatcaggaagtggctgctattaaagtgtagcaaacctgtctaactgactcttagaagttgatcactttatcaaaacttgtgttttacatataaaacaaattatatctctatggagttctcaaaaatacattgtggtacatgtagaaattcacccacagcccaaatgcaacaaaatttcttctacagaacctatacagatgtatcttgctttatacaaagtacatattccagaagctgtgtggattatatgttaaggctatggaatgaggatcacattaagttgtgttaatgagagtcattgtacctctccactgtatgcccaagaaatggcttaaggttaaactgattgtacaagaaataacacttaagacaataaactgtttcacaaaaaaagcacagcagtctgcccatttttccactgttttcgatatgtgagtgcctagcctttctccagaaatagtttatttaattttgtttttgtttttgttttgttttggggacagagtctcgctctgtcgcccaggcttgagtgcagtggtgcgatctcagctcactgcaacctccacctcccaggttcaagtgattctcctgcctcagcctcccaagtagctgggattaaaggcatgcgccaccacgcccggctaattatttgtattttt

SEQ ID NO: 33386 - DNA, 1057 bp, Homo sapiens
aatttgtaatttgttaagagcaataatttctttttctatgaatatcagtccaagaaacatttaccaagaggtttctgtgtgggtagcactttgtcatgcactggggacacagggaggaatgagaactgggccctgctctgaaacagccacaatctgatggaggggaaaggcatggaaatatatccaagcgttactgaccatggatgaggtgtgtataagccaccactgagtcacagaggaggaaacagcgggcagtccctgtgaagagagttgcctgcacagaggcaggagggtcgccgccaggggaaagcacagggctccatggctcagctgagttgtagctgacgcgggagagacagacagggcaggagcctgtcagaaggtttgagggcttggctaggttaggtagcgtctgacatgcaggaagggaatgccgttgacaggatttaaattggaggttgtcaaggtcagatgttgtttagaacaattctagtaacagagtggaaatggaattgaaaaactgaaggctattggccagggttttaagcccttgcagtagtttgggaggcatacgctaaaggtctggactgaggcaatcaaagcggggacagagaaaaggaaacaggaccgagaggttttgtagaggaggagtttgttggattactttctatgaggagtagttatgggagtctaggtagagagggagacaggagtgggcgctgatgcggtgaggaagattttagtttagggtattttttgaatgagcagtctgtgaggccttccaggtagacacccagaagttgttaagaaaccctgaattgaaattttgggagaagtaggaactaaggatgcaaccagaattgattagctcaagaagttcagcttgtccagattgtggtctcctgggcttctattggctaccacatttatttaacaccagtctcctgtcagagtcccgaaggggttatgcaaatctcttgcatttaaatttacgggttcacgtgtttgtcacatcccctcagctaatttgtagttagtgtggagccaagtgacttct

SEQ ID NO: 33387 - DNA, 1106 bp, Homo sapiens
ctccccgtgctccccacctccaacaggccctgttgtgtgatgttcgctccctgtgtccatgcgtactcattgttcaactcccccttatgagtgagaacatgcggtgtttggttttctgttcccgtgttagtttgctgagaatgatggcttccagcttcatccgtgtccctgcaaaggacgtgaactcattattttttatggctaatgcagtgagtttttgtgtataggccttgctaacttcggttactaattctaatagcttatccatagttcatttggatcctctctgtagaaaatcgtcctgtctgtgaatgagtttctttctttcaactcttacacctttcattttgttttcttgtcttattgtatggccaggctctcccatttagtgctgaattgaagtgggactggcagaaatcctagtctgggtcttgggctctgggaaagctttcattatttcctcgttaagtgtgatgtttgccataggataccttttatcagataccttactctttattagatacctttattagataaggaagtctccttttagtcctagtaaaggtgttttaaaaaaattatgactgttgtattttattaaatgcttttttcctgcatctattgataacttatgttttctcctttacatggtaaagaacgtatttttctaatgtaaaattaacttcgcattcttagaataatcccaacttgttcataatatattatactttacatttatcattgatttgatttgcatattttgtttgggactttactgtctatatttataagggtatgggctgtaattttccttttggttttgatatcaaaattatgctggccttataaaatgggttgggagagttctactttctgttttctcaaagagtttctataagatttttctctggtgattacatgaacctaccagtgtgttaaaactcgtagaactgagtgggcgcagtggctcatgcctggaatcccagcactttgggaaaccaaggcgggcagatcaactgaggtctggagtttgagaccagcctggccaacatggtgaaacaccctgtctctactaaaaatacaaaaattagccgcgtgtagtggca

SEQ ID NO: 33388 - DNA, 1004 bp, Homo sapiens
gtctctcgcagaaggctactatccattccgggtagctttattcaagagaaaagcactttgaactgacgtgagaaaagtgactgtgtaagatagaaatactagactacagaaagtttcagccatcaacgacacgtatatttctttccctctctgggttgttttttaaagttccaagaagatattttgataaaattccttgcaacacttaaactctttttctaggagattttaaaaatatataacatggatgtgagggcgatttggctgtcatatctgtcactccattgatcaccagggttgattcggctcatctgctggctagcccggtgtccccttccccactagcactccatgtgcgtccctcccgaagctgtgtgtttggtcaaagagaatgaccatccctgatagaggaccggtcttcagtcagggtatgtgagtagctgcactcccctgctagagcctccagacaggctccattcgtaggagaatgtagagtcgtcaaccttccaagactccagacacatccaaatgaggcactgcatgtggcagtctgcctttctaaaaataaaaataaaaaaggccaggcatggtggctcacgcctgtaatcgcagcactttgggaggccgaggcgcgtggatcacctgagttggggagttcgagaccagcctgaccaacatggagaaaccgtgtctctactaaaaataaaaaattagccaggtgtggtggcacatgcctgtagtcccagctacttgggaggctgaggcaggagaatcgcttgaacccaggaggtggaggttgcagtgagccgagatcgtgccactgcactccagcctgggtgacagagcgagactccatctcaaaaaaaaataataaaaatatataacaatgtggtgtatatgtacagtggaatattatttggccttaaaaaggaaggaaattctggcacatgtggccacatgaaggaatcttgaagataccctaagtgaaaccaatcaatcaaaac

SEQ ID NO: 33389 - DNA, 1065 bp, Homo sapiens
aagatgaataacgtttaacttgtggaaatggttttttaaaagtatcctcagaagttgaggtttggagaaattactgagcatttatttctaaactcttgtctctgcagattggatggaatgcacagtaccttgtgtgtgtgtttaatttttgcttctcactgatgcctgggtggattttatttaaattaaaacctatggaccgtattgttttggattgggctaaaccgctgacgagtcagttacatgtttagacatgagtcttagacatttatccaaaccttggtattggctcgatttgtgtacattgtgtctgtcttgtattgtgaaccgcgcagtgtcagtggcccccgctagcactggtactcaggaagctgggccctcacctgctgtgctctctaccttttcacccttaccaagcctgggtctctgcatggggcaggcccttaagaaatacctgctgtgtgaatgaatgctgccttactgggtcctgcttaatctcgattttactacgtttccaagccagtgtaagaacacaaacaaacttggttgctgagtaccaagcatcatattaggttctttacttatggatcttatttaatattgacagtgcgaccttgacctcattttcctctagagaaggctcagcatcctggaaaggctaggactgtgcccaggtctctggctcgtgtgtgtggggccaggactctgatcctaggcccaggctaatcctaaatcccatgttctgacttggagagccctaaggttttgctcttgtggttgtacaattgaaaacttagtgaaagtcgacctaatagtactattaaaacttcagttttagggccccagtcaatcttgtactttgacattggagcagggggtttgggcagaaggtgtggtagctgtccagcctccagcgttccccagatgcacaccaataaagaaagccatgggggagacttacaactctttgacactttgacccattaaaccccgaggctggcagcctctgtgacttaaatgtcaaatgccttagttgggaagggattccctagtggccatggccac

SEQ ID NO: 33390 - DNA, 1039 bp, Homo sapiens
taggtcctgtccccagtgggattgacctgcatttcctgttccgagtctttgtcatactaaaaaggaaaaaaaaaccagtttgggttcttgatcctgcatacactctgcattggtttgaagtccttgttgattgacgtctatgaagacttttccttttctgtacgtgctacaccatgcctgggggatttctttgttttgagagagggtctcgctctgtcatccaggctggagtgcagcccccgcctcccaggctcaggtgaccatcccacctcagccccccgaaatgtctgttcttgatttaactttttttttttttaatggaagatttaaaatatttacaaaactagaacagcataaaataatgcacccccacacgcctgctctgcagtgtcagtgactgtggaagcgcagcggctgttggagctgcctcccacctctccccttcccaccatattgaagcgagtcccaggcaccgtgtcacctgttggtgttagcgatctctgactcatatgggctcttttaacgtaactgcaataccgttaccactcagctactaactccttcctatcatcagatatccagttttcaaattcagatgtcataaatggctttatagttggttggaatcaagatctaaataaagtccatgccttgtgattggttgaaagctctgttaagcctctgtaatatctatgccacgccacttctcactttttagccctctcttgcttgcctttatttgtcaaagaaaacaggtcatttaggctgggcacagtggctcacacctgtaatcccagcactttgggaggccaaggttgggggatcactagagcctaggagtttgagaccagcctgggcaacatagtgagaccccgtctctacaaaaaatacaaaaattagctgggcatggtgacgtatatctgtagttccagctgctagggaggctgagatgggaggaccatttgagcctgggaggtcaaggctgcactgggctgtgattgcggcactgtgcttcagcctaggcaacagaggaagaccc

SEQ ID NO: 33391 - DNA, 1083 bp, Homo sapiens
acatcagtctctccagatagcactacgatgtattccgcttctgaacaggatcccatgccagtgtggaacaccttcccaatcttagttcagaagtggcttgtatgacctgttcaggggtcacatgaggtctcgccagtttcctgggtcctcttcagaggccagaaagttctaagttctgagtccccggccagggtcccttaacacctcggcacagaggctgttggcaagtgtagaggctgcctctgtgtgtggtttaagtaaactggaaatgagacattgacgtgctgctcctccagaggtctgcacactccacttcacatgccgttgactctcacagtctaagacttcagggccgggacctttgtccagcctgcacagtagagtgaggctgcctctcccgccaggcattgggatcccatttagaaacggcattcacttcagaaggtactttttaactgctcagtttttgactattttaaatagtttgctgaaaactcctgataacacttgctacatatcatgttttaattgcttgtacagttaacctttaattttatttagtaaagtgtatcaaagtaggacttttttgaattgtaaataggtggttttattaaataaaagtcaatgtaaaattgttacttatgttcaccatcgtttgtttaaagttgaagttctcactttgagcatgatgctgtttgaatatcttaagatccatttatcagactggttaataacaggatggtgcagtggtagttgagtgaagggattcgagagttgagtgtgccccttgcaggttggagggagtcgcacccttgtaccccctctcgagctagcccctacccactgctccttcctggtcctgcagcacccttcctggcgtgcagctggtgcttactctgtgccagccacaggaccaggggctctccatgttcccttcagaaccttctcagaagcccatgaatcaggcactgaggtctgtctccccagcaggcagtggggtggcatgaggtgggggtcagtggtgtcttctcaggaggccgtggctgtgtggtggaaggctccgcgaagccactgagaactggg

SEQ ID NO: 33392 - DNA, 1028 bp, Homo sapiens
tcacttcctgtacagtgcaaaggagggtggcactaaaccattcatgagaactccatccccgtgacctccccccaggccccaccgccaacactggggaatacagtgaggcttgggtggggacagagtcaaaccatatcaaggaggaggaggtgtggcactgggtggggatcaggggcccctgtggacctcccactccctccgatccttccccttccaggacagtcctggggcttggtcctctctcatgagctcactgggggccgaacggacctggaggaccctgagcttcattaattatgagttgtttttgccaaggacatttcatctgtgacatctttgctttggtgtaaacagaccggtcttctctctacctcatggagagtgatgtatgcaatgtatgttccataaaatgcttccaagggagagagaaagagaatgtgatccaattatacaaaatatgttggcagactcctattgatccttcaaaaccctaatgcagtattgcctcctccatgtagactttcttgattaccctgacagagttacagagttactcccatcttcccctacccgtgctgtgctgcacacacatttctgcttcaggggaggtctcagggagcttttatttatggtgggaactgtgggtactgtgatcgtggctatagtcatggctcctggatgcctgcgtccagcccactggactgtgaactgtgagcgaagggaccaagtcctcttcatctttgtgtgctgtacccagccctgctcttggctcagagcagaccggaatcgttctctgttgaatgcaaaggagcactgagaacagcattttgcgaaatccgaagcatgacagaaatgtttactgcatcacctcattgaactcttcctctggcttctcctctctctgttgttctgaaccagcatggcacggccaacgcttgatgatggctgcagtcctgggaaggggctgggaccggggctcactgctgctcactttgtggttcaggcccagctgggggttgggggtgatt

SEQ ID NO: 33393 - DNA, 1098 bp, Homo sapiens
gtctatgatttagataacgatgatttggccatttttgtggtcacctaccacttattggagacatattatattctgagaatattatgccatttataggcattaattccaatatgcaaaagaactttgaaatgaaggcgttattattcccaattttacagatgctgaaactgaagctcagagaggttaagttgcccgaggccatacaggacaataggggcaaagatggttttgaatcaatggatgtctgacgacaaaggccatgatctcaccactgcactgcactgtctcctgaagccctttgtgtgaaatgattaaatacatcatgattatgtcacacttcacttacccttctccaggtagttgaacatctggatgattttacatcgtcaaatacaaggttgttaacaattaaaggataaaacagggtgcggccggaaaggcggccgccccctcgcccatcatgcaatgcacattcgtggggaacctggcgctaagccattcgtagatgacctgcttctggctcggggtttcatatgtagcagagcagctccctcgctgcaatctattgaaagtcagccctcgacacaagggtttgtaaaaaaataaataaataaaacaaaaaacaaaaaaaagcaattaaaggatataaaaaatgaagacccctgagacataatcagtgtcttgcaacctctttctctatggccacaccacatccagcaagagcgtctgcccctatttgaatgcctccttccacctgggtcagccagttcccttagcagccgtagcagcaattttaacctgcaagcagcctgattggcccagctggtcatgcccaccctgtcactcatcactgccctctctactgattggcttctcttgggtcagatccccacccaccgtgggcttattccttgaacacagggctgtggcttcctaggacttggcacatagtagctgttcaattcacatttgttgaaatgaagaaaattgggtcagcattccttaggactttggcaaacgggctgaaacccaagtctagaaaattgcccagaaaaggccctgcccaggtcagcctgggacagcagccacctctgtggg

SEQ ID NO: 33394 - DNA, 1030 bp, Homo sapiens
gtgcgccgcgaagagggacgagcagaggagcatcggaagaagacaggcgaaggggaccgcggagcagcgtaggcggagccccgggggcacggccgaggctgcgcttcaggagtgtccgccaggcgccttcccgggcggttggcgaaacccgaggaggcccacagctctggcctggggcgccgtcgttccaggggcctctgcgcctctctctggcgtctgtctggaccctcagagccccgggatcaaggcgcccatcctcttgatggcggggcgcacctttcgcgtgggtcgggcgctgcagaccaagcacgccgagtgcgtcaaggaagtgcccggaaaccaaagacaacgcacccgggaccaagaggaggccgctgcgcgcaacctcccaaacactgcagcgaagtcggaaccacgtccgcgtgggtgactcgggctggggagccgggaggcggcgccaaggacccttcagcccttgtccgtcctccctgatatgtcctcgacgcggtctgaggcctccccagcggaggcgacgccccggcgccaggtgccctgggtgggggaacccggagggggcaccacgaccagtggagaaggggcggaggccgggaaagctgcgtggaaaagaggaagggttaagactgaaatcattctacagagaccacgttaatgggtttaaatgcgaacattctagctaagtagaaaaaaatttaaaagcagagtgcaagctggaccaaagtgagaccccgattgggcgtagataaacctgcaaccaaaacagccccaggcagagattcagccgctggggagcacaaacccctaatgtttcttggtagtcactttttgaaacattttattatggaagttttcaaatataaaacaaaatcgagggaggcttcaagtgaattcccgtgtacccacccctatcccacagttcttaaaccgtgaccaatctagttccctctattggcctccttttatttgtactaacttatttttgttgccttattataaagcaaacacagacaca

SEQ ID NO: 33395 - DNA, 1044 bp, Homo sapiens
catcatcaggcctggtgctctggatggctgaggttttaatgtgactggatgtcccttggagtggctcctaggctgtgcttctgtggttgggtggcaaggggttgctttattcggtggtggctagaggatgttttagcaggtaaatcgggcccccaggagcccctgagtgccaagtcctgctgcagggcatgtgtttatggtggggaggtgggggggtggagggtggagggtggggggcattgatttcctgccaatatcagaagtttcagaggcttcttgtgtatccacaaacacccaccccattgagaaggcctagaaaacctggccctccccaagcctttactgaccacttgtgaatgatcccagggtgtgtctgacccacagctcctcctggagggagagaaaagtctctcctaggtatttggttatcaacctcaaccacttgctgagccttcctcaagaccagggacctcggcagagatttctgggttgtcaggcagaaccgagcattcgagggtaataactctttggagtccctgaaatccctgatggatgcaccaggtaaaagcacccagggttgaaatcagatgaggaaggttattgtcagcctggggctcctgtagaggtgcatccgcgttgcagggattttccttcttgctgaggagaaacctgggtttctcagctttgccacagtcacaacatttggggtgagaccattcgtggtgctggtggtggggccatcccgtgtattgtgggatggttagcagcatctctggtctccatcctctaggtgccattgtaccctcccagctatggctaccccaggtgtctccagacggtttcaaatgccatggagcaagggagtggtacgtgagcaaaaccaccccagttgagagccattggtctacacttgtggaaatgtttgagggtgagagtgtcgagcttgggtccctgctgtaccctttatgagcaacgcggtcttggaaaattaacactactccaggggcctcagttttctcatctataaaatggagataaatgaga

SEQ ID NO: 33396 - DNA, 1089 bp, Homo sapiens
aaaattggctattaatatcttctactcttgcagatgtagtgaggattaaataagatgtcaggttaaaagtgcatcatcgacactcaatagaaattaggttttaccattcattattattcttggcagatgctgcagataacgtggagagcatacgaaagacacatgtttgaaccaatagtgacatacgggtgctaagttctgcagtaggggaagggcagagagccatggagtgggcctggcccaatcctggagcctcagaaaaaatttcctcattgaattgctgttttagctgagacttgtgggatgggtagtagttggagatcccagacaggatgtgaccgagttaaccatggaaaaatgtggtcctggcatccatggcagagttgaatgatccagtccttctctctcctctggttggaagtccaccagatctgggaatgtcaagttgggggaggggctggcaatgatcatgaccttcgcctgtcctcacatgtcctttgtgtatctgcaaagcctctgttcagtctcctcttctggaaagtgggatcggaaaccacatctgcttctttcccaggactgctaggaagacaagattagatggcaggtgagagctctttgaaaatgaaaacattctgctatttgaatgcaaagtgttcttctttgcctgtgatgtttcctaatctgtgaactcatactggacctcgaagctgtctattaaaaaaaaatgacaaagtggctgggcatggtggttcatgcctgtagtcctagcactttgagaggctgaggggggcagatcacttgagaccaggagttcgataccagcctggccaatatgtgaaaccccatctctactaaaaatacaaaaattagcaaggtgtggtggcatctgcctgtagtcccagctactcgggaggctgaggcacaagaatcatttgaactcaggaggcagaggttgcagtgagctgagatggctccactgcactccagcctgggtgacagagcgaggctctgtctgaaaacagaaaaaaaaaaaaaaaaaaaaaaaaaaagcaaagttaacacttcctccatctctcccctaggggaggc

SEQ ID NO: 33397 - DNA, 1039 bp, Homo sapiens
agatagttgtagataatgtggcattatttctgagggctctgttctgttccattggtctatatctctgttttggtaccagtaccgtgcttttttggttactgtaaccttgtagtatagtttgaagtcaggtagcgtgatgcctccagctttgttcttttggcttaggattgacttggtaatgccagctcttttttggttccatatgaactttaaagtagtttttttccaattctgtgaagaaagtcattggtagcttgatggggatggcattgaatctataaattaccttcggcactatggtcattttcatgatattgattcttcctacccatgagcatagaatgttcttccatttgtttgtatcctcttttatttcattgagtagtggtttgtagttctccttgaagaggtccttcacatcccttgtaagttggattcctaggtattttattctctttgaagcaattgtgaatgggagttcactcatgatttggctctctgtttgttattggtgtatacgaatgcttgtgatgtttgcacattgacttttatcctgagactgctgaattttgctatttttagtacagacggggtttgctgaatgcagcccccagtcacgtactcccttcttggtcaatcgatcaccactctctcatgatcacgaccctctcacacggacccccttagagttgtgagcccttaaaagggacaggaattgctcacttggagagctgggttgttagagacgtgtgccaccactcccagcgaatttttgtatttttagtagagacggggtttccccatgttggttggccagcatagtctcgatctcttgacctcgtgatctgcccaccttggcctcccaaagtgttgggattacaggtgtgagccactccacccagcccacagaaggcttttcatacttgcttagcagcctcctgcatcctacgctagcacctggcactcacaacctgtgggctgctctcatccatgatcatctctccccaggcctgctgttcctcgagaaaggaagttgtaa

SEQ ID NO: 33398 - DNA, 1059 bp, Homo sapiens
tggccggctggatcttgatatgtgtttctcagttggaaagactttggtccatagggaaatgtcttctcaattcttttaatttcattaaggtggttatttttcttcttgtggcctctggaatgtgacacagaactcaagggacaggaaggagatgagttggaggctgggtcaggggtccctgccagggatgctggtgactcacgtgacggtgttgatgtgtggagtccggtgcctggtttggggaatgttcgtgggatatgttccacagcactgacggatctatcaggtactggaggtgaatggtcaagtctgatctcagggctgacagtgtcaggcaaggacaggaagttgacattggactcattggctgaggttgctggggacccagggggcaatgtgtgccaggacagatgggtctggggctaggaaggcaggtttgggctggagactcggtcttgggaggcatcccattagacagtggttgaggctgtcaaaatgactgtgattgcctgggatgagagtggagacagacaggatgggggttttgctctaagcctggggaacccacctcccaggttcaagcaattctcctgcctcagcctcccaagtagctgggaatgcaggtgcgtgccaccatgccctactaactttcgtatttttagtagagatgaggtttggccaggctggtctcaaactcctgacctcaagtgatcggcccaccttggcctcccaaagtgctgggattacaggcataagccaccataccatgcctgaccatttttaaatattaatttttatgaaatattttcaaacacattttactgtacattggaaaagtcaatcatgatttcaaaactttatcaaaatccaatcagaagtcaattaaccatttaattgtggataggtaaggagactattttgaccaaatatgttagaacaattaccacttatagaaataatctatgttttaatgttttagttgaattaaagaatcttttatattctgtgcaggtgcagtggctcacacctgtaatcccagcactttgggaggccgaggcc

SEQ ID NO: 33399 - DNA, 1052 bp, Homo sapiens
ctcgtgatccactggccttggcctcccaaagtgctgggattacaggtgtgagccactgtatgagcccagcctcattgtgctttgtactaaccccctttccctgtcctcttccagcttgtcttcttctatcacagtagtttcttcatgaagaggccatgtgctatattccatgagatatttcacactcaaagaagacttcttttatactcttttgataatttgtctgggaatcactctcttgatttataagggagtttgtagtaaatacagtaaaagggaaacacacaacgtattttgagacatcagagaagggagaaaccaattctattaatatttggggttagcagggaaggcttagttaagaggtaacatttgaactaagccttgagataagggaaggatttgaccatgcagtaatggcgagagagtagaagcaagacattatggttagtgttatgtaacaatttgactgggttgtggggtgcccagatatttggctacacattattctgggtgtgtctctgtggtattctggatgaggataacatttaattgctagactgaataaagcagattttcctccccagtgtgggtgagcctcatccaatccactgaaggcctgaacaaaacaaaaaggtagagtcacagagaatttgctctttttacctgattatatttgagctgggacatcaatcttctcctgagtgtagatgtggactcgagttggaactatatcattgactgtcctgggtccccagcttgctggctgcagactccaggactccttagcctccataaccatgtgagccatcccttacaactaatcaatctgtctctctctatgtgtatagctctacctctatctctctgctctttctctggagaacctagagtaatacacaaggttatattagagaagaggatgacccaaggaaaagcatgcaggcagaaaaatgcaaagagggtttgggaagactggggtcctgatggggagtttggatttcactgtgtgtagcatggagaatccttgaaaatattcaagaggtgaaaat

SEQ ID NO: 33400 - DNA, 1056 bp, Homo sapiens
tagcttgttcaaaacttattcttcctattggaaactttgtaccctttgaccagtgtctcctatcccctacctttcctccaccccagcccctgataaccactgtcctactctctatttctgtgagttcaacttctttagattccacatataagtaaaatcatgcagtatttgtctttctgtgcctggcttatttcacttaacacaaatgtctttcaagttcatctatgttgttgaaaatgacaggatttcttccttttctgaggtttaatagtattccgttgtgtgtatatagtacattttctttatcctttcatccactgatggacacttaggttgattctatatcttgggtattgtgaatagagctgcagtgaacataggaatgtagggatcccttcgacatattgacttcgattttttttggtctatacccagaagttgggttgctggattatatgctttgaaatctatagcacagcagcatgactatagtcaataataatgtgtctttcaaaataactaagtgggtacatttcaaatgtctcatcataaaaattgtcagtaaattaggggatggacgtgttaattagtttgatctaatcattccatattgtatacacatatcaaaacatcacataaatgtgtacaattatgatttgtcaattaaaataatgttagttaaaaaaataagtaacttgttcaaagccgcagttgggattgatggagctgggacatgcaccaaggctgttgctttcaggcccgcagagtccttggtccatgaatgttgaagccctacctgagatttctactgagatcagtgtagggattcaatgtctcagaatcatcccatcctccagggcccacaagtccatgaccgctgcctctacccctgaccctactgacctgaaatatggcccctgctttcttttccaggagcatacaacacttacaccaagcattgatgggatttgttgacttcatttgagatgtggggccgtggagagggtcccatgatccttgcttggtgttggccaactcattgacttctctcctttg

SEQ ID NO: 33401 - DNA, 1476 bp, Homo sapiens
aagaaaagaaatgtgtatggcttcagtgaagtgtaatttggcaaaatcagatagtgcactgaacactgggactcacacctataatctcagtgctttgggaggccaaggggtgaggatcacttcacccaggagtttgagaccagactgggcaatatgatgagaccccatctctacaaaaaatacaaaaattagccaggcatagtggtgaacatctttagtcccagctactctggaggctgaggtgggagaactgtttgagcctgggaggttgaggctgcagtgagctgtgatcacaccactgcactctagcctgggtgacagtgcaagatcctttctcaaaaaaaaattttttttaatgcatgaactttcttatttggcgattccacttgtaggactttgtcctgctgacatatttgcttggtggtaagggatgtacatgcaaagctattcattgcctacaaacaacaaactgttgtaacataaagtatttttcgttcactcattgtggaaacaacatgttcctgtgtgcctcttatttataaccaaatagaccatgtattgaactggggaatatttactctgcttcaacattaaaaccgctttttggccacacgtgatggctcatgcctataatcccagcactttgggagaccaaggcaggaggactgcttgagcctaggagttcaagcccagcctgggcaacatagcaagatcccgtctctacaagaaattaaaataaaaagttagccaggtttggtggtgcacacccatggttccagctactcaggaggctgaggtgggagaattgcttgagcccaggaggtcaaggctgcagtgggttatgactgtgccactgcactccaacctgggcaatgcagtgagaccctgcccccacctccaaaccaagaaataggtttgttgacctcagcactattgacatttggggcaggatcattctctgttgcatggggctgttctgggcactgtgggatgttactagctttcctgcgctctactgaccagatggatgccattggcacccctgttcccatcgtgacaaccagaagtatctccagacactgccaagtacctgctgggggtgcaaattcaccctcaactaagaaccagtgcctggagataactatataccatgttgaacccagtacctggcttcagaaaatgtccagcagattccacaatcatcagctccttttcaattctctaaacagtgatagcaagtcaggcaggttccttccttaaaggtgagaaatcagaggctgaggtcacacaggtggggagaggcagggcaggattccatctcagccctggatggttcaaggaactgggtggcccatccctgcctctgccaccccccaccgccctcctccagcctcagccctcatgtgtctttagttctaattaagtcctcattacaaacccctatgaatttcacccacccccaagcttccaggcaac

SEQ ID NO: 33402 - DNA, 1045 bp, Homo sapiens
atgtcatgagaacagcaggagaaagacccaccccatgatttagttacctcccactaggtccctcccacaacatgtggtgattatgggaactacaattagagatttgggtggggacacagccacaccatatctgagctgggcatcttcttccttgaatgcacattggcctctgaggcacttcctggttaacctcattccacagctgagaaaacccaggcttggcacaggcaagggatctgacccaatgtctcccatcttattagaggaaggaccaagactggacccacaactgtactcctgttttgtgtcaccatgctgcccccaagatcagatctcaaaccaagcagacatggggggctcagaaagtccccagcctagaactttcctgtcacccaatgacactaaaggctaagctttcttcttattattctggattcacgctagaatgaccttggggtgtgtttcacacgtgccgatgtctggagtttcacccccagctaactgactatgaatctctgggttggggcctgggcactgatattcatgcagagcttctgagatgatcctgttgtatcgccaaggttgacacctgcagaaaccttgcacactttttcattcatttagttattaaacatgtaatatttattattatttttccagacacagaagcgttgcaagaatagtacaaagacatcatttatacccttcgctgagattccccagtgctaccattttaccccatttgctttattattttctaagtggcagatgagttatcttttacccctaaatattcctgtgtattccttaataacacggactttgtcttatataaccaaggcaatatcaaaatcaggaaactaaccctgctacaataaggttttctaatgtagggacctcattcagattttgccagttaacccaatgatgtacattggagcaaacgataatcccagatcatgcattattttcagttgctgtgtctctgtaggtcccttttagcttggaacagctcctcggtttttctttatctttcatggtattg

SEQ ID NO: 33403 - DNA, 1116 bp, Homo sapiens
ctgatctcgtacggcatcctcgcccacttgttaccgcgccgcgctcgccgagagcctccggggccggcccgcgctgcgaattacacctcgccgaggccgagcccggggactggagccggaaggcggcaccgggcgtgccgggagtggagtgggcggtccgaggccggggctcagaggccagctcgcgcctgccctgcgcgctgtggttgcggacgccccgaacccggaagcgcggtcccgcgcgcggctcgcccccagctttgaccatatatagtcaagcgctcggctcggcggctgcggtcccggcgagcctgcgcggacctggcgctcccctcccccgccggccccggccccgcctccgccttgctcgccccgccccggaagtgacgtatagcacgccccgcgggcccttgaaaaggcggcgcagacaagcagccgcgtcagaatgcttctgggagtcggggggtgggtgcctttctgttgctagcttgtaggagaagctgggctgtaggaagtttatttgcgggggggtcttaaagacgctgaaagtactggcgggctttggtgggggtctggaaaaacctctctgtacctgtgaccgcgttgcgtggcgggcgctccccggcctctcctttttgaccggtcccgggcgttgcccagccgccagtcctcctgctcgggttttgtaagcaggagagggatgctttttacgtcttcttaaagtacggttaagtgcccttgcttgaagtagttgctggcaacaagaacgtaggggttactctttgttgggcctgaactcgtgctttttctctcaaaagttgagcttttgaaaggcaaaaaaggcgtgggggatgggggagctgtcggtcttaaggaagttaaaggttatttcctaaacaaaacaagtctcactcctaaaaccagggtagtggctcagttgtggcgggagagcaggggctgtaaagtgtccaagtttctagtctcatctttcagtaggatgggtacaagctttccccttggggctctgggggctgggagggttgtaaaagtgggagaaagcaaagtatttggcggggtgcgggcgggtagctgaatgttgttgtaagtggaagagga

SEQ ID NO: 33404 - DNA, 1026 bp, Homo sapiens
cagaggactggtaacaaagcctttaacctgctagcataaaccttatgcaaaaggggttagcccggttaattctgccaaggcaagaaatgagttatctgcaaccctccagtgaactcgtttactgaatcccttcttggggggccctatgtgttgtaaatacctttctttccagttgagcagcccattggaaagtgggttttgcaaataagcaaataactaacacctgcatgctgcagcagctttaaatccctgcaagtcatggaagcttgggcataacttttcagtttgaggttactgaaggatgtacttctaaacagctaatcaacggcataactttagtaacacagtacaaggaatatatcctacttgggttgtctacccttgtttcttaaccatagcttcaggcaacgaaagctatctgatcatcaagatcccggtgaagggggtggtaactgggtggagttgagcctccacactggaggacctaaggccgtgtcttgcactgcttcgaagctcctgtagctgcaaaagaactctggggacagttaaacaattcccctgtcccattcttcttaaactcccataagtgatagaacacagtcgcttctgtctacctgctgcctgagacttggtgtgttgctgtgaggcctggtgacagccccggcctgtcctttcccgggacccttcctggaacgtttacttaccctcatacttgcaagcacttcgtgtgagctagatgctgggtttgtgggcccttgcccttcatcttacatcagggaagggaacttgggttggaactttgccgagttgaaaagcaagtgatgcaaccaggagttaaacaggttgggtctacagagtctaaactgtcctttacacgtgaaagggctgaaatggatagatcagatatggaagttttaattgtgcccctaaataaccaacttttccagtgaaggtagaatcttagcatgctctcacccaagttcaaggatagcgtcagtcgctctccagttgaaagctttgtctttg

SEQ ID NO: 33405 - DNA, 1050 bp, Homo sapiens
aaaaaacagtatatagttgcataccaaacccaatttgtttatctgataaagcatttcttaaatagtggtttgtaaaccagatgaacttcagggacattcatagtcatcaaactgttacatgcccactgaaaatggaaaagaatggactcttgtattacagcttaagtaatggatgccttctttttgtttcctattctgtgttcagtgctttaattgttcttgaaatgttttccacttgtctattttaattcttgtgagtactagaatagctttggccttttaaaacatttgtttattttttttctgagaatggctaacacactttattgaggttcgaaattaataaagaaaataaaagaaatgtatcttcattcattctgtatgttagtgttttaattacccttagaatatatggataaaaaatactattctttgtcttggagaaggtaagagtctagttagatgaataagggttatctatgtagaacaactagagaatgagaagagagcttatgagattgagtactacgttatgcagtagagtagcacgtcatctgctactgagtatggtgtgataacattgtgtaacaggaaagtatgatcaatatctacttaaaattaaggacaatattagcactacattgctttattttaaagtaaaaattagagaactaaacacaagcattgtaagtacaataaaagctgatctttctagttaagcagaataatacatgttcaagcatctgctaaatcattaaatataagaatataggggttttctataatcttatttttctttggaagagtacctcattttcaagaggagaagtttctaattgaccacttctttaaaaataaaacagggtttttaatgtatcccagcaaaaaaaattaatatctcttcaaaaagttctcttgtgattaagtttgaattccctttgtcatactgcttctaatattgtacactgacctccttagttatttttcagtgtttataatcttttcttaggttatcttttttcaagatttggattactttgttcttttctg

SEQ ID NO: 33406 - DNA, 1049 bp, Homo sapiens
caattatgaaccaaattataaaacttggaagaaacaaataaattcatgaacatatacaacttaccaagactgaatcatgaagaaatatacctgaacagaacaataacaagtaatgagattgaagctgtaatgaaaagtctcctaccaaagaaaagcctaggacctgatggtttcactgctaaattccaccaaatgtttaaataaggactaacatcaattctgctcaaactattccaaaaaaaattaaagaagagggaactctgttaaagtcattttatgggccagcattatcctgataccaaaaccaaaggcataacaacaataaaactacaggcctatattctaggataaacatagctctaaaaatcctcaacaaaatattgccaaacaaaattcaataatatattaaaaaaataatgcaacatggtcaagtgggactcattccagggatacaaggatggttcaacacaggcaaatcaataagtgtgatatatcacatttacagaatcaaggacaagaaccacttgatcatttcaacagatggtgaaaaagaattcaatggaattcaacatccctcatgataaaaactcaatgaattgggtatagaaggaacatatttcaacacaataaaggtcataaatgacaaacccacagctaacatcatactgaacagtgaaaagttgaaaagttttcctctaagatcaggaacaagacaaggatgcccactttctccaactctattcaacatagtactgaaagttctagctagagcaatgaggcaaaagaaataaataaagggcatccagatttgaaaggaggaagtcaagttgttctcatctgcaggtgacatgatcataaatttagaaaaccctaaagaccccatcaagaaactgttagaactaataaataagtttagtaaagttgcaggaaacaaaatcaacatcgaaaatttagtagtgtttctataaaccaataataaactagcttaaaaaaatcaagaagcaatcccatatacaatagctacaaaaatttataagatacctagggat

SEQ ID NO: 33407 - DNA, 1030 bp, Homo sapiens
agatatcctgtgttcatggattggaagaattaatattgttaatatatccatattacccaaagcaatctacagattcaatgcactatcaaaataccaagacattcttcacagaaatagaaaaaaaaaatcttaaaattcatatggaaataagaaaagatcccaaatagccaatgtaaccttgagtaaaaagaacaaagaactggaagtatcacactacctgtcttcaaaatatactactgtagtaactaaaacagcatggctgtggtctaaaaacccacatagaccaatggaagaggatagcaaacccagaaataagtccatgcatttacagccaactgatttttgactaaggcaccaagaacacacattgggaaaaaggacagtctggtcaataaatggtgctggaaaaatgacatccacaggcagaaaaataaaactagagcccccatcactcaccatatacaaaaatcaactctgaaaggattaatgaattaaatgtaagaactgaaactatgaaactattaaaagacaatacaagggaagtacttcatgaaatttggaggggattttttttagtaagacctcaaaagcacaggcaacaaaagcaaaaacagacaaatgagattacatcaatctaaaaagcttctgcacagcaaaggaaacaatcaatagagtcaagagacaacctacacagaataggagatagtatttgcaagctgtgtctaacaaggggttaaaatctagaatacgtaaggaactcaaacaactcaatagcagaaaaccccaaatagtttgatttaaaaattagcaaaagagctgaattggtatttctcaaaagaagacaaatgtccaacaaacaaatgaaaaaatgttcaacatcactaatcatcagagaaatgcaaatcaaaaccatgagacaccacctcactccagttaaaatggctcttttcagaaagacaaaaaatgacaaatgctggcaagggtctgaagaaagaggaactcttatacacagttggtaggaatgtaaatt

SEQ ID NO: 33408 - DNA, 1053 bp, Homo sapiens
tgtaaaatcatacccattccattatgtattgattgtcaagaaggaagtaggcttttattgctatttttatgtcagtttccatttactgtctcaccacatttattgggttattgcctttgcctttgactcaacaggagctggaagggtaggaatcccaaattctgttgcctaaggcagccagttgtcagaatggactttcctcattttctattatgaggcctgaggaaagacattcagttccaaaggctgtgcctatccttttaaatagaagagagagggcccggcacggtggctcacgcctgtaatcccagcagtttgggaggccgaagggggcgaatcacgaggtcaggagttccagaccagcctggccaacatagtgaaaccccgtgtctactaaagatacaaatattagccgggcgtaatggcgggcgcctgtattcccagctactcgggaggctgaggcaggagaatggcttgaatccgggaggcggaggttgcagtgaaccgaaccgagatcgcgtcgctggactccagcccgggcgacagagtgagactccgtcccaaaaaaaaaaaaaaaaaaaaaaaaaaaaaaaaaaaaaaaaaaaagaaaagaagaagaggaagcagccgtgccaaaaaaaaaaaaaaaaagaagaggaagcagccgtgccgaggctaggtactgcctaaagaagcgggggaacaaattggaaatgtgggaatgcgaatgtgggcaagttgaggaacttgtagcttctcgtcggttgaatcttttcactgaagctgctttattatatctgacatgtgaaactacacaatttcaaacaaacccatattgaagtcaacatacaaaaaagcatttaaaaaacaaccattagtaaaaataattttttcagttaacgctattcttcccttgtataggtgttgataatcatataatcaaatagcttattgcatatggagagttgttttctttgagttaattcaacgtattgcaacttagttagaatccaggaaaatagtattttcaaatgtgtatttggaatcttcaaa

SEQ ID NO: 33409 - DNA, 1026 bp, Homo sapiens
cagggagaggatgggaagtctaaggcacagagggaggtgtaatgtagctgtgatgtgatggtggggttaggctgcaaatacaaatattacaaggggccttgcaagctaggcacagggcagagggaatgtgtgaagagtagatgattagatttgcacttcaggaagatctctttccttgctggcatgtggaatagtttgggggagtcaagagaatcactatgaccagtgaagagactgtagcccagaagtgttaatggccttaacagcaggagttacagtggaaatggggtggagagaatgcattgagagataattaggtgccagaaaaggcagcaagtgatatggtgtacaggtgggggaaaagtgcgtaaggaagagagaggagatttcggggaaaatgtacagaattttgacttgaggatgacggtgctattctcagagataggaaatgcaagagaagcagtttagggtataggtagggaatggaaagtgagtccagtgtggaaattgtggaatttgaagtacccagagggagcgcaggacattttgacatcattttgagctcttgtatgttttgaccctgctgttttttttgttcttgaatataaacattgccgtcaagatgatatcaacactgatgaattttgtggtaaagatttattccagggttaacttcgttaagctagtttaatttattgacctatttcctatattgcaaatttaatcttttccaatttgttccctcctgtattgttttactagcactgtttccatcaggacaaaatctttcttgtgtacattttacaatgaatacttgatttatcaacctctttatcatcatctttttcaaatttttacagatacaacttttccatgataaatgtcgttttagctctactatttttaccatgtcaaattttggacaactactctttttgatttttcattaatttgtgagcaataataactttttaccattttctgtttttgctattttcagttgtattttacctttttttttgtaac

SEQ ID NO: 33410 - DNA, 1098 bp, Homo sapiens
agggagctcccggtcctgcaggtaagttaatccttgttgcgatactgtgtactagatgggcaaagtgaagaaccagtttagcctaggtaaggagaaactggtagattaccctaattttttttttggtagaatctaaacaatctcatgagttcagttgaacatgtgaaatacactcttcttttcctcacataattgtttcccctgccagtctacacagctcgcaagggtaagtctgttttatgagttggataggttccgggactgcgatttatcttaaagaaaactcatttgcttatgtagcagccaagatcagctactaaatttccaggacattgaaaaaagtgcattctcttcaaatccctttatatttttacctagcatccccttgcaccctgaccccgttctgaactttttgtttgtttgttgattggttggttggttttgccttcaggacaaagtgcaggacaattttgtgtctgttcttgagtcaagtatatttgtttgatctctgtggaacttagttctgagcatatgaatgaaataaaggtgaactgagaggtcataatctgtatctttctctgagaagttctctaaggctctgcctttgcttgttttgctgtttcttgattccttggctgtgccgctgtctctgggttccagcactgacaccccatgtgggtagggtcctgtggaggacagcacgggtctgagagagagaaagcctggggaaagctggagatgccctgttcttgctttcctgcaccaggcctctataccccttgaggtcaaagcatgtctaattacgttgagaacaagtcagagatattggacataagtgtcttcctaaaaaataaaatgtgcagtaaatactacattaaaattatccgtaaaccactttaatattaactttgaactctgcattatggcaggctgttgggaaaataaaatgttccccagcactctctttctctctctgacttcgtgtctaccagttcctgatcttgtcctttgcaaggaatgggtgggactccacaggttcctgactgcatagctttttcaaatccagtgggtctttctctgtttccctccaagttccct

SEQ ID NO: 33411 - DNA, 1023 bp, Homo sapiens
attttggattaaagtggctccgagtgttcagagacaaaaaaccctctctgcaatgaaaccattaatcttggctcatttgtccataaaatatcttctcataagagaaattcatgcagtgctaagcttctcactacatgcaattttgggtttcactcattcgtcagagcattgattccttccgttgatacgtctgaattaggaaaggctattataaatgttcccaggactttagaaaaaagctttaatgacactgccacttttgtcttggctttacaaatgaggtctctccaaccttgcttcattagttttgcaaaatagagaagttctgtataccctaaccactcactagggtggtgcatgtgctgttagtgttgaaaactgtagcttctatgttaataaatcacgaattgttgccccaaatctaaaagatcttaaaagaagagatacaggtttttcatcacagaggtgatgctacacctactgatttgtttagttgactaaatcgtggctcctgggaatctctgctctgggagatttttcagtccttggcgattattctctttaaagtcgttgtatttaccttcctagtgcatggtgtcctatcaggggttttaaatgctttccagcagctactcacatatcaaatgattgccatcaggatcagataacttgaggagctcaaccacctgaccagtgatggctacagaggtgctgataacagtgacaccaccacccttccttccagtgcaactatggacgatgagaatgtctctatgactctgtcccagtgtctacgtcaactccctcaatggcgataaccaagacgaatgctataccgtttaattacactgtcagtttgctgagaggataaagaggataaccaaaaaggggcagttgtaaaaacaaactaaaatggagactagacctgaaaaatccctcagcagacaaagtgagttaggccttgaaaataaccttaacgttttttaaattgcaaacataagcaaaacttaacttgggccatta

SEQ ID NO: 33412 - DNA, 1030 bp, Homo sapiens
catgtttcaccaaggtaacctttgatctgttttcttatctgttaaagtctacttggtgattcagttcatagcttgctagttggctgaatgctagaattgttgctggcaaggaatgctgttacagggggccagtagacagtggaagtaagagagacaggacaaaatgccaggagaaaaaggtcaagtcaaggtggagtacaaaaggcaaatgccaggcaggaaaatgggacgggcttggaaaagaatgcttagtaaagtccaccttccttgttttcactttttgtaacctaattactccaacatctttgctgctgacttttacccctgctttctcctaaattactctcccaaaggtcaccaaaggaccacgtggtcatcacatttgatgaccttctctccatttttaccctccttaacctctctgtgtttgatattgtcaaccactgtccctttcatgagtccctgtttccatggcgatggtgacattgtactcttccagctcttaaatcctcctgactgttctttccctgagctccataatgactccccttccacttctctagtcttcttttttttttttttttgttttgagacggagtctcacactctcacccaggctggagtgcagtggcgcattcttggctcactgcaagctccgcctcctgggttcacgccattctcctgcctcagcttcccaagtagctgggactacaggcacccgccaccacacctggctaattttttgtatttttagtagagacggggtttcaccgtgttagccaggatggtctcgatctcctgaccttgtgatccgcccgcctcagcctcccaaagtgctgggattacaggcgtgaggcaccgcgcccggccttctccagtcttctaattgtggggtctgcctacagaactgttcttttcttacttctcttttttctgcattttctatttcttggatatttaattcactcctatggcttcaatgatgatttctatgacagaggttttgaaatatgacagatacagacataac

SEQ ID NO: 33413 - DNA, 1033 bp, Homo sapiens
tggtaaagccatctcaaatttatatctctaaccctgacattcctcctaactccatgatcacatccttccttcaaaacatctccacttgaatgtccaagaggtttattaaatctaacaggggctaagcaaagcccctgctgtctttgcccaccatactgcatcttggtaagggcaccaccatttacccagctgttctaagtacaaactctggaatcatcctttttcttctactctacatcaaatctgataaaaaaaaaatcctacaagcgttgcctgatcatagatctggaatctggccatttttcatctcctccagcagtgctacatcagttcaagccaccattgtcccttccctgggctcccatggtgccttcttactggtatctgtttactcttgctctctataaatgattcctccaaacaaaagccagaggtacttaccttggcttacaagaccattgaggattaggcctttggctatctttctgggctcatgacctatcacctcctccttgttgactctgctgcctacacaggcccccttgttactttctgaacacaccagatggacactcatttcagggcttttttcatgctactctctctgccccagatacttctctcctagaacttcacatggctcactgcctggctttcttctggtctctgcccaatagtcacttctggaaagaggccttctctgaccataatatctaaaaaagcacccccacagactctatcctcttaccctgatttgttttttcctttgccatatgatgttttatatttctttatatatctattgatactctctttcattagtacattggctccctgagaatagggtcttcgtctaccatgttctttgctgcaatcctagcatctggcacttttcctggcatatagcaaaagctcaacaaatacttgatgaatgaataattccagttattcaagactgtgagtcatatttgactcctcacttgcattccctcctgtgtgcagtcaccgagccctttagagtcttatgtttatt

SEQ ID NO: 33414 - DNA, 1041 bp, Homo sapiens
acccatctcatcttcctcttctcttcaatatttctccttcctccaatctgataaatgaagcaaatatcataggctgccaagggaattgagatatttttgtgtgtgagtgtgtgtgtgtgtgtgtgtgtgtgtataatttaagtaaaccaaatgtataggaaaaatctgagtttgcattaaaaacaaaacaaagcaaacaactggggacttaacctttactttacaaaaggattcttttaaaaacggtctttaaatcccaaagtgcccctggtgcggtgaaattactatttaatctctaaaatttatatttttttcaggaagtttaatagaatcaaatgatccaaaaatccatatacacacacacatgtgcatgcaattaaaatatggtcatcttcttgtctgatgtgctggatcagtgcctgacatgtcaaatgcactcagagatgatttcttcaatggtggtgatggggcattctggcaggtgatcgcccctcagagccacatgtgtaagtgaggcaagtgccgtctttccttggcgtcctataccttcttggatgcaccctcccctttcccatttttagggatttttagggatgcacccttccctatttcccagccagagcccagagaggggaaacaaggacaggctgtctctttggctgctggtctactcgcacttccactatatccccttgggaccagaagtgaggatgggtttctcattcttgtcttttcctctctcccaggactccttctggtatccacagtctagaggaggcagggaccgggcatctgacacccctacataacattctcttttttcttaattcagctccatcattaagttttaataatgggaagagtggattacatgtgtttcagttttttgatatatgaaatttgggctgactaagtacttaatctgaaatgacattgttttaaactggaagagtgttgcaaatttagatttttttctactatccattgggtgtagacaggtattaggtggaatagttatttttttctgcacatctgagtcca

SEQ ID NO: 33415 - DNA, 1133 bp, Homo sapiens
gttttgaattgttagcctcttaactaaccagaaccgtatgtgtttttcctgcatttgctctgacttagtccatgactttcatctgcaggatgtgtcagaactaaggaatgaattacagcggaaagatgcactagtccagaagcacttgacaaagctgaggcattggcagcaggtgctggaggacatcaacgtgcagcacaaaaagcccgccgacatccctcagggctccttggcctacctggagcaggcatctgccaacatccctgcacctctgaagccaacgtgagcaaagggcagaggcagttggcctatgagtgggctgatgcgtgaggttggccacacattccttcctgtggacttgacattttggaagaactctttgccagataatgagttcattttagttttatgctcccattgaaaaattttccactatttttataagctgttaatttcttgagtactttataacatgtctgtagcttggataaaccaagtaagtattttttttttgtctttagcaaagtttagactgtgaatatgatgacacagattcttttttatggtggctttgcttgttttaaatttttgcatgacttttcatctttttatgtgtgtttcctgtagtttgatccgaaggaaaagagtatagtagcctgagaatcaggagatgggagttttagtcgtaggccttatgataattaccccgcggtggtgtgtagaaaagtatgtaaatttgctctgttttaagactttgaactacctcaagaagaggaatctaatacaatatttgtaatgtttccagagctctcagaatgaggatttttttgtaaataggtcagaagacgatggaactgtcctgggttagtatagtaatcttacagtaggatccttaggttgatgctgacttctgtttggggtatgtttatattttatgtggtgtttactttttttttttgacatagaaggatatagtgggagcagtgatacgctaacattcattacattctgcagtaatgaatctgtttaatgggtcagtcactgttttcagtagcatgacagtggggtcataggtgagctgtgaggggctaaatcttgctctgattgtctctttctgttttgagttttgtttg

SEQ ID NO: 33416 - DNA, 1011 bp, Homo sapiens
gtgccctgcctttgggagggtattttgctctcgttagttttgtgggcagcctcagattccctgttgagttgctgttaagaaatggagatttctggctctcattgggtaaggttttctgagttttatatcttattagatcacatccctttacccagaacaaatgcttcactgtcttctgattggcagtactcctgtggctttgtgccttgactcattttgttgtcttcagccttgaaggccccttcccacatggactgacatccactcatgtgcctgatccctgaagcctcccagcacccattcagttgcatccccagggcacaggactttgatctcttctgttgccctcgctaggttctccctggtgggttagtgctttgtatctgtctctctgcccctcactaattctacacccatgagaattagacattattctccttaaatatataaggaccatataatctgtatctttttggtgtgtgtatatggtatctggcacatggatctctgattaccagcctgacatcaacaaatcccctcagttacaacgtataggttaaacaaagcttttaaaagctcatgtggtatgacctcaaggttgctaacctggtcactcatggtaattagaaactctgattggcagctttgtatttcttgactaaaaacctaaataaactgattaggttttaggcgttctttcaaagaggttcttgagaagattgagaactatcctatttggtgcttagtgaaaagattttgaattactgtacgtaccagttgttgccatttctttattaaattcagaagtttttttgccaaataacaatttttcaatcttctctgtttgtagacatcttactgggtgatgaataatcctctaagaaaccctctgagctgctaactttttcagggagaaaatcacaagccatcttctcaagttcccctagaaacctgtggaatgccctctgccaagcactgctctggtactggggagtggagtattatgtcttg

SEQ ID NO: 33417 - DNA, 1047 bp, Homo sapiens
atgagggcttcaccctcatgagtaggataagtacccttacaaaagaggctcagggaggcgctcttgcctcttccaccatgtaaggacacgtagcaggcacccatttctgaagaatgggccctccccagactccatatctgctggtgccttgatcttggacttagcctctaggactgtgagtgacatatttctattgtttataaattatccagtataagtaagatattttgttagagcagcctgaacgaactaagacactctaagcgggaaactcacaaaaaatatttggtagtgaaaaacagtatggtgtgttaatgtatggtgacaagtgtttgtttgcatttaaaaatgcattggagcctcgttttgattaggcagtaaatttacctttaatacgtaagtttgacagttatatgtaatcagcttttttttttttaagatggtgtgattgaggttaatgtgaactgaactttctatttctaagctgtcttcatctaattttacctttctgtggaaaatcaatacaagtcaaccatttttattgcccagttattcaaagttttattcaaagagcaaagatttgacaatgcatagaattaacattggtttgtgggccaccttctgggccagcaccaaagactgaaaaaatattttgccccctaaaagttgttattgagtcttgtcaaatcacattgctctgtcagaaggtaagacaaatcagtgtggactgagagcaaggtcagcaccgtgaacagccattgcggttcctttaacccactgggaattcatgcagtgaagaagcaacacaccatgaggcaaatggctcaaacccaaagaccagaggttcaggggatatatatatatatttttttaatctgtagagatgggatctcactatcttgcccaggctggtctcgaactcttgggctcatgctgtcctacctcagacttccaagtagctgggttttctttgggctaattatttttttgtagagatggaggtctcgctgtgttgcccaggctggtctcaaattcctggcctcaagc

SEQ ID NO: 33418 - DNA, 1067 bp, Homo sapiens
ctgaaccttttccatttttatttgtaagtgaccattacagtgacttttgcagtatcatggtacttctttttttttacctttaatatgcttagttggctgggcgctatggctcacacctgtaatctcagcacttttggaggccgaggcaggcggatcacgaggtcaagagattgagaccatcctggccaacatggtgaaacaaaaattagctgggcgtggtggcgcatgcctgtagtcccagctactcgggaggctgaggcaggagaatcgcttgaatctggtaggtggaggttgcagtgaaccaagatcgtgccactgcactccagcctggtgacagagcgagactctgtctcaaaaaatatatatatacatgcttagttgtgcctcttaacctctactatttctattgtaaatactgactttgttaattaaaacagacaaaatacaagagatggaagctagagggagcctttgttcacctatgtttcaaatgactcaatagatgctgtgaaacaagctatgcagaagcatcttcttcaaggctggttacggttctctgaaggaaatatcttagagttgctccatcggttggatgtagaaaattcttctgaagtggcagtctctgttctcaatgccttgttttcaataactcctctcagtgaactggtgggactctgtaaaaacaatgatggcaggtacataaaggattcattctttgaaatgtagtactgattaacttgtgcaattaatttgttttttttcctccccatagcttaagattatattaatacctttaatcttaactctcttttgttttcttttagtctgatgaatatccttttatccttcctttttcccctcctggtgtaagaactcataactttatcatagactatctactttagctatgcttttccccccttcagtttcttactttgatttttgaattagcctaccatgagaaaatccagcaacatgcacccctagtatatgtttgcttatttggttcttttttgttctaagtttcttcattcctttttgtgtggatacattaatgactctaatta

SEQ ID NO: 33419 - DNA, 1055 bp, Homo sapiens
caacaattttaggaacaactgaatggtactctgcttagcatggagaagtgggttgagtagaaaggaagagaagccacgcagaattctgttttagcacttgtcatttcatgctattcagaacagtttaaagtttaagcacgaacatgtcttactcaacaaaaagggaatgcacttgggtgggtgggggtgaggggggagcgtagcaattgaatttcaggtccttgaaaaaatatacatccttatgagggatgaacaaaaagtttccagaaaatagtttactgggtgctgacttgtaaaattctatcattgaaacagtttgaatacagatttcaaacatgatgttgtagagtcaaaggtgatatagagcttacttctatgaagagcattcaaaccgcagcaaagcctggttttacttgaagtgattggaaccagggcaagtttagatcttgacctgaaatgccagaaaaggagatcgtgactcctgaaggaaaagtgctgcagaaatctgaacaaaaatgtcagggcctgaatactatttccattcttgcccctgttagtagttttcactttacaatcacagcggggttccctgagctgcaaatgaagaattaagttttaatacaaacagaattgttggaaggtaaatgcctatgaatgcaagtctttgaagtgcagttgttttgatggcactaatttttttctgtgccttaggaagtttcgccaccatgctacctaaggacagtgttctgaatttttataaaatttcttcctgaatagcatgagaaaattgggcatttaacctcctgaagggaactttttttttggggggggtgcctaacaattatagtaaaatagcagaatacctgtgaaattaatatacaatccttacagaaacaaaaatggaaaggactctcccatacacaaaacaaacgaaaacttttttgtgataatgtaaccacttcattttcttgtcatatgccagcaagaatgaaccttgtaaatgtgttgagtcatgttaaaaatatccttttaaaggttatcctcttctccttcct

SEQ ID NO: 33420 - DNA, 1050 bp, Homo sapiens
ctagtgtaattatgaaaagcaagggtacaagttcacattttctcacatgatacagatgccaagtagctcacctgaaacaaatattctagcagatgggaaaatgtgcacaaacctatatgcacaacatcctttataatgctcatttaaaaacatatttttttcacaagaagaacaagtgacagaacaaaggatatggaatttttgacaaataatggggaaaaatgataggacaaggaaagtatttgatagttgatatatatatgatcgttttataaatatgtgtaaaacaatatataagtattctataaatatatatttatagaatatatgttttgacatttatataatatataattattatacatagtatatatttatatgtaatataatatataattaatttatatataatatttatatataatttatatttatatattatatatatatatatagcaagccatagttgcccctactgtctaatgcagtagaggcatactatatgcagaactcataaaaaaacaaatttaggatttacttcctctgtataggttgttccgagatacgaattaatgtttcaatttcttttcttagttattgtatactttattcatacttaacactatgttttcccaggtatatcactaataaaaaagtttactggtttaatacatagtttatacactgaagtttgatttttcgcattgtttgcttagattaaagctagttggatatactggacattgtgttgcttttctttgagctttggaataaataatcgccctttgactagtggttgaaaataagatgccaggggaagaagcacacatgcttttcatggactctaaatgcaatataaaagaaaaggagggtatactgtatatgaattatgattcgacacacttggttgctgctagcggccaaatatgcttttcctttgctgtctgctccaatttctctttggacgggttgagagagcactacatgttcaggtcaagatgtttgctcagaaatagtagtacagttgcagctgtgtttgttggagtagga

SEQ ID NO: 33421 - DNA, 2767 bp, Homo sapiens
aacattgaagtgtttcagtagacataacacaatcaaaatgatccatttttcacctaagcaaaatataccttaatttaataaaatgttttataaaacgaactccctagttcttggatgtcagtttagtctcataggtttcttggagtcaaccatgaaagcaggatacaacagaggagcccatgtacaaatttctcttgaattaatttctgccagctctgattaaagtgtggactactagagatgtcaggtgccatcgtttcctgcttcattttactcttggcctgtttggcccctgccacaataaatccgactgtgattgtgcaggaattgcaggttacagttgctacggttactgttgttcagccagaccgacatcattactcatctagcgcgctgccatgatagctaccgctgatttctgttgctgagactgccaaagagcttcatgtgctaagggtgaaagttccgtcgaaggtggcgtctgtgttctaatttggtgtaaggaaacactatctgaattatatactgatactttgctaaggggaacagattgactctgtatcgagagagaaaacttagaaaagtgttcactttcagtgattaaaacaccaagtccttcattactaaggtaactttttaattacttattgggcccaagggactatgtttttgccacttaaaaaatagaggcatacaaggagtattgcatttaaaaaaattaccactatttaaccaaaactttattttcaaatagataggcaacagacttgatatatggacatctgaacacaactcaaaatagccattaccacttgtcatgaaagaaagaaaagtgcaaagccctgagcaggacctacttctacttttattttttaaatcaacgtgtaatcctgtgatttaaacgtcctaaatccaatgaagattaagatcatatttgagattttgccagatctagtgttgatggtttttacttcaaaggaattactaatagacttgttgctaaagaaagctaacagttgtccggtttctgctgttaccaacacacagagtggaccttctgagtgtgaaatccacagcatagctcatagcataagaaaatcaaatgcaagaatgcaagaaagtttctgtgtttttttttttttcactcagctgtacttatttaaacgactgctttcacaagtgcaaatgtttctaactccaccaacaagtacttatggactgccaacttgaatttgtagaatactatgatcaatgctcagaagggaaactaacaaaatatgtggctctatataatatgtggtatttgtgggcctcagctgttgctaacgtctgacctatactgcgtgaattaatgcctagagagttcattgagagtgatcaaatatgtgaatttcagtctatcatattcatgtaaaaaatatatcgtatacacataatcaggtaatattttaaagtttttaaataatgaaattgccactacaatctcaaggttacaattttggggactgaaatttacataaacattatttctaggaataagggttggtagggttttagttatatttaggtaattttaatgtatttgctttatgttttaagacactgaaatcaatttactttctatcttaagggaggttgtgtaaaatgatagtgtttaaatgcctactcagatacttgcagttctgttaactttggaagtcagtagacaaccgtattgttgaggtttcttatctgtaaaatgggaaggatcatacaatttactttctggggatagcacagtaaaatttagattccatattcaaaggaacattgtaaattttcaagtatgatagaaactataattatattattgtcatcctttcattgcaagcaagatggaaatgatagtcactcagatgtccttgcaacttgccctcagtcagcaaagttcctgatactattgcacagccctcttgcatttatccttactgtagtaacacgtaaatatgtgtagtcacattaattatcttaccacagcaaattgacataaaatgtgcatttgtaccatgttatttctctttacttggctgcagaaggtacattagggccaggatattcttaatgagatctcttcatgctctcccagttgatgattcatatagttttaaaattcatctataaaataaattacagatagaaacaaaaagactgtgactcaggaactatttgttagtgcatatatttagattgctgttttaatgatgtgtttttctgaatgacaaatgaaggaaaaatacaaatgttagaaaatgctgagtaaactccttaaactataggtaaagtattctgaaagttgttcagaagatttacatatgttgctaaggaacactttcactactaataaaaattttattttttaaaataatataagattactctgttagctttgtaatatgtacatatgatttgatctatggaacattgtcatctttatataaattgcataggtgattttaagtgtatttttagactactaattatgtcaaaatccagtaaaaattgcaaatcttttagcactttaaatctaaataatgttacattatgagacaagtttgaaccagaagtcgttttgttttgttcttttttccacaattccagtacttctcaaagtagcatagatctatatggtgtatatccactcattacatgttacctataactgagttgattataatcactgaattttttctggagggttaaccttaaaatattttataaattttgatat

SEQ ID NO: 33422 - DNA, 1029 bp, Homo sapiens
ttatttattactatactaattttatattatatttcaaagaagtgatacctccagtgtgcactccagtggttcaagagaaaagtgttctgtggtcaaatgtgttgggaaataatgaaagtcatatcacctgtggtggctacagtgtacacttgtgtgttaatcttaaaggcatactacaataaataaatctgtttaaccttttaaaatttgtttttcaaagttatttaactatagaggcctctcttctttcttaactattcctgtttgttcttgttaatccagagagcaaaaccagtttttagcttttccaatgaatagttactttttattacttctgattgagattttattaaagaccatttaggacatatagggttgacatatattattttttttgtgccagcgttgtcacgtgtaagacttttaatagtgcattggcttataaatctgttcttttcaatccatctttgaaggtgaactcggcattctgttgtagccttgagaaatagaagaacttagaatattttctaacaatttcattaacttagcaccactatttgctttaggtatttgtttatatgtgtgtgttgcctgtgtgcctgtgtgcgcgcgcgcacacacacacacacacacacacaaagtcattcaactactattttaaggactttaacattttatagcttaactgtctctctcttccctgcctcagccaattgaagcaccagaagtcctttgtggaacacctgctgtgcacagcattctttagcaacacaatgaggggtgcatcatctaagctggtgtgaacttgcaggagtctttctcactctatagagagggtgttggagccaaaagcttttattttatgtacaatttggagatgattggtggactttgaagtcattgcaaaactaatttgttcagtatttttgccaagaccaatctttccagtattagaagacaaaataacttagatatgagggtttagacacaggaaaaaaaacaaatggaagaaatgattataaatctcca

SEQ ID NO: 33423 - DNA, 1162 bp, Homo sapiens
gaaactaccttagaaacttaggtgaagagacaggtgtcagatatattatgtgacttgcccaagattgcctggcccgtggagagagagccttcactgtggctcagggatgtgggcttcctgtgtgaaggtcctcccaagactctgtgctgcctggtctttacctggtccacggacaccaatccttttttacttttttttttttctaccatttcatggtgtttgcatttgtcaatatttaaagacacctacctgaaattcacagaactgtatatgatgcttctcatttttgtttgtttgttttttgtctttagaaagtacccacatattgtctgggtgtggtggctcatgcctgtaatcccagcagtttgggaggctgaggcaggtggatcacttgaggctaggagtttgagactagcctggccaacatgacgaaaccctgtctctactaaaattgcaaaaattagctgggcatggtggcatgtgcctgtaatcccagctacatcatgagtctgacgcacaagaattgcttgaacccaagagacagaggttgcactgagccaagatcacaccactgcactccatcctggatgacagagtgagactctgtctcaaaaaaaaaaaaaagaaagcacccacataataaaaatgttgtgctgggcactatataaagccaggtaaatatacaaaggtctcagcctccactgtgtatcatgtttcatacacggaagattatatcctgaaatcactggagtaaatgttgaagtatcagagtatcagtttctcccccataaattctccggttacacttagaaagttttttgtttagttgtgttttgtgtttagttttggctctaagaggaaggaaaggaaattcacattttgtttgtctgacacttttacgagaagttatatatggccttttaatttacacatgtaaaattaatttgtaaaagcagctatgatgtaatttatggatgaaaaagctgaagattgactagccttgttaatgaaaggtagatagccatggttggaattcatgtcttctgaggttcataaaacaggccatcttttaaattgagaagtgacatcataatagcaacatgggcaacctgaaaggcagtcaaagaaaaacaaggagggtattaaaaggtctgaatggtat

SEQ ID NO: 33424 - DNA, 1026 bp, Homo sapiens
agaaaatgtctgggagtcagaagtatgttcagacaagttttctatcatgtgttgtctaccagccttttacatactgtagatattctagaaagactaacaagctagacaaattaatttctccttttgttatgcttatgagaataaactgattaaacagttcctattctatctgtgtaaacagagacatattagttaacttactgcttattttattttcccacatacttacagtaatttcaaatgttgaaaaatgaggagagcagaatatggcattaagcaaagagaatgaaataaaaaataaagcaatgatctgaactagaaaaaaaagttttaaaaatgtaatttttcagttacacaaaagttaccatggcattacctttccttttgtgtctgttggtgatttaatttagtagttttagaaaatgtgtctattgctgtatttaaaaattctaattacagcaattggtaaagaagtttccaagtacaaggggtatttgtagagaacctgtaggactgacaagtgattgacaggtaaacaaccccactgtggccttatattccattctgtgatgttggactatagatactacataagcctcaggaagtaaccaccttccaatttttattaaatgcttggcgtcatggatgtaaacagtattgtgccttagttgactaaatgtggcactttcttttacactgccgcaccaccctgactcagtgtgatggaatatctgtgaaaagaacaaatgggaacttttctttaatgcgtttaactgaatgtatcccccgaaaagaaaagcaagtgcagatttcatcaaataaattgaaaccatctaaaagtgaatgaaagaggatagcatttctaacttcaaatgttctgtttatgacttactagtgccagtgtgaaattgccctttcttctctgctaatgcaaaggctgacaggtcagcatgcacacacacattatgttatgcgcaatcggaagctcttgagcttgtccttgaacatgctttacagttaatatat

SEQ ID NO: 33425 - DNA, 1054 bp, Homo sapiens
ctttgttttcctgaattttaaaatgtggaagcaagtcttctttttgtaaccatttcatatttttaagatgttctaatgattgcctcagagtctagaggaaaaatattctgagggttttccccccttccacttgaatgctaagaacttggatgttttgaatgagctattcgccagcagatgaaaagtcattccagataaatgagaaaccaagtacagtaaaatctgtgttttctaaccagcaaaatctggaaaatcgtaattttttgattccccaggcaaaaatgtcaatctaataaataggctaactgaaatagggtagggtgactgtggtgaaatttaagttgttaagagatgcaatatgtattcttattgctaattttaaaaaaaatctcatgggtttttgtgagcaaaaatgatatatttgtgtaaatcatggcattttccttccttttctagaccatgaggaaaaacaaataggaggtaaaaagaggagatcaacacatgaattaactctgagttatctgtaacggataccctgtcttcataatgtatctcataaaagttttaataccagtgtatttcaaaggtttgcaagttatttagtacttggaacatgttttcccatagaaacaatgttgtaaatattggttcagttcccaggccagtgcacacagcctatttaatccatatgtatctaagagacagtaccaatgtttgcttgagtactggatcctaaaggcatatgtgcagaaaagagcatagtaatcggtatcttctgttagttttttttttttttttcctttttgagacagaatttccctcttgctgcccgggctggagtgcaatggcgtaatctcggctcactgcaacctccacctcccggattcaagccattctcctgcctcagcctcctgagtagctgggattacaggcatgtgccaccatgcccggctaatttttgtatttttagtagagacggggtttctccttgttggtcaggctggtcttgaactcccgacctcaggtgatctgcctgccttggcctcccaaaatg

SEQ ID NO: 33426 - DNA, 1549 bp, Homo sapiens
cagacttttaaaaaacattatttctaatatatttatatatcaacaaggatcaaaacaaattttgttactggaactttatcacaaaccatgtttttagtgaagaaatagctattatactttcttgtacagttcgttcaaaggaggacatgtgttttgtcaacgaggaaagaaatcaatgctatttgtgatattatatacctcatttgaatattttatctatttcaataaattgaaaatgagttcctactttcttttccatatgctgattttcatgatttctttttctatagagaaaaatatagctgagcagatttttaaatgcagcattggcagtgttacaggtctttaattttgttggcattgttcattttgcctttttttgttttttttttttagttttgtgatgtgaggtgatgtgatggtcaaaaatgtggactttttaaggcccgacagggggagccaattccatattctattgagatttcctggcattattgcagttgtccatttgtcacggccaaaatactttctttagccttggctgtccatagggctccgtaacagatactctttgctaaaaataatacagtattttatattaattacctttcagtcattaatattgaaattattaatctattgagataatgcctaggaaactgaaatagggtcattattttaaaatgtatgatatcatcattcaaggtaaagttaatcttataaatataaccttttcacaataaagatcaatgtagaatatatggaacattttaatgctcataaaaattctttagtataatattttatggttagattaataaacatgggaccatctcttctcagatttttaagcaaatcaaatttataaaataattaaaatcacatgactctattatatgacttttttaaaaccacataccttactttaaaaaaagtaaagatcctaaactaagttcaaggtctaccacaatgaatcatttaggatggtattgaattcccataattgtttggttctgtgttttgttctcagtaaagaaagtggaatggttttatttatttgaattatatagggtatatcttatcaaaagacattctaagattacaaaaacattcaatgtgatacatttatcttgacaaggaacatggaattatatgtgcaagaacattcatttgttttcatagtttagaatatataaaattttataatttctgtgcatttatcactttgtaagccttaattccctagttagctacgtatctatatatcctaagatataatatatgatgagtgcattttagttgtctcgcacatgtagacacgtgcagacatgcacacacacacacacacaaatatagacatcctctttgtttttatttcctgtatattcactaacatgataatggacatatattatgtgataaattatattgtgtgttaaataactaccatagattacctattttaaatttcaagagcaataaatctctgttgctaaaatcaagcactaggcttttatggaactcttcctattttttaaaaaacttaact

SEQ ID NO: 33427 - DNA, 1072 bp, Homo sapiens
agcttaggactgaggaagaatattccagctagatggaatggcaaaaataaagacatagaactacaaaggtgagtaggtggtaagttcaagggaaatgataggagatgaaccttggaaggctggtctatgccacactacatgaggtgataactgagtttgaatcacacctgctaggctgggaacagcatggaaaatatttaagcaatgttgagacatgttgaaatctgtaaaatagaaacataattaccattttgagggtgggtttgagggcctagaggcttatgtgattttctcctgcagagttttagctatgatagcagaggaggtgttttctgcagtatctcttgtgtcacaaaaagttcctaccagtgtatattattgtaaactactcaatacacatttgttcattggatgaatgatgctacttatccccctactcttaattaaaagctcaactagataacttttttaaaagaaaagaaaacgaaagaaaggaaggaaaaaataaggtaagagagaactaaaaattggactataaggcagtggaaataggtaatacagagtgtatttgcagaactcaaagatacatggttgtgaaggaaggagaggagttgtaatagactattactttgactccagtgaaacacacctctcaattttcatgcccttgtgtagtgcctttccttgaatctgagcttggccatgtgacaagcgttggccaatgagacattagcaagtgagatgcaagcagaggcttgacaaatgcttacatgttagagatggtcttcttgcttggaatacttgtggttagagtgcaccatcttggaacagctgccttgctgttaggaagcccgagaagtgatacaaagagatgcacatgaaggaaaatggagatgcagagcttacattcccatctgtgctcccagccagtcccagcgctcaggccattttgtaacttccaaccatcccctcacccccaccataccatacaaaacgcaaaaactgcccactcacaccacagaattttaagagagcgtgattggtggttgttgttttaagttgctacacttta

SEQ ID NO: 33428 - DNA, 1051 bp, Homo sapiens
aacatggtgaaaccccatatctactaaaaatacaaaaaaattagcgggtttgttggcgcgcatctgtagtcccagctacttgggaggctgaggcagggaaatggcttgaacctgggagatggaggttgcagtgagctgagattgtgccattgcatttcagcctggcgatagagtgagactttgtctcaaaaaaaaaaaaaaaaaaaaaagaaagaaaagaaaacatattttagagtagggcttttaattgatattttagtccttctttaaatggcaaatataaaatagattttcttgctcttattattttatcctaaagtgattttcatggaattttgtctataagaaattgaaataaattttatgctgtataattatgtcagaatttgacacaataaagatatttttcagttctatgattgggttaactgtttctaggcttgagggagaattttgcttgtaaaccgtattaatttggtagatcgcattctactgtagtcttgtcacatttgttgactttctgtaaaaagtggctgtattagtctgtttctgcattgctataaagaaatacctgagacttggtaatttataaaagaaaagaggtttaattggctcagagttctgcaagctgtaacagaagtatggcactaacatctgatggcttttggtgaggcctcaggaagcttacagtcataacagaaggcaaagctggagcaggcacatcacgtggtaagagcaggaggaagagagagggaggcagatgccgtatgtttttaaacagccagctctcatgagaagtcagagccagaatccactcatcaccaaggggatggtgccaagccattcatgagggacccacccctgtcatcaagtcagctcccactaggtcccacctcccacactggaggtcacatttcaatgtgagatttggaggcagccaacatccagaccacatgagtggctttctgattactttctgccttctttttttcttttttagtatatccactttactgtttgtatgtgttaaagcggtggtccccaacctttt

SEQ ID NO: 33429 - DNA, 1064 bp, Homo sapiens
caggggctacaccatttctaagtcttaagtaaaaataggagtatatgagtaaagaaggagccataaaattcaagctggtgtgtaggaccccagtgactagcttctgacccagtggccaagagacctaaacacataaaggtcacttcctgactctagagctcaatgaggctgcagaaatgagatgcctttctgagagaatccaggagaagtactgtgtaatactggttcactgcattggaaccatgcgggaaaattcataaagcatgaaatgcgtgggagcaaatgcctctttgtgttcctagttagtgccactttacgttagaccttaccgcctcatgcccagattttttctattagtcactttcattttgcattctctctccctacaaattatctgccagaatcatttttattcaaatctgattcctaaactcatgtttaaactttatcagtggcttgatccatctgaagggacagtggttctcaagtgtggctttgggaccggtagtgtgaacatcatctgggaattgttagaaatgcagactctctggcccagaccagatctgctaaataagaatctggaggggtggggtcctccagttaattctgaggcactaacaactcgttgaaagccagtgctttagctaagatagttataaacatagctgggctttcagcatcctactcagtacaggccagccagattccagacttgtatttcctgctttcctctatcaccagaacctccatttcatatgtgaacctccaaatctcagacaggtttcagtcaatttaagaagtgtattttgccaaagttaactacatgcacccatgacacaacttcaggagattctgatgacatgtgcccaaggtggttggagcacagcttggctttagacattttagggagacatgagacatcagtcaacacatgtaagatgaacattgattcggtccagaaacgcaggacaacttgaagtagaagagggacaactcgaagtggggaggggtcatcaaggtcataggtagataagagacaaatggttgtcttgaggcccccaaat

SEQ ID NO: 33430 - DNA, 1104 bp, Homo sapiens
tttaaattgaattgaaatcaatttattgaatgaatcatattcaaaatactttataagaaattttatcattaaggcaaatacacatggatatcagtctaaatctgatcttttttttttcccctgagattttccacaagggaagtggaggaagaaaacagtagaatataacatatacaataccggcctccagccacagtgctacttcccttaaccgtctaaggaaaataaatatatattatgttccagttcagttatctgtagcctgtagttagagatagaaaacatatcagattgggcagagtctaagattggctggcataggaaaaaacagaaacttgtataagctaaatcaagttatgtcactcgaactaccataaaatagtttgtttctgatttttcctctttaattatccccatgtgccttgcacagtatattgcatatagaatgtgttcagtttgtacttacaaaattatttgatgtatacctaaaacaatattttaaatttggaagttcataacatgatcctgaaggcactttggacaatttttgattaatgacaactaaaacttttcaaggcagaccactaaacacttaaaagcggggaagaaacaataagattgtgaacacttgcggggtaaaatcaaaaagcaagtcaagagcataggggtggcgaaacagagcttgctgaagggtaaggctagccagtcatcacagcacgagcaaaccagactgaggactgaatcatgtgacacttgagatccttgcgatagagtctttggagcctgggcatgacacaaccagcttgctatgttgacaaccccagtgcattgagacaatgtattggtgaggtgctgatgttgtattggtgaggtgctgatgttgtattggtgaggtgctgatgttgtattggtgaggtgctgatgttgtattggtgaggtgctgctcaccccgaccaggccatttccctgctctctttgccattggtgttaaagcagaggaagtgattatagagatatccttttaaaattcttccttaaagtaacggaatgatgtaaccaaagggcagaaacctgcaagtcccaaatcattcctgaaaatggaat

SEQ ID NO: 33431 - DNA, 1015 bp, Homo sapiens
atctcactgctgtattccagcctgcatgataaagtgagacactctcaaaaaaaaaaaaaaaaaaaaaagaaagacattgtaatgattaaatatttagaaaaaaatcacatacactgtacattctgtatggattacaattatttctagtattgaaaaggtaataaccaactctttaacatgataatataactgaacctgatttaatttgtttttttctttggataagggagtggaggattacaatttctcagtggtctacttggtcacatatatttgttaaaagccattgtatgactgaaacaatcttagtgccggggtgtacacagtaattgaacacactccctgctttccagatactcagaatttaatttcaagaaaggcacagcaacaagaatttcaggagcaaaagggtatggtactaataacgcttgggctgtttggaggaatcttcagaggaaatggttaaagagactcttagcaaatgaatttctatgtgattttcatgtggactctagggcaaaggacattcccagaagggatggcaacaagcacaagtttgaagtgtatgaaatggcattactctttctaggtagcacaagggattagatgtggctgaagcatagattgttttgaagacattaacaagatctaagtttctaatctaaagacaggccatgttgtgatcatgaaatggcctgtagactctcctatggtcttggatttctatcctgaagaccccaagtcattgaaagaaagggaaagcagtgtgatttaaaaaaaaaagaaaaaaatctaattgagtttcagaaacaccattctggtttttaccacattgtatatcatcgtatgtctttgtagtatggtacctgacacattgtcaaattaatctaaggatcattctaattgcctttaagtatagtaatttgttcatagttcattactaatcccctccatctataatctgaatacctttcccatcaatcttgccttctccaaaactttcttttctccttta

SEQ ID NO: 33432 - DNA, 1039 bp, Homo sapiens
ggagtatctgtatcttgttcattcattaaatatttattaaaaaccttgtagtgctacttctcttctggatgtttaggacatattaataaacaaaatgatccatgatacctgccctcatagagtttaatttatggccagaagagatagacaaaaacagtaacataataaatattttttataataaatatatattttttgagatggagtctcgctctgtcccccgggctggagtgcagcggcgagatctcagtccactgcgagctccgccttccaggttcatgccattctcctgcctcagcctcctgagtagctgggactacaggtgcccgccactagacccggctaattttttgtattttttggtagagatggggtttcattctattagccaggatggtcttgatctcctgacctcgtgatcggcctgcctcggcctcccagagtgctgggattacaggcgtgagccaccgtgcccggccaataaattttgtaatatattagaacacgttaagttctatgggaagaaaaaagaaagacggaatgaggagggtagggatggttggtttcaatttcaaatagatagctagataagccttactaagaaggtaagatgaacaaatacagagagatacagatgcctggggatggactaaaaagacagccagtgtagggccttcaaaacaagttgccactagtaccccaaatgctgaggaccttgcactttgtaggagtatttgaaagtatattgaaataaagagcaaggggtcactggccttctgctcagacgcatagactttagcaaaggagagctgaaggaattgtgttccccttcagtacccatggagaatgtgtcctctgttgtgtaagaaagaattggatgagatattatactgagtcaatgtttgtaccataacaccttatttttccttagacagacagtaaagcaaccactaagggtgcttaggcagccccacttactgttttgtttactgtaacttttagtgttcaccaaacacatcttcaagggcattttaaatag

SEQ ID NO: 33433 - DNA, 1107 bp, Homo sapiens
aaaatagatatcttatagttatttgatttgattctgccattcatcgactatcgcactttttttttttttttttttttttttgcacaaatacacgttctaatgtcggtccatgtgctggagatacaggcataagcaacagcagggttgactagctgtggatagtggtacatgattagaagcctaaatgtgtaagtcaggaaactaataaatcctgcctgccttgcctgccttttcttccttcattttctttcttttctttctttttttctttcattctttcttttttccattatttttgatgcattatacttgtacatattttgagatacatctgaaattttgttacatgcatagaatgtacaataatcaattcagggtgtttagggtatccatcaccctgaagagagggtgttcctctcttctagctattttaaaagtacagtacactgttgttagctactaacacttatactcttctatcaaaggttaggatttattccatctatctaattgtatgtttgtacccattaaccagcctctctcttcatcccccaatccactcatacacccttcccagtctctgatatctatcattccactctccattacttcgtggggtcaacatttttagctcccacatataaatgagaacatgtagtattttctttatccctggcttatttcacttgacgtaatgatctccatttttattttattttatccatgttgctgcaaatgacatgatttcattttttatggccaaatagtattccattgtgtatgtatacgcaatttatcctttcataaccctgtattgctgataatcacttagatcttcataaaacttttttttttcttgagattaagtctcactctgtcacccaggctggagggcaccgacagcatcacggctcacagcaccctcaacctcctgggcttaagcagtctttccatttcagcctcctgagtagctagggctacaggcatgtgccactgtgctaagctaatttttatatttatttttttgtagagacaagatctcactatgttgctcaggctggtctgaaactcctaggctcaagctaccctccctctccagcctcccaa

SEQ ID NO: 33434 - DNA, 1025 bp, Homo sapiens
cccacctcggcctcccaaagtgctgggattacaggcgtgagcacccacgtctggcctgaaatacttatttctatgtgactcttcttgatcccctttctcctatcttcatggagccagtttcctgaaaagaagtaccttgaagcaagatatctgtagactaattctgcatttgcccttgtaatccaaagtttctcaacctaggcactatttatttttgttgttgttgttgttttggagacagagtctttctctgccacccaggctagagtgcagcggtatgaccatggctactgcagcctcgaacttgctgattcaagcaattctcccatctcggcctcccaagtagctggaacgacaagcacgcaccactatgccctgctaaattttaaaatatttttgtagagatgggagcctccctctcttgtccaggctggtctccaattcctgggctcaagctatccgcctgcctcgtgctcccaaagtgttgagattacaggcatgagccatcactccgggccactcttgatattttggaccaaataattcttgtatatgagaagctgtcctgtatagataccagtagcatccctcaattgtaacaataaaaaatgtctccagaaattgccaaatatcctctgaggggcaaaataacacctggttatgaaccactgttaaaatctgaagttattgaggtatgaaagactgttaataaattacgctgtaacagatatagtgttggatgatgtattagggttctctagaggggcagtactaatagcatatatggatatatgaaagggagtttattaaggagaagtgactcacacagtcacaaggtaaagtcccatgataggctgtctgcaagtcgagaagcaaggaagccagtggtggatcagtccaagtcccaaaacctcaaaagtcaggaagctgacaatgcagccttcagtctgtggccaaaggcctgagagcccctgactatccactggtgtaggtacaagagtcttaaagctgaagaacttggagtc

SEQ ID NO: 33435 - DNA, 1752 bp, Homo sapiens
tgggcagtcctgggcagctctgaagtgggacagtatgaaaggaaggccctgggctttgtccctatgagtacctattgtgtcacataaacaatagtgtgttaatggggtgctgaaaaagtctcctgcttaagcaactcagtttgtttatgattatgaatgtcagcagaggtctataaatgacaatgcagtttgtgttttgatgattgtctctctgatgggggtgttgatagcttttcttagttcttgtctcagcatttattcttgattggcatatgacagtcatattcttgggttctgttggtgtttttaaatcatgcacatgcttgaatttctcttacagagcgagaatgacattatatctgctgcttgttaaatagattctcagtttatgctggcaaagtgtcagtgctgtatgtctctatgtatgcaatttttcttttgtacagtcatttttctcttagcattctaaagattgattgaactcttgtgttatagcagtacttaatgtgtcacttactgaacttaaaatcatcactgtaactcaatgcataacgctattcatcatccattgaacctgtcactcctgctgattgtgcagaataaaagcctcttctcacctttttttttattataacagatatagtttgtgcattttttcttcatgttttaactgatattttgtcatcagttctctgatgtttatcaagagttaactttttttccaacccagattaatacaggttagagagtagaggagtttgttaatacgtaacaactactaatcactaaggctagatttattacatataaatatgtcaaattagataaacgctacttaaaattttggctgttggaaaaatattaacttgtaccttcaaatttattagggctcaaggcatattaaactttatagcagactttggatgttttatcttttaagaaatatttgaggccggatgtagtggctcacgcctgtaatcccagcactttgggaggccgaggcaggcagatcacgaggtcaggagattgagatcaccctggctcaacatggtgaaatcccatctctactgaaaatacaaaaattagctgggcatggtggcatgcacctatagtcccagctactcgggaggctgaggtgggagaatcgcttgaacctgggaggcagaggttgccatgagccgagagtgcgtcactgcaatccagcctgaaaactgagtgagactccatctaaaaataatgataataataatttgacttagtgaacaaatttgcagtaaaacagaaaaaataatatagattacacacctttataaaatctgttgtataatcatctagagatgcaatttgaatgcagcagtataacggagaagcatcagatgaattctcagagtatatcaatcttgcctttgttctagattagagcctggtttttagctagaggtgctgtagtaggaaaaacaggtttgtattgattcagattgtgtgtgcattcatagcagatgtggaatgacatatttctgccagataattatcacttagcaaagggtaaaacattagaacatcatgaaagttaaagttttaacttcacaggaaaaaaaggagctttactttaaagcatgatgaaaattatagaatttatgcataactcagttattttgttctgaactttaagaagaaactttcagaagacatccctaaaaaagcaagtataatgaccatagtatgaaacttaattgtgatataataaagctt

SEQ ID NO: 33436 - DNA, 1036 bp, Homo sapiens
agaggtaagtcgtttgtcattttggctagatcttcccctaggaacttctaaatggtttcatgacctcatttcatcctagacaaatgcaagagggctttaatatgagaagagcctcaggaatccaacttgtagatataagcctctcttttaacaggttacttagtaaattagttttctttgtactgtgattcattaagaacaataactttgatttcattttatactttacaggaagcatagaatgactcaatagtagaaaaatacaataacatttttaaaaattatgtaaattaaataaaatggtatacgttaaaattgtgaaaattgtgtaaattacataaaaaatatatgtgattaaattaaaaccaggatttgtggggtggctgaattagatttcttaataaaatttatgaaaaactgtgcatggtacatactattctttcagaagcaataacagttgtaagagattattttttaaaaaatagataccatttattgagagcttactaggtgtcagccagtgctgtatccacattacatgtatgaattcatttaatttttaaagtcaacctgtgacttaccctgtgagctcactatgtgagccatcacccttgttttgcaaacaaacaaattgagggggagaaatgaatccatattcttattttatatcagccatatctctcaacaaacgctaatcagagctgattaacaaattataatcagcatgttcaatatttgatatttcatttaccttgcaggacatcctttgttttacagaattttttaaaaaccttagtagaatttttcttttttaactattattaaggctccttaggtgagtggttttcaaacgatatcctaaaggtctccagaaatttcttagagaatctcatatcttcttcaaccagattcacttgaggtatagtcatttcatatattaggttttattagagcttttccctccttctcttgctctgcctcgcatccatccatccacccgtccacccatctacccatccatcaatgaacttaattt

SEQ ID NO: 33437 - DNA, 1995 bp, Homo sapiens
gaggagagaatgggctttgaggatggttgcctctttttcactgctgcacctcctcattatctctccaggaagcaggttgattctggccggcaaagctccctgaggtgggatccattcagtccattcttacaggggtaatagggcttggggctcatttcagtcagccttcgttggaagagagaggtccctttcctttccttttgaagattgattagtttccaaagaaagacagataacaccactctcattctcactttctctcttttttctgttcttgaaaactcaatagttgtgtacaataagaagtcttgctagacaaattgtgcctatgctttatgttctgtaaacatgattcttgaagctgagaaacttttaatggaaccctttagctaagctgaaattacttacataatccaactctgtattagttttcctggtttttgaaatagtgtcacaaaatagcaaaaaaaaaaaaaaagaaaaaaaagaaagaaaaaagagaaagaatgggaagtagagaatttctaacacagtcatctaacagactgactcagatgtaacaagaaagtataataataataaaatttaaaaaaaaagattaacagaaaacaaaacaaaacaaaaaaaagagaaagttctcagtagccctctggaaagagaaatttctaagcacaacttttttttgttaaagataattgaaaataattatatgtgtgtttggtaaaccacaacgatctttctatattgttaacacctaaagtaggtgaagaggttaatgaggaggtttcccagcaacaaatttaattgtagtcatgtaaaaattacataaactcaacataaaatttgaacacctgtgcaggaatctgaaaaaatttcattctaagtaattcttataatttggactctcagtctagtggtgagaatttgaaaaagtaaagaatgctcatgataaagtttgacaggtgctctgaaagcagtaaatatgaggaattaaggcaacctctacttttgacatcgtttgctctgaggaagtattgtatatcctgactttaattttttcaggaccctgtgcacttacaggatgacagaaatgatatttcttctctcctgaaaccctggggttgatatttacatatcacactcagacatacaaaaaatactattctgctttatttatcaataacaagaccctgtcctcaatgatggagacagaaaacaactttgctaagttaagctatttcagccactacttctggtttttattgctttatttcagaggaattcaattgcagttgactaaatcctcagtcaatttaaagttcatatttcatgtgaggaatgtttttctctaagtgagtccacattcctttctctttctttcccaagatggtccagggaacagggctgaattcccatgttctcatgatgagagaggaagttccttctggtttgtgtgctgtctctgtcctcattgatgtcctctgggatatagttgcctggtatcttgtgttcttgcccaccgaggtctggccattacagggttgtaatgctcatacatgctgttgaggcagaggttccttttcctctggtttttgagatttccatagcaggggtcggtaaactacagcatacaaggaaaacccagctgctgtgggctaaatccagccatttagcttgttggctaaggctgtcagttttcgttctacaacagcagttgtgagtacttgcaacaaagactgtatgtcctgcaaagtctaaaatatttactctcaggccccttacggaaaacgtttgccagcccctgatctctctgagtccttggattgtccactctttgtttgtccttcctcttggcatgtttcatcttttccagagcacacaggaaccactgggtctcctgcacagaaactcagggcagacagagtcactgtctagggacctccccatccctctcctatgtcactgctttggcatcatgctgtatataaaaaggta

SEQ ID NO: 33438 - DNA, 1025 bp, Homo sapiens
gctgtcatctgtgagagacagtgtgtgtagtggctaaaccaatacaatttaaactgcctaagtgtgaatcttggctcagccacttttggattgtgagtcattagcatcacttccctgtgcctcattttccccatttgtgtgaaagtgggttttagaataatgcctacttgatgaaggtacagggaaaattatatgcgatgatacatgcagggtgtctggaggaatgaacaccagatatgaagagagtccttgtatgtgtttgctaggattgctatatcaaagtactatgaagtgcatggcttaataatagaaatttattgagttactttttcctagcctgcttattatttgtgtgaagagaaggacttcttaatgaatacatgaagcaaaattgttctttaatcttttgctttcagttttacccttactgctttttgtgtttggactttttatctagattgtcatttctgttctttggcatttaaatggcctgctttaagcagtccagacctttctttgttgtctgagactcaatagtttcctgctgaccatctatctgataagttgagtcttttgctaattgtgatctcatagcctactccttcaactttcttcttatcccttctcccaatttttccaatctgtattctttttcctcttctctccttctcttccctttctccttctttccttcctttcccttccctttgtccctatttactgctttgtcacttattttcctgtttcttctgcagcagtaaacaggaaatgcagcttcagtttgctgctacatgttgttataataatactctgaagaaattaatgcatggtttcttcgctgtgacaatataaacttattaaaggcttacgttcactcgatacattgatcatttttctgataactctaaaaaccacaaatgtcaataagtcacagagttgaaacctgtcaacatcactacagttgttagatttgttgtttagccttttttattattgctttttttttcttccttatagctcattga

SEQ ID NO: 33439 - DNA, 1028 bp, Homo sapiens
attaaataggataacagatactacaaagcacttcctaagcctgaaagtgctgtgttgtataaatgatttagtagttcactgcttctcaaagctgattatctactagtttgttctgcataagaaactgaaggctgcttccctggagtttcttccagggaatgctgcgttgttttcatggggtaaaccacacacatcttccttttcttctacaattttgcaaggcagttataaattgtcataatcttctctgtcaagatgagcatttcaggtgtatatacctgttttatacataatatagttttaaatatcttgcagttgccaataatatcctctgattattcctgttttaattttttaaattgagactatttttagagcagtttacatttacagaaaaatagaacagtaagtgcagagagctcccatatacccactgtcctcccacacacggcttcaagtttgttttttaatcacatgtggttgtcggaattgtacacattatcccagatgtgatctagaactaactttctgtgatgctaagtagagggagaagtcaaagatgatacccatggtgtgcagtgccattgggatgtcagtcatttactcatttcagtctccaggaaaaagtacagacgagtgagtagagaatgatttcagtttttatatattatgtttgaggcatctgtgagatacccatgaagtcaggtacatgaggtacctagtgtgagattgtggctctcaggaaagaaagctcttaacagatgaagtgatggtggagttattagtgcaaagacagctgagatccctgaaaagtggggttgagcaagagaacaaagaggacccaagagagggcatagaaaaaactgaaggaacaacagaagatggagatgtttcaagaaaaatcagagttgtatttgtttggtttggttctctgcagaggcaaaatgaggaaaagggtctttgcatttgatttggccttactggcttcagtggtcttagcagagcattaacatcacagactgaagctg

SEQ ID NO: 33440 - DNA, 1033 bp, Homo sapiens
aacaggtatcctaaaggtaactgagcagataaaaggaaaagacaggaagttggtcctggaagtatgggcagcatgaatacgtaccatgctagagtcatatagctgggaagacatggaacccaaatttgaaccaaagactcaaaaggctcctaagtcttactcttcccccaacactatttttcagttgttttcagtgcacctaagaaaattaagtggcagtcatttattaagccagaataaaaaacaaagttgatttatctgcatgaaacttgaattacatcaactagcttaatttttttgttggagtaaaaacaaagctatggaaacagatgaattcatcgcttatttaaaaaaccagctcttgaaaatttcatgtttgttatatttattgttgtagtactttgtaagttgtctatattcagttatttaactgagtatattacctattcagcctaaagaaataaaaggaatatagtattattgtgataagggagaaaatttatttatctaggtacaaggaataacatgggatgttaattttaacatgtgcattacccaactaatatagcttttgtttcctttatcacatttttccatacttcctaccctacacaatttgcctcgagtatttaaatgtggaaaaataacggggtaataaggtaacatattttttcaattaaagcgtggtaaaggattttgaattttttaataaagaattttacttttttagtattaaacaacaaaatattgagatacctaagaaggtaatataagttgaagtactttataagctttaaatagtgtatagctgtaagatgatactgctattaaaaaaataagtaatactatttatataaaattctcaaatttctcgagatatatctaaattattttcattataatagtgcatttaataatcatatcaaattacatttatatccaaagcttgttggttaaacaaatacatgtttaaaatagttgagcttgtgaaaatgaagtttggctctatttaatcttttgggatccagatgca

SEQ ID NO: 33441 - DNA, 1033 bp, Homo sapiens
cagcacatctactagcaacaccttttttaaaaatttttttgttttgttaaatatggaaatatccaagcttctccctcaatgttttggaggatagtatttttctgaatgtagaatccttgcatgacatcttccctcccacccttgaagaatttcaaatatgttatttcattgccttttgacctccatggtttcggatgagaagtaaactattaatattcttgaagatcccttgtgaatgatggtccgcttttttcttactgctttcaagagcctctccttgcctttgtctttcagcagattgtctatgatgggtctgtgtgtggacttcattgatttcatcttacttggagtttgttgagcttcttggatgtatagatttatatttttcatcaaattttggaagttttcagccagtatttatttaaatatttttattctattttttcctctcctctacttactgaattccctttatgcatatttttgctcagtaatggtgttcagcagatctcaaagattaatgaattttgactgaatatttatataagtgtgcagtggaagaaggaaatattttgtttcagataataaaaagtctttatactggctgtgcgcggtggcccgcgcctgtaatcccagcactttgggaggccgaggcgggcggatcacgaggtcaggagacagagaccatcctggctaacacggtgaaaccccgtctctactaaaaatacaaaaaattagctgggcgtggtggcgggcgcctgtagtcccagctactcaggaggctgaggcaggagaattgtgtgaagccaggaggcggagcttgcagtaagcccagatcgcaccactgcgctccagcctgggtgacagagggagactccgtctcaaaaaaaaaaaaaaaaaaaaaaaggctttataaatatttagaatgctgggaggtacagcttggagaagtgaatatttaatgttaaaatgtgtcgttattataattatagcagatataattttgatcacttaactaattttttcaatatta

SEQ ID NO: 33442 - DNA, 1099 bp, Homo sapiens
tgatattcaggtgtaactgtcttgtgggttttactgtagttgtggtaggtttcctaataagtgaaattccttgtctccaggcttaggggtcacacaaacctatgttaaaatcctgtcaaaagcagtaacttgggaagcttcatcaactgtaaacagagaacattttgaccgtatcacagtattcattttagaattagtagtaatgcagcagtggatagcccagtgcagtatcggtgcaataaatccttgctattgccactgtcatttttataactttcttttaaaaacatagtgcttgcttttaaattccatttttaagataaaaattctttaaagttttcttggcctgccagtttcacaattctccacctctacctcccactgcattgcaacaccatttaattgtcagatccacctattccaggaagctttctcaaatacttcagggctacagatctctgcatgtgctgcccaatgcctttttctctgttacatactttgcgacttaattgcattctgtctagaaaccctaacccatactttctttgtatttataataatatcagaccttttatttgtatacataataagtgtcttctcaatatctcatgcatcaaatggagccgcaatggggtgattcagctgagccctagctgcactgatcagtcctgtcctgctaacaatcatgtcagtttctgccattcccctcacccctctcctggccattaattcagagaggtctgcacccaaccctgttattaaattatctgctattaaaatgataaattggtttctacttcagtaattgaatgtgcttgcagactattctttccagtcttgtttttatattaatgtgttaccttaaatggagatgtttcttacatgagcatcatattttcaagaattcattattttatgaatttggatccatttaaaaagaatcttaagtgatctttaaaaatcaaatgaattttccacaaatacaaactctgtagggatgctcattaaagaagacgtttaaaaggatatatagagggtcagaaaactgaacgagaattaggcctgtctcctctttgttagacattgtcatttctgcttc

SEQ ID NO: 33443 - DNA, 1032 bp, Homo sapiens
gggaatgacatagccccagctgttgggaaggggaaggctgcagagcctaggagcaggtaaagtctggagcaaacacctctgccgtttttattcatctacacactctttgaggcttttttttttttgtctttgaagtggaaaattataagcgattagaaaacatggaattggcgaagacagaatagtagaaacactactaaatggtttttaggaggcattgtaaacagattcaaattttcttgaatgcaaagttttcctcctcatttcttattactttcttatttttgtgtcttctatctctctttgctttctctttgttctgtagccttctctgaacactgtttctgtcatcgaggcttttaaatatatattgttaaatattattaacttgatgtaattaagcaaaggaaggaagtcagtctaaatcaatggcaaactggagaaataagcaattttttaggaaatgaaggattaatactcttagggatatactgaaactattgaaagcagtaacacactacatcactaaggaagtggaaggctgccttaactcctacataagcacattttggaaatttattgtttgaaataatttgttgtgctacagacctttactgtttaaatagactagtatttattttttttacgaattgcttagcaaaaaaacattgaggatattgagatataaatgcaattcttcgttgcttaaaacttggtgctaataaggtcaagaccacacactaaatctccgtatctgccggttctctctctctctgttgcgtggccacaaatgtatgaacaagaaactcagatcataagcagcagtgggggagaggatgtggatgagtctgtccaatatgccttctcatattggaaaatggctctgttttcatctgatatgcacctgtggttagtagcttcgtatttctttgtgagcatcagttatcctagaattttaaagataattttaataccatcattgttgctttaataatttattttatttgctatttcaactctactatgtggtaa

SEQ ID NO: 33444 - DNA, 1056 bp, Homo sapiens
taatgccactctacggaaatgtaattgggcatattttccaactgtaactatcccgtgtttatttcttaaccaatatcctaaatagacatgcatgcacaaggtacataaagtagaatgtaaatagtcaaacatgctatgaatgaagccataaatttgtagtaaatgttgaataaaacaaaatgtacagtaatatgttaaattatgaaattatttatcaacttgtctatagagtagtgcattctctatgtcatctctaccaggtagctgtcctgcataagcatagtacaagacgttttctctatgttaatatataaaatgatcaatcaattttgtatctaaaaattctaacttttctttttaattctacagcactctcaacaataacaacattactagactttctgtggcaagtttcaaccatatgcctaaacttaggactttgtaagtagtcacaatatatgtaaaagtcatattaatcaattaaagcttccccttaaatagcatgttcagtaagcaaaggacaggaccactggtttacaaggtagacaaggaaaacccaactttggaaaagactagatatgatatttgtgggaatgagctattattctagaaactggaaagatttcttttaactgatatgcattatggaaactttggagttaaaaaaaaacaacatttactttgagctattgtggaggtcacatttcattaagaaatggaagactccttgattggctgtcagaaatgataaatgggaaatctttatgattttattactgtactgcaagcagacctaataaagctaaactggttcttcaacattccttataacgtgaaattatagcatcaccctctagtacttctataattaagattgtgtcagcatttatatttaaaaatatctttctgggttacagatggacattaagatatttttggtctaataaagtattgactacagctgtttcttttctcttgaagaaaaagtaatccttaaagcccagagtagcctttaaaatctttaaagcccagggtggactttaagttatagaatat

SEQ ID NO: 33445 - DNA, 1078 bp, Homo sapiens
agtgaagaaaggataacataaagtcaaatgtaaagattttttatatagtgcatgttttagcctatttgaagcagtgtctacctccattaaaagttaaattcttatgacaaactattgcacacgtattttgtatgcagctgctgaatgcatttctatgtcctcaccaaatataagtcatgtggataaaacaaggtcacataagatgtaaaatggaatgcttttaccatcttgaaaagtaagcactagggaaaattgttacctcaatattcattgacaaaaccccttttaaccacccagcccattatattattatgttataggccaattctaaattgtaactaaataaattatcttggatttttggttgaaataataggaacaacttcttagaataggcctacatagtatgcgaaaaagttgtttttaaagcgctcatttttaaccaatttatttaattatgataataaagtaacttatctaatgtaccttatatgagaataattttagttcacaggactcactgccattagtttaaagtatctaccatgtgcttaataatgtgcttagagctttgcagtataagacatgaacctctgcaggaattctagactctgtgaagatttgacactgaataacatataaacataataatatcattctcatcaaaattttaattgatagaacattactttacctctagaagacatcttttagtattttttggctgaaccttgaaagaagaataagttataacttgggaagagacagatgacattactgaaaaagaaacattggcagcaaagaacagaggtggcagtaagcattgtttgagagattgtagttgaacctaattagaataacaggataatgttgaggcatcgtgaaatataatgccctaaagaatacatctccatttgattttaaaactacagattactgaagatgttgacacttgatgggaagatattagatgtgataaagtaaagagtagaacgaaatactaaattttctcataagggaactatatagtcatctatgcaggcacaaacatttattaagtgactatttactacctaaa

SEQ ID NO: 33446 - DNA, 1082 bp, Homo sapiens
gtctagaatgctaaaaattcattaaatttccctgttctgcatacttacttggatttccactctttaaatatttctgagattttttttttttctattctcggctgaccaactcagcatttaataggtaccctattatggagctatattaatttaatcatcttacagatgtcttagacatctttctctacagtcatattccctctctaatgaagcctgtagacatttaactcaaatctttcaaagactgagaactttgttgtttaaaaaaaacttgggaaaaaaaaaaacaggctcaaaaaacttagaaattttgtaaaaaccttcaattgtgaagtggctaaaatggcttcaatcatacatttgcttgactctcaagcccatggtcctaacttgatcaagctataaaagaggtaggcatagcttggtcttgttggaatgtcattaaaggaaaaattttcaaaatcatgaagagagaatgactaatactccgacaaaaaggacaagagaaattttaagaaacttacctatgaagagaacgtagacaaggcattaagatacaggattgtttgcaaaactaagagctgttttatattactttatatctgtaactattacaatgtcatctttcctattctccgttaaatgttctcttatttccccgaatcttctccacacagcacttaccacagtttaacttgttatttgaaaatgaaaaactctcctattaaactgcagactgggtaaaggtagaccatgactttccctcaccatttctgccccaatacttagcataccatgggtggggaagacagtgttgggagcaggggaaggagatcttggacacacaatctagagagcttgcaggcctccattctttatactaaaacaaaacaaaacaaaacaaaaaacgggcgtgctggatcacgcctgtaatctcagcacttttagaggccgaggcgggcagatcacgaggtcaagagatcaacaccatcctggccaaaatggtgaaaccctgtctctactaaaaatacaaaaaattagccaggcgtggcagtgcgtgcctgtagtcccagctacttggg

SEQ ID NO: 33447 - DNA, 1030 bp, Homo sapiens
gtctctactgaaaatacaaaaattagtcagtcagacatggtggtgcatgcctgtaatcccagctactcggagagttgaggcacgagaatctcttgaacccgggagacgaatgttgtagtgagccaagattgcaccactgcactccagcctgggcaaccaagtgagtctctgtctcaaaaaaataaataaataaaaatttcaagttattagatcaccaaatttcatctcttagagataagtggacttgatttacctaatgttttttaaggcctctcctactaagaaatcctatacttttttttattaacattatcatttatttttattacgtattatataaaattataatgttatactaatatattgttacatagtataatatgcaatatattaacaaaacaaaaaacattcatgtcgttttcagggattttaaaatttctttcaatgtgacatcaacaagatttctataatatttagtaacaatttcttaagaattcagcatactagtatttttagcattgtctgtaaacagtttttattgttttctgcttattacttggaaacttccttctatagtaacaaaacgttttaagtgtagtatcattgtagcatactgctaagcatatgacctttaggacactaggtggctgtgttcaaatcctggctctagtacttactagttagaggctgagctagttactaaattccctgggtattagttcttccatctctaaaatgaggataaagttacttccctgctggctttgttacggagtaaacatcaagaaataatatgtatggccatggcaaattcatctcttgatagaaagcaatttgtatgtttctggatctcaattatcccagagaatctttctttatgccaaaggtcctcaatatatgatttttctcttttcccattcttttcattagccctttgtaaactattttaattcacttactctaatttccttatttccttaactagctcccaaattccacaggggtctacagtggaagactttaacactgt

SEQ ID NO: 33448 - DNA, 1028 bp, Homo sapiens
cccggagcacattccccagtacactgcagagttgtaagttcatcccccaacaaaattctggttgggatggagggaatgaaagcattaaagcataagaatgtttgtcttgccatttttattattaataattgcattaattttaattaatatgcattacattggcataactctattttgtacaagaatatattagaggctaccttcattcatctttctagccaaccatacgattaagtacagaaactaatttatctctcaaaattcagtaagcacttcatactaataacaatggtatttatttgatgcttatttattgggtattatttattcccaatttgttttctaagtacttagtttttaacgtatttaattcttatagcaactaaataaagtagtttgagagcctccattttcaatctctgtaaactatcaatagattcaaggagtctgtcttacctaatttactacttcattgacttacgggcagaaggattcagtggttatcaagtattaaagtagaaaggatagctttttctgaacaatgcaagaaaagctgaaaaggcagaatatgatggtatttacacttaacagccttaacataggaccttgcacatactaagtgctaaggtgtttgttggagcacttacagattctatgcccatgcatggtttgcctttactgactttatttataagaagaggacctttaatgttagtgttctaacaattcagggaaaaaactagcaaaacctcatcattctctaaacatcttagccatgtttatatatagcaccatctggtatttgtcatttactgctttgcaaagttcgttgtctgtttgtttgtatataatccttccatctttaactagattatagctccttgatgacagggattgtgtgttattgtttatctctcactgtgcctatactcatgcctgtacttaattaatttttagcaatttgaataactaaaaataaagtaatgcctttcaaagagttgacagaaacccactatcttgtagttata

SEQ ID NO: 33449 - DNA, 1050 bp, Homo sapiens
cagtgaattatttttcatagtgatatgatcaataatgtagcttaattccaaattttagaattattataacttgatagtgctgcatataaaagaaatgttatagatttttgccagtgttctcacattggagtattttcagtataagtattataaaaggagaattgatagagttattgccaacaaacttgctcaaaaggatcagctgggcacagtggctcacgtctgtaattccagcactttgggaggttgaggcgggcggattacttgatcaaggtcaggcgttcgagaccagcctggccaacatggcgaatccctgtgtttactaaaaatacaaaaaaaaattaaccaggcatggtgacaggtgcctgtagtcccagctactcgggagggtgaggcaggagaattgcttgaactggggaggcggaggtggcagtgatccaagatcgcatcactgcactccagcctgtatgacagagcgagactccatctcaaggaaaaaaaaaaaaagaatcatttgaaatgacagtagatatattaggatgaccagatcaaaaataaaagctgtttactagagggggtctactatgatattagcaaaatattgaagaaataggttgagctgatccaagagaatattttttgtagacagcttaaaaataaagagtatttgtaggcctatagacagaattcaagaaaagtaaataaataaataaataaaatttaaaagtaaaaaaagccacacacctccaaacaatgtatttcaggtctcttatatgtcagtatctaaaaagcagcatttgaaattattaattatctaactgataagatttctcagtaacggtggcatgcaaatctactaatctaacttaaaaggaggggaataaagatagagaaaaaagttcatagctcaagtcagtgaagaaataatttgagagaagcatccatccatcaggaaagtacttaatcctctttttgcataaaatgtgacattttacatcgagtggctaatttgcacatattaaagatggcatgtttataaataatgagatt

SEQ ID NO: 33450 - DNA, 1030 bp, Homo sapiens
caatggtaaaatataaggtatctttcacatttatttgttcctataccccttttctcatggagcatcttacaagactaatggcccatggaatgcactttgggaaatgctttatatttcatttacttacagtctaggatattctgtacaggaaacttttttttttacctctgtgacccctaggagaaaattttaccacatgggataaataactatctggtatatggaagaaactagcataatctcttcccttaagaagagatgctgcttttggaggcttgaatcaaagtcctttagatcctaaagggtatgggaccaattatccttgacattttcataactgatatttaaccacaaattatatggccaggatatacacatctcgaccttcttctgcactgcccacgctcccttggctgcctcatgctacagttgcagaatggaattcattagagaatatgctgccagaataatgatgcttccatgccccattcattccattcctttgtctctaaactgtcatattctggatatgcttgttctgaatacaattgagtcactttgcctgtttattttttatctatgtggaactatggatcaataatgatttaaacccaaatgtaatttatgcagatgtgtatcagttatttgtgcagatgcacacacatattccaaatgagcaggtttgacaaacttttgacagtgtgcaacataggtaatgaggttcaagggcatgtcatttcaatttttaaggatcttattttcaaatcacatgcaattctttaaaccctaagtttgatcctgaatagaacacttagaggaaaaaggcacaaacttagcacatgtgcttagaacacggctcttagatttgaactgctgttaagtgcttaggtcctctctcactaccaatcacattggttaatcaactggaaggactattttatatgtatatgtgtgtaattaaatatttaattcttatagtaatgttttttatttcagaagatcacatagggatattccgaaaccctcctct

SEQ ID NO: 33451 - DNA, 1025 bp, Homo sapiens
gatgctggacattgctattgaacaagacagtctctaccctcaaggaatgtttctattgggagaaacagacaaaaccacgatacgtgaacaatgtagacattaggaaaagtattgcgttctattaaaaaaaacaaagaataatttgtgtttgtggggggcttaggggagatccctaagatagggaaaatccaccttagggaagggacggctgacgcaccaaagttgggcaggagtaggcagcgggaagcattctaggttgtatttaggaaataagtatgttgtgttagggagacaacacacaaaaaataacaatatattgtgtgttaacactatcagttaataagatgctttaataagccttaactgctttatttttggaagtatttggccatttttggatttctgaataaaacaaattgacatatgtatgctttcagaattcttagttacaaccgtctgagatgtattcctcctcgcacctttgatggattaaagtctcttcgattactgtaagcatcttgtgttcaacagaatatctcttttctcagagatctgagtttggggttgtctttttaaggatgtaactgctttgttgattcttggtgcttgaagatacatgcattaggatttattataaattaggaaatagaaaaatcatttcttacagtatcattgtccaacagctttgctttggacaatataacttcctttttagtaatactgattgttgttatagtcatttatttgattatatgtaacattaagacatatggtttatagagtttcaattaactttgaaagaaactttcaaaattgagaaactttcaaaattaatttctttagaaattacatagtatatgaaaacatttttactgtgaaatgtcctttaaaatatgtgaaataaaacatgatccttgatcctactctcctgcctcagaatttacagtttgatgtgctctctggtcctttttcagatgcatttttttctattctaatagatgtaggcccatggctatatagctttt

SEQ ID NO: 33452 - DNA, 1072 bp, Homo sapiens
cgaatgcaatgggaatggagaaatacaaaaatataaatataaaggtatcccatgccctcaagtagtgtacttttaagaaactaaatcatattttttatctattaggttgcttattttgatatcttcccttgctgagttaattcaaagagaataaaattagtacatttattcaaatctttcttgagtttgactgattacatttaacactagaattctggtccagttattcagattgccatcctaaatttctccttcattattatcaatattaataattatttcttataaaaaacagtttgttacaagttacagtaggaataaaaatgggctgcagtatcagctccagtaccctcgccacctctttcgtacatctatgatatccagaatggactcagatttttatctatttcaaagagagaagaagctaatctagttacattagcagaaggtagcaacagtagcaagagttacgtgtgccagcaacaccatgtactgctatctaaaattattttgttgtagacatgcccaatttgaatttaaaaagctaactttggggaaaattaaagagagatactcaacatccatttagtgtaaaacaaattaatatttttaacagtgatttgagttggaaaatttcagaaatcttaatctggggacaaaatgacccacttttttgataagcaggcttccacctttttgataagcaggctttgaggactaaataagcctagatgagacatcccattgcccagatttcttggtagatagaaagcaattaatagtccagccaaggtgggcacagtagctcatgcctataatcctggcactttgggaggccgaggcaggtggatcacgaggtcaggagtttgagaccagccttgccaatatggtgaaaccttgtctctactgaaaatacaaaaaaaaaaatcagctgggcgtggtggtgcgtgcctgtaatcccagctactcaggaggctgaggcaggagattactcaaacccaggaggcggaggttacactgagctgagattgcaccactgcactttagcctgggtgacagaacaagactccgt

SEQ ID NO: 33453 - DNA, 1030 bp, Homo sapiens
ggattacaggcatgagccaccatgcctggccaaaaatcaaatcatttttgacgttgtcaacctatcttactaaggtcaggtgtatagctatgtaatggtcacaaagaagtaccatatacaatctcagtaatgattattgctattttgctactcttggagaggtaaggaatacttgacattgatgtagttttttatgttcaagttggcatgcttaatcttaaagctgttgattagagatttaacaatctggttagctaacagtttcttggaactttgtccttgttcactcctttacattatcaagtctgtggagtaattccttttagacaagggtcaactctcagttttatttttttagagatgaaattctctgtctctgttctttccctagctcaagactttctctgctggtagattaagaactgattaggagcagagtccattacattcatccttgtagctccagcctctagcacaacatcacgtagtaaatccttatggactgtgacttagattggatgaattgggttggattgtatcagagtaaataaagaataaaacatttccctttattataattttaaaacagtttcttatttaggcataaagtgaaaagtacataaaatgacatttattatgtatctcaaatggtccttctttactatcagtttttacaaactgtcttggatagatactactataaacagcctatatctccatcagatagatttggttagaaactgaaagtgatttcatcatagtaggctgataaaatatgatgaatgcatttcatcaaggtatccaacttagagtaatactatttgaaatcacaagcctttaaataaaacctgtttaaaaatagttcatcatgcatatgttgctaaaaatcttttgtatcccagaaaacttatagaagcaatatatgagacttactgtgcaattagttctttttaagagacagataaaaactaatatcatacaccagattgatgtaataactagatgaatacatttattaatttgcatcacg

SEQ ID NO: 33454 - DNA, 1785 bp, Homo sapiens
tattgtaaaattaaaaatgttaatctttttttaaatatgtttaatatttccagtaaattttacaacatagcacttttataatctcaatgatcaaatggattaggccaaactgaaaatatagggcactgtaagcaaacaaaatggggaaaaagaaaggaaggaagagggaggagagtgggtgggagggagtgaccctgctacaattaccctgttcttatttgggctgtggatgttcactatcaaggagataaaatcactatttctctggtagatcacagtgatagaacatggaacatactgcagaacagttcgattttctaggtatccattaatgtgggggctctatgagcctattctaaataagtattttaaagatggtgccattgtgtctagataaaatgcattgtttacttattttggctcagttgggtttgaaaccattacctgcttgttccaacagatgtgactgcacaccagggtacgtaggtgaacactgcgacatcgattttgacgactgccaagacaacaagtgtaaaaacggagcccactgcacagatgcagtgaacggctatacgtgcatatgccccgaaggttacaggtaaaagcagaaatgaataagacctagtgttcaataagacctagcacaacagggtgactatagtcagtaatagtgtaatcgtacattttaaaataactaaaagagtataactggattgtttgtaacacaaggataaatacttgaggggatggataccccatttaacatgatgtgattattatgcattacatgcctgtatcaaaatacctcatttaccccataaatatatacacttactaggtacccacaaaaattaaaataaaaaaattttaagacaaaaaacgtagaacttacagaagcaaagagtagaatgagggttaccaaagaggaggacagagggatggtgtttggggagatgttggtcaaagggtacaaaatgtcatttagacaggatgagtaagtttggaatatctgttgtacagcacagtgatgattttgtttaatagttaagaatacttgaaaactggaaaaacaaggaagtgcacatatataatatacagttatgttatacagctctcaattcagattggcaattaagtaaaatcgtattaactaatttttttttctccttattcttcagtggcttgttctgtgagttttctccacccatggtcctccctcgtaccagcccctgtgataattttgattgtcagaatggagctcagtgtatcgtcagaataaatgagccaatatgtcagtgtttgcctggctatcagggagaaaagtgtgaaaaattggttagtgtgaattttataaacaaagagtcttatcttcagattccttcagccaaggttcggcctcagacgaacataacacttcaggtaagagatctctctctatggagagatgatcggatcttaaaattcagcttcagagaataaacatttgtggtagcttctgaatgattgatagtatgtcttaaatagacagttaaaaacagaaaatgctccttgtgtggacagcgttagtaatttttctcttcaacatttgtattttcaagacaaaatgaaaaacaaatatttttattcattacttgataagcagacagtaaaaaaaaaaatatgtctctttgttttgtgctcagacaaaaacatttgattcatttgcttttatggctctgcagttcagcctctgcatgggggaggcttttcttaggaaatctgcagctaggaagggtgcaggcgaga

SEQ ID NO: 33455 - DNA, 1993 bp, Homo sapiens
tacttaggaagctgaggcagcaggatcacttgagtccaggaggctgaggctgcagtgagccgtaattatgtcaccgtactccagcctggctgacagagcgagactctgtctcaaaaaaaaaaaaggaatctaaaatcatgaactttactgtacttacctgttaagaggtcaagatgaggcttcatttaattccagggagatataaatggaattaatctcaatgataagtcttgtggaagttctggtgtgatcagattagacatttaaagcttttagggagagaaaagtatagtcagtctatctcactcataatctcactcataattgggaaaataaaatccaaactcagtttttaaatccatataatttatatgcattcttcaaactcttattgtaagatcattacttttattaacaattcagtgttttttagtaaatgaatcaagttttgctatcatacaaggtaatttactatagaactttattcccaggctatttgggacagaaatcatgtattaaaagcttgttagtggtgaaaacacacgccatttgtctaggaataggtattcctcaggtttttgattgtaaaagtagtgcataataattaagagcacatacacttgagctggacaacctggcttcagaactgtttagccactaactagatgtgtcaccttggatgtcctcagtgctcacctcttgttgtgaagcttacatgaggtaatacttgtaaagttcttagtacctggcccttagtatgtgatatataatcctttgctcttcctatttgcacttctcttaaaaggaagaaaaatcacctaaggtcacactaaccaaagatgacatgtctaatgagagctaggacaagctgagcaagatttatctctcagcattatccttgacgatactgccactgaaacttccaactatgttttatgaaatgaattttcagaggtcttgtcttaaacatgcttgaagtgtaatgattatctatagatatcatctaggagtattgctaaaaacaattgatatatgttattcctaatacatctctcttgtatttacttaccacatattttcagaaataaataatacatggatgatattttaaattagcttacaattagcaagagtttaagacatgtactccaaaaaagagtaaaaaggaacagaggagggaataaaggagcaataagcaaagtgagttgatgatgaaactacctacctccaagttcccatctgacacactgcattagggtgtttaaaactgtaaagtgtgttaacttaaaccacacaattgtactgcatcaaacaccatcattgatgatgacatgactgaattgactaagaccaatatgtgaccaagaatccattccttggtaatatatgggtcttttctttgcaattttaaagagaaatggggggcctcattattaagatttattaaggttgatgttgataggacatccatataaaactacttggaaagctgtgtataacctcaaagtaaaaaggaattcacttctactctctccatgtctgtctttattttaatgttttactttaaaacttttagtaacttgaacaagatgtgcccccaaagaagttgttatatttctgccagcctttaacattatcttacaatcaatatttaaaataaagctaaattctttactaaaaaagattcagaaatggtattgaattatttgtatcatgatgatcgtggttgggtgggggaccgatatgatagtgatggtgatactaatatctaacattaatttttgctatgctgggtatctttcagtcattttacatagtcctcaaattaaccatggaaggcagaaatatttattagcatttactgaagagaaaactgaaatatattagtaataaagtaacttatctaaaacaaacacttaataaatgcaggaccacgattcgaatccaggattatctgactacagagtctatatgcttaaccattagccaatgt

SEQ ID NO: 33456 - DNA, 1028 bp, Homo sapiens
ctggccaggcgtggtggctcatacctgtaatcccagcactttgggaggctgaggcgggtggatcacctgaggtcgggagttggagaccagcctgaccaatatggagaaacctggtctctactaaaattacaaaataagccaggcgtggtggtgcatgcctgtaatcccagcttctcgggaggctgaagcaggagaatcgcttgaacccaggaggcgggggttgcagtgagccaaggctgcgttcatggcactccagcctgggcgacaagagtgaaactccgtctcaaaaaaaaaaaaaaaaaattcatgtatctacttctgtttgtcaatgaagacctagcacgtgaaaagattgactcagaataattcctgattttatgatagcctattgaaactcaaatatacgtatgatgtctaaacattttcatttacaaattactctagtcaaagctgggctttttctaattgttagctttggaacaaaaaggaacagatttactaattgtttctctgtgctgtggaactttgccaatctgtatttattcttgacatgtgcacatatgtgtgttgtgcctatatcaaaatgagctattaaaaatagttttggaagaagttcatttttaaccactgaaaaaaggaccataaatatgtggtcattaaagtccttatgatggatggatatggttaaattagaaaaacttaccccagggcaaggaattttctgtcaccagtcctttcctggaaatggtaagtttcatccttttgaccctgctctagaaagcaacccacagcgagatggacatagactaaaggcctgtactcacagaacttcacagccaagagacttcattcaatacctgtcagagtgtaaccatggactacccaaatcacctgagctgcatgtagatatttagatttctgcacctctcctgttcctacaggatcagaacctcagaaggaggggagagaggagcctgtaaagctgcctttgagcatgcactgctgttggttcttatgtatgacaaact

SEQ ID NO: 33457 - DNA, 1061 bp, Homo sapiens
ttttgcaaattaatatgtccttgaccttttttgcccttttgtgggggtgaggtggggataaaaagactgtcatatcaagaactgtgacttttctttccctcaaacaataaaactcctttattatcttaatgctcccatgttaacatgtttgctgctaaattacaatgtagaattgataatggtttatagtgaactgtgctcttccctcattaaaatcccagggtgccctgtaaagatgcagatgtttcttcctgaaaacttctttttttacaaagaaaattagatgtacatgtataattcagtgtgctttgtctttctccagattaatatcggttacactgctgatgtttgtaaattaaacagatatttacttcattaacagcttggtggtgttcttagaaattgcacaataggccactccttaagaattttttaatcaaaatgatacagaaagaataaggaagaaaacctatacctttttgttgccaaaaaattggtttgagattcacacatcgttatttctggggactgatattggaatggccacataagagagatggatataaaaacatactatttgcctgaaaaaagatattcaattatttttttcaaaaaaattgtaagatgaagtctatctaagatgaaatgtttttgtttttgttcttctttgtttctccctccccaatagaaccaggtagaaaacaataaaagacagccactcttaggccagggttggtaacatgaaggtgtactatccaggacagagaaacaacattgtctgggaggaataatcctcatcaaccatgataagattttgtctttgtttccctgtaaacaaacaaacaaacaaaaaaccatgcacacacacacacacatacacactcggtctctctcacagacacagacatccaactatttattcattcttgtttaaaatgtctaaattgtaattatagagacaattgtatagctattgtaaattatttattcccattgattacttcttttttccaaggggtttaaatcattcattaaacaaagaaacatctgtgacgatgacg

SEQ ID NO: 33458 - DNA, 1035 bp, Homo sapiens
cttttttcctccagttttgcctttttatatcccttagaatttagtgaacactctgttggaaacaccagccttcttcatttgtgctcagataaaactgtggactgtagctgtgttgatgtagagtctggcattttctacaaagagcaggcttcttgtacgggaagagagctatgaatccccaaagcaaaaggcccaccttgcttcttcaacagccacaccaaacttgtcctgctttgctaaaaactacagagagctatgtgttttgtcttaataaaagtgaccctgttcttctgtgtgaatcttaaagatcagtgttacaagttctcaacagttgtctgtgggtggggtgtcagctaaggaagggctatttttagattttagtcaggtaaatatatgaataaggttaccacatagcttctaggacccctttccttctcacttggctcttgttcctctgttacccaagctggaacatttggactgtggatttcactatgacagtctgtatctgtgatggttaatactgaacttgattggattgaagggtacaaagtattgattctgggtgtgtctctgaggatgttgccaaaggagattaacatttgagtcagtgggctgggaaaggcagacccacccttaaactgggtgggcaccatctaatcagctgccagcatggctataatataaagcaggcagaaaaacgtgaaaagactagactggcctagccttccagcctacatctttctcctgtgctggatgcttcctgcccttgaacattggactccaagttcttcagttttgggactcagactggctctccttgctcctcagcttgcagacggcatatggtgtgaccttgtgatcctgtgagttaatacttaatatactcatatatatatatacatatatatatatatcctattagtatatatattagtgtatatatatatcctatcatatatatatgtatgtatatattttattagttctttccctctagagaatccagactaatacagtatcttctcttttaca

SEQ ID NO: 33459 - DNA, 1043 bp, Homo sapiens
gtcctttatctgtgattctgacacatttacagaattaggcaactgttactcagggccagataactacatacttgaagacatctttagaggatgtactaaaggtaaaaagggacattttaagtaattagaggaagtaatgaacctcaaatcagcctttctgtatgctacatatattttagttaatgcttcagtcagatggaaaatttgttttttgcttctagatgtcctgtgttgaaggttatttttaaaattctaggttttgttgactatcttctgattgtagatgtttaatcttatccttttctctacttgcttgcccttttttctaacctatcttttctttccttttctcctctcttccctgatgtccatacatcccccaactaaccaaccttacaggtccattcggatgatgaagtgtttgaaagaggattgaatgctctagttcagctaagtgtcgttgttggtccttctctaaacgaccatctgaagcatctgcttacaagcgtaagtactgcaaagattagataatgattgactgtatgtatcatgcaccatccatatctcttcatgatttaacaatttcaaatcttcaactcaaaaccttaaaaatctccctctacacactgctttgaatgtgtcccagagattctggtatgttgtgtctttgttctcgttggtttcaaagaacatctttatttctgccttcatttcattatgtacccagtagtcattcaggaacaggttgttcagtttccatgtagctgagcggttttgagtgagtttcttaatcctgagttctagtttgattgcactgtggtctgagagacaagtttgttatgatttctgttcttttacatttgctgaggagagctttacttccaactatgtggtcaattttgggataggtgtggtgtggtgctgaaaaaaatgtatattctgttgatttggggtggagagttctgtagatgtctattaggtctgcttggtgcagaggtgagttcaattcctgggtatccttgttaactttctgtctcgttgat

SEQ ID NO: 33460 - DNA, 1050 bp, Homo sapiens
accttctagatgtgacagagcttgcgcaatttgctgaaactttcagagcttgctttttgtctcatctgtaaaatgagattaatgaggatttataggattcttgtaaaaactgaatgaaaacaaaacttgtgaaacatgagaactgtttagtgttgtatcttggatttagtgaatgttcaataaatgcagttatcagcattgtaaattcaaaaccaaagctattaaattaataggatgctaaatactgttttgtttcagtaaaaattattttcctttgctctcttttgaatcatcgtggtgcatggcaaacatcaggaaattttctcctaacttcatgccctcttgacttctgttttaattcctacctgaaaaaatgtttcaacgtgttgtctgggagcatcttctttgaggacaggatatgtacatttacccatcatatcgtatattgctttcattatatcaagcatttcctgaaaaataaaaggcactcacgtgaggctgcacacatgtatgaagaaaccagtctaagaagctctgacagatttttcctactcaattttaaatttttgactttttgtttgttggattctttgttagacgactgttggttgtcccaaaggaaaaggcaacaaacagctttctgccttaagagcagaagaatcagaatttaagaatgaattctgatctcttggtttcaaaaggaagcaaatttccatgtatctaccatagtcaggaaaagaatatgctggcttaatgtttggatttctatagactttaagtagactatgtttatttaattgcattatatatcttatgtgttgatcatcagtttccatctattgagaatcaaatatacggcacatcgtatattgagaaaaaacaccatttagaattagtgaaattaattggtaagtcttaaggttcattagggtttttgttgtatttttcctactgtggctttaacttaagtcacatgtgaagactagtcaaaaaattttgaccctgggaaacacctttaaattttgttattaactttttctctaaaacagt

SEQ ID NO: 33461 - DNA, 1012 bp, Homo sapiens
accttaaatgtaaatgggctaaacgcaccaattaaaagacacaaactggcaaataggattgtcaagatccatcagtgtgctgtattcaggagacccatctcgcctgcagagacaaacataggctcaaaataaagggatggaggaagatctaccaagcaaatggaaaacaaaaaaaaagcaggggttgcaatcctagtctctgataaaacagacattaaaccaacaaagatcaaaacagacaaagaaggctattacataatggtaaagggatcaattcaacaagaagagctaactatcctaaatatatatgcaccaatacaggagcacccagattcataaaacaagtccttagagatctacaaagagacttagactcccacacaataataatgggaggctttaacaccccactgtcagcattacacagatcaatgagacagaaagttaacaaggatatccaggacttgaactcagctctgcagcaagcggacctaatagacatctacagaactctccaccccaaatcaacagaatatagattcttctcagcactacgtcacacttattccaaaattgaccacatagttggaagtaaagcactcctcagcaaatgtaaaagaacagaaattataacaaactgtctctcagactacaatgcaatcaaattaaaactcaagattgaaactcactcaaaactgcacaactacttggaaactgaacaacctgctcctgaatgaccactgggtagataatgaaatgaaggcagaaataaagatgttctttgaaaccaatgagaacaaagacacaacgtaccagaatctctgggacacatttaaagcagtgtgtagagggaaatttatagcactcaaagcccacaagagaaagcaggaaagatctaaaatcaacaccctaacatcacaattaaaagaagtagagaagcaagagcaaacacattcaaaagctagcagaaggcaagaaataactaagagcagagcagaactgaaggagacag

SEQ ID NO: 33462 - DNA, 1048 bp, Homo sapiens
ataaataatgtaaatgacgtgttaatgggtgcagcacaccaacatggcacatgtatacatatgtaacaaacctgcacattttgcacatgtaccctagaacttaaagaataataataataaaaatataaaataaaaataaagatagcacgtttaagtcaagtgtggacttgtgttgtttgcctccctagccctagtaggtcccaaatttccatttggtgctccatgatgttctgtggaagttcacttcatctctgagtctagtgatagagccatgacctgggcgaagtcaggaagcacattttatccctttggccggacaactggatttgtggttgccatttgactaaacctagtccaggtctaagaatgactccccagactcagactcttgctaggaatggtaggacagagatgtgcttctttccttgctcaacaggagcaatgaatcatggagccaaggagctttggcctcttcttgcagccctacagggtcccacccttaggttgtagccagccccatctctggcctttttgttgctgtgaaccaatgaaattaccatttttttttgtcacttggtgtatccttttctagtatttgtgaacaaaagtatcctgattcacatggtgacatctaattcacatcttcttgaatactgtatatcctgaaacaatttacattaaaagatagctatggtcttagagcacctctctctttttatcctgtgggatgatatcagtaaagagttactcaaaacaggaatgatatcttttcgtgcaaaagaaaaatgagaaacttaatgtggcttataagacttttgctccgtgcttttctgagttgtaattgaagtctcaagtaggaagtgacaaacttaacaacaactctcaatgagtactttgcacaattactttacttgtaaatgtgaaaggaggttatatctgttccctaaagtacaaaaaatgataaaggggtggagaggtctgtaccgaattctggtttccattctcttattatcaaggcaaaaggagaaagacatagagatttgacttt

SEQ ID NO: 33463 - DNA, 1029 bp, Homo sapiens
atgttgggtttattctcctaatgtttaaatcaatatactacaatttatgatctgctatttaccatttgaatcatatgaattacgtgtgtgtgtgtatgtgtgtgtgtgtatatatatatatatatatatatgaaatacatatataagctatgtaaatatctaggacattttattttactaggtgtttatacacagtagttcatgaaggaaattaaatactttctagctgggcgtggtggcacgggcctgtaatcccagctactcaggaggctgagacaggagaatcacttgaacctgggaggcagaggttgcagtgagctgagattgtgccactgcactccagcctttatgacagagcgagactctttcaaaaaaaaaaaaaaaaatacgttctctacagatcacttaaagtttgtaatttaaaaagagatttcctcgtagaattgtcaggctggtgaatgtagtctttttctacatttaatttcttgcctgtgtgccccacttactgagacttccataacaggacttttgactttatcatctttgtatttccaaggtctaccacagcaactggcccataaggaggtgtcagtaactgttagttaactcatttgccttccaggacttttcacatgtaattgaagaagtggactctccttgtatgagccgatataaagcattagaaaataaactgaatgtggcttgcaatttgtacatcttttgaaagataatttttggcaattacatgagagaaagggagtgtccttgggctttctttcccctgagcaaaaataatcatcaccaaactcacattttccccctaaaaagactaaactctaaatagtcaaatgatatgaaaataatccagagcttacctcgaaactcacagctccattgtggtctgtatcaaatgcattgaacagaaaatgtgcatatgttgtagagtctgaaatggtaaaaagggagtatcattaagtcagtgtttccatatcctacataagacttggatagcagtccaagcttcctttg

SEQ ID NO: 33464 - DNA, 1050 bp, Homo sapiens
accagttgtgaatcttagcaaccagtaggtggcgtccccatgcagtattaatactcaatgctcatccagtagcagccccttccaaattgaggaagtaagacccctctggagcacttcaaaatagtaatttataagtaagataaaatgatcattgaaaactcctggaattgcatcccaatggcttttataaatgtatttttgataacggagtgaattgtgctacccctcccccacaaaaatatggtcacccctaatctctagagcctatgaatgtgactctatttgaaaaaagagtctttgtggatgtaattaagtatcacaagatgagatcattctggattacctaggtcattacctaaatccaatggcgtatccttatgagagcagaagaggagaaggtcatgtgaagacaaagatagagagtggcagccacataccaaaagatgtctgcagccaccaaataagtaaaactgtttcaaaatcaaggcagttcgcttaataaaatcatgatgtttcagtcaggcatactgactcacacctgtaatcccagcactttgggaagccaaggcaggcagatcccaggccaggagttcaagaccagcctggccaacatggtgaaaccccatctctgtttaaaaaaaagaaaagtaaaaacattttaaaaaaataataagataaacatgatgttttaaactcaagtacttaaccaaagtattcaacctacaacattataggtctttgatgtgtatattactttgaacatgaatgtttgtatcatttgtgagacagaattatattggagatgtgtattttgatttccccaaagataacaaaccttgtctcttttctaagatcataccactcccatacatcattcaagaacaatgaggcattcaattatccatcacaacttttccaagcgcagtattagaagcaacccagggaccatggagagataaatgtgcattacagtcatctctgaataagccattcttgtcttatttattatgaccttgcataggcactcattcaaatacattcagcaaacac

SEQ ID NO: 33465 - DNA, 1681 bp, Homo sapiens
gtagtgtcaatctttacgattccccattctagtgtgtagtggtatctcattggagttttaattggtatttttctgatgaataataaaattgagcacgttttcatatgcttataaaaagttttaatcaaagtatttgtcaaatgaaataccaaaatgcggttattggaaaaatcatttgcaaacagagaaacttgaaatttatcctttcataagcacagtgagtactgaacaaattaaacaataagccctcaaatagtatacaatattaatgttgaaattctgtaattgcattttagaatatttcaacttgcaggataagtcatttgctgaagcacctatttttaattagataaatttatgttctgtactggaataaaacgaaattgtggaagcccataattatgtggaatcataaatagagacaatttatattatgaagttgttcttatgaaatatttgttgaagaaagctactctgaatgaaaacaaaaaagacagcatctgtgaaaatattgaggctgaaatatttatgcatttcaatgcacaaaaacatagaatgatgaatatccttgtattagtttgctagggctgttataacaaaatatcatagactgggtgacttaaaacaacagtagtttatttctcacaaatctggaggctgggaagtccaaggtatcagcaggtttggcttcttctgaggcctctctcggcttgcagacggccaccttcttgctgtgtcctcacgtggcctttcctctgggtaggttaatccctggcatctctttgtgtatccaaatttcccttagaggacaccagtcagattggattaggggctaccctcataaactcatcttaacttaagcacctctataaagcccctatctccaaatagggccacattctgaagtactgtaggttaggacttcaccatatgaatttgaaagggcaggatacaattcagcccatagcaatcctccatttagcagaccaggttctgacattcctttaacttccatataatgcaggaggagacatgaccacaaacgtctggtgagagataaaagtcaggcagaaagtagcgccctctgccctgcaatcaggaaccaccctgtgttatgtgctttgctgcatgtcactgttgatctgtcaggctccaaagtctacctattgaggccaataatatctacctgaccctctcacattggcatcttttaaaaaatagttttatttctactgtttataaaatacatgctcattgcaaaatagaaataaaatgctagtgaataatacaaaagaaaaaaaggatcgcctccaaaacacacccagtgatagccactgttaccatgctggatatatgtccatcagaatgttttctctatacaaacaacttgtatgcttttaatataaaaaatagaaatcacaatatatactctttttcagcttttaaaattgcatatatttcagatgtacaatgtgatgttttgatacacatgtgaacatggtccagcatatgaacatatctatgccctaacgtagtcagctttcgttttctacttaacatcatggacatctctcctttcaataaatagatactttaagaactattaaaggccgggcatggtggctcacacctgtaatcccagcactttggaaggccaaggcaggagaatcgtttgaacctg

SEQ ID NO: 33466 - DNA, 1054 bp, Homo sapiens
gggatgtggataaagttattgtataatgtatggaatatattgatacttttttttcatgcttataaacttttgtgtgtgccttgcaaacaaaaactgatggtgttttattggggatatcacagttcagtttttttgataacgtagtctgttattgagtcagttctgtagaggtcaacaatagttcttaagagagagctggtttattgagacacataagttgctggaatgctctgaggctggttacctgtatttacagcatgacggagtgtgtggttggttcagatttctcataaagaccacagttaaatcagaaaaaaaattctgcatagtatagagtgacagtgagtagttttttggcactttgactttggttttttggtgccttacaacaggtttatccaaggttggagaacagcctcaaactccagtgttctctataaatgtgctataaatatattttttagggggtaggaggtacgaagttcacatttgctaagatggatttctatatgcttaattttagcatgaaagatgtgaaactctatttggcaaactattatccaaataaagttatgtcaaaaaatgaatttcttaggttcatttcatgaactaattttattcagctcttgattacatttcctgtgtgtagagcatgtttcacacttggtaactgactctcatttaaagagaatgaatggccagatgaatgtccttttgagcatttttcaagtgcatgcatttctgattggttttgtttgccttattcaatggagagaataattctttgtggccaatttcattttaagagggcaatgttgagtgatttttcataatttaaaatatgaataattatgctctcaaattatgtatttgatggaaacttagaactgaaatcttggcttttctttctctattcctctgcacactgctgcccagaatgttttggacaggtgtgctgtgctgagtttcatgtaaatcaaatttcctttttctaatttttaaaaatgactgttgtatctttgtgaaggaatgacaacaatagggattatgttaa

SEQ ID NO: 33467 - DNA, 1026 bp, Homo sapiens
ctgaggggactgtacttgaaagctacttgcaagtcagttgagtggagatactgttatatggtatctcttaataacttcacttatagcaaaaaccattaaatgtccctgttaatgtttactttgcaattactaaaaaagcttaaattaacctttgggaaaatgtgttaatagcatggtttcatggaccagatgcgctttgtcgtttgtgaactttcattttttatttacttacagtgcatgttcaaatatgtctgcctgatactcaaaaacatatgcatgtttaactgctaatttgtagctgttattaaactgaactcatggcattggacaaaccagataggaaaacaatgttttcttcgtctttgtgtgcccagtgcttagcaccatcctggcttctgtttgttaaattgaatttaacattttagatagttttcatgggtaatgagtttcttttaggacattaaatttagccttttaatttaaccatttgaaatgtgtagtcttctgatagtgatggtgtttgaatttgcaattttaaaaacctgcttatcaaagaacccaaagataaaatctcataggagcaaagagaggcttcagaatgtcactgaggaatgctgcggtggcaagatgacttggtaaagtttccagtattaagagagagactgagtctaatgcattctcctccaaataggatgaagtgcctctctctagtcctaatttagaaatgaatttttatttgttccagactgcccttgaagtatgcagagcatttttacaggaagataaaggcgaaggaatcattatggtgacggatcctccgtttggtggcttggttgaacctctggctattacattcaagaagttaattgctatgtggaaagaaggtcaaagccaaggtgtataatttattactgcaaaataaatacatatctatatatctacttcctgtcaaatattagctgagctcagtgaatcagagcagtgatagaatatacatgtcttgagttctctttttaaaaacaggct

SEQ ID NO: 33468 - DNA, 1062 bp, Homo sapiens
atgattttaaaagaaaatgacttatggtactattttcaggtgattttgtagtaaaatctatttttgtatgctagcctctaatagataacatattcatagaattttcaaagttagaaagaaacaggtaacgtaggctgacttcccaacataataatcctctccactaaattcatgaccagccgtcatccagcttcacttgaatgcttccagtgagcagaggactacagccttagaaagcaatgcaatttatttaatagctctaatcgttagaaaattttctcatatggagataaaatatgctccccattaacttccaaccattggtcctagttctattctctgaagcaataaaggataagtccaattgctattccatatgacacaccttcagttatagaatagctatcagatcctcccagtcatctcttttctggataaacatccccaatttgttaagctataaattctgttcattcccattatttttcaaagaaatgaactagttttatcaacgtctctcctgaaatgtagtgactgaacacagggcttcaaatgtgatctaacctgaaagtttccttgttgtgatactgtacttccaaataggccaactgtgagtccgtgccagcttttacacagttatgctggactgcaaactcaccatactgacagccagaaacccttaggggcttttccacagtgtcccttgggtctcctcatcctgtgctacagtgtacttagtttttcccactgctgaagcttacccttaaactagacagggctggagaacgagcctaggaatctccccttaaaggcctctctttcccttgtcctcaatttcttacatttttgtgattcacttattaaatagctagcttacaagccagttttgttgtaagttcttttgtattcttgtttattatagaaacaattcagtacataacttatttgaatgtcaggcttacctgtactgacctcataaaaaacctcatggtattcttgtggataatctaaagcagtggttctcaaactttagtgtgccaggagggcttgttaaaacacaga

SEQ ID NO: 33469 - DNA, 1084 bp, Homo sapiens
aggttgtatgtgtctctctccgttctgtttggctgtgtgggtgcaggcatggttgggtttaaccaggattgtcgttttgcaagtatgacaaagcaaggcaaagatgaaagagagttgaagttacgtgcaagaggagtgattgtgtttctgaactttgggttctaacctgatgaaggagggaagtgaaggcatgtgtggggagagggacagtgaacaggtggtagaatcaatagactgtatcctggtgaggtcaaagaattggagttgagtgttgtagagatgacctggaaagaggggtggtggatggaaagtgggaagtttaaaatggagattttggtggccctgcagttgttggtaatgaccaggccggaggtgtgaccctgggagtggctgagtgcagtagaagatgtgatcactggaggagaggtaattgagagctgaaaagccaggacatcatagctcttgaaatcaccaaaaatgatgatgagtgtgttgttagaaggcatgagcaagccaggtatccagatctttaaggaatgaggggaatggcctaggggtctgtagaggactgcaattaagacggatagcgagtggtatggtctgattgcatgtgattcaaagttaggagatttacaagaagagaagaaatggcatcaagcatcaaggaagacacctacttcatctcctagcccaaaagcagcagtacaggggctgtgggatacaaaatggccaccacctagcaaggctgcagggaagcattgtcctcaggtgagaggcacatttcagagaaaagtacgaagatattaatttcatgatgacacctgaccatgagctgcagaaagcacagaggaagggtttcagaagtaaggtatggcaggagtggtttcagaaaagagagggtcaaatccaggggatgttgtaaccaggagtgaagggtgctgtgagctgtgagataaggcagggtcatggtggcttagctgagtgtggaaatggggaggggtcttggaggagcatgtgcagtggtgaggccttttcttccttactgtcaatggttgtatagaagctgcaacggggcagtcataga

SEQ ID NO: 33470 - DNA, 1038 bp, Homo sapiens
aaaaagtgttttggtggtctattaatgaccatattaatttgttgctattccagtttgactttgtaccaagtgtttgcttaggactctgtccctgataataacaaaggttaatatttattgattgtttaatatgtgccatatgctgaatgcttcagaacagttgatttgaatcttcacagcatcataataggcagatactgttattatccccattttataggtaagtacatggacacacaaatacttcagaacttgcttgatgtcacaggatgggaaagtgatgctagacaatctggctgcataatctgtgctcttaactagcacattgcatcttgtgtaaaatgatcacttaatattgggaaaatgctttattgcgtgctgtctgcattgtagattaaggaagctaactgggctcccatagagtatttagatcatagccttgccaagaaatcgaaaattttcatcttaaatatcccagccacttaagtatgtgtgaactctcaaacaaaagtagaacaaaaaagatgcaagatgcaatgtgtgtgatgtcttccaacattctctttgtattcagagcatcagagaactcttggtttactgttcactatggtaatggttgttcatatttgctcatcttcttaaggttatgtgaaactatgatcaccaggattgcatttggattataataaaatgattcactactactgtgaagttggtaacagatcatttttaatgacaaatttattaagatacaattcatataccattgatagatattttcccaatatttatcagtagcctttaattccttatacttcctttaagtttttacatatatttgtgatttaaacatttctttgtaatactgtttcaaaataggttatattacatttattctatctacacaggaggggttgataacccagagagagtgatttgtgtatggttatgtgtaggttaggagatcctaaggctatgtgctgtttccaaaccgttctgctcaaagagggcacaattctgacatagtctttctgatac

SEQ ID NO: 33471 - DNA, 1515 bp, Homo sapiens
taaataaataataaaaataaaacagtgattgaaagtaaattctagatttctttgagacacttgatcataagcacatattatttagatagcaagttggtttaaatattttttaccatttcaatttttcttttttgctaatagtatataaatttgtcactaacatgtatgtgtgaagcatgggaagaaatactaatgcagatggattctcgtctcaccaagtttgtgcaggtaaagcagctgaagtttcccatggagagagttaaagaatgcatgatgtatgtctttaccttgaggtacatgagaaaaatcagtttgattcataaaaggctaagatcataatttctttcaaatggcttcgtctgacttcaaactgcttcctcagatttgccaaaagggctcttttcccattgatacaacttaagtggggacaggattgtgaagtggagctggtggggctttggcaataagggcaggtgttagaacagctgattggctatcttctagtcactgatgttcagatgatcactttatggatttgatggaagtctaaggcaaggaaagggagtcatgctcctataattttgaataaatatgcttataatttaagaaatacatatatcacaatttttttttcacttttttccaggaaaagaacacaaccacatcagtgcaagatgagttcatgcacttgctattatgggggaaagcaaggtaataaactcagattaggtgctcctgtttttgcttcttttttaacagtaattatttatttgaaaagtagtttatagtcatagtatgtgatttttttaattgatacataatattttaattgatacataatgtgttacatacttacggggtatatgtgatgttacatgcgtagaattttttgtggggctatttctttattttgtttcttgtttgtgcttcgaaatttaaaagttgtaagtgatgcattcagatttccaatagagaagtgactaaaaatactttgtttttcattgtagtgctgaacttcagactctcttgatgaatcagttaacagtaaaggtgcagttaatgtatctatgtattcaaatggctatgaacacattcttaattttttttttcgagtggcatataatatcctgattgtatgctaaatatattttccttttttaattagggcttgaaaaagcttggccagtctatagagtcatcatactccagtatacaaaaattggtcataagtcatttacagaggtatgaaggtgacgtagaattttttggtattgtatccacacatacctggcgttggccttctttccgccgccttttcttcatctggcattctctttttaagccttttctagctaaaattgttgcatggcatttgagaagaatcttcctatacccaagattgaaagagtcaataataattctgctttatgaagtaattttccaacatcttttcaccaggctagactctatctgggtttttttcttaatcagctaagcatgaagtatattttgaaa

SEQ ID NO: 33472 - DNA, 1043 bp, Homo sapiens
cggagtctttattataccatttgagtgaattgaaaggaatggcttcatggaagcaaaaatatgaacctcttggactagatgctgcaggaatcgaaggtagtgatttaatttctcagtgaaatacattaaacacagtttacttatttgacaaatgacgtttatttattttttccctttagaagctataactgctgtgggttcttttatactcaaggcaaatgaacttcttcagtaagtattgggagtacctggaatcactgacctaagaatatgtcacttttgacctaaataagaacctagtaagctgttatgattctcttaaaatcagtttttaaatttttatcacaattatgcctttatatggttccgaaaagccagcagcacagagaatttataaagtaaagctgtattttcctgtcctggtcatccttacctcaggtcttctcgccagagggaatcattttaactctttaactacttctatttttagttcttctatgggttacctccatatttctaaattgtatgactatgccacatttcttttgtcaatttttagaagttattctctttgttttgtttttcttagactgttaggcttgcttgttttcttgcattgtctgttttttctgcatccttccgtcctttcccttctgaagggtggtgtagtacctctggagtcccctgttccagatgccttccttagcctcccacccctctgcttcagcctgcagctgtggtccagttctcctgcacggctaccacccgggcattttcttcattactctcctgggttagacccagaactgccaggattgcctttgtttcttggcttatttaatcattttgctggaaaacatcctctagtaactttctcaaaaagcagacatagaaggtaaactttatctccttttgtgttttttctcctaccctcacacttaattgacagctggctttaggattccctgagggttattggttttcacatagaacttcaaaagcagagttccataggattctgtgctttttgttgctgatggaag

SEQ ID NO: 33473 - DNA, 1049 bp, Homo sapiens
gctgcatcagtcttccgtcacttttgacatttctgaaatttaatttcttttctattgttctttttgtttttgtgagtttctaacacatgtacccctctccatccacagccattttaatggtattttagaaggtagaggctgtagatgtgtgtgctcagaagacaaaaaaaacacgaagagaaatggcattgcttttcctgtatttcgaagtattttttggttcaccgtatttgcagagagcagatataaaatactacgctttctatgatcacttctcagtatgaatgaaaggtagtttaacttattgttctttcaggtaagtagaattattacaggttccagatggagaaactgaggcattgagcattttgatgttggtctggtggcctggggtagggttgaacatattgactgcacaaaggaactttttttctttctcttatcattgctgcaagagggttttgattatattgcttagtaacataagagatgtttcagtcttttattccaagcgttttactttgtactgaaaggttaatgatactgacctacctcttcattggtattatgaaacttaatgcttggaaagggctttgagatttgggaatgaaaagcacaggtttttgcctagaataattatcgtatacatgtgagcttaaagagattgtttaaaaagtgataacccatgtctgtattcagaaacagttttatcaaaatgaagatgacttccatttataacacttaattttgggggtacatttgtgtaaagccaagggaaattcaacttttgagatctcaattgttaggataaaaaatcagcttccaaaaataatggtccattgatatcagaggtaatgacagcacaaatttgtaataatggttttctgttgaagttgatgttttttcttcttactgaccaatgagtattttcttttaaaatgagaataatgctgaaaactgttttttctgatttcttttatttgcaaagttagaaaaggagttcatgctttactgagtcataagaaagactattacacagtttgtggcaa

SEQ ID NO: 33474 - DNA, 1035 bp, Homo sapiens
tgattcttgcagctcactcttcttcacccctgctgaaactgttgataggttaggtagttttgagcctgaaaaaatggacagcattaaaattagcctcatgagctagatgagaaagggttcctccactttctacaactcgtttgctaagtcgatcttttgcactgtgggtgactggccttgcaaaccaggaaagtttcacaatagttgtttttctgacatcactgttagctttattttgggagtaaaatatgtcagttgttggaagggatcctaaggtataattttctgagggctgaagaactaaattgggataaattcaggtcactgcaagaagcaggagcctacactgaagcagacagcactgtttgcctgcagcccttaactaagggtgacacatcttatctggggtccagttctcatttccaaaggagggacctcagcacatgtggtcttagcacaaggcctgaaataataaacaaccttaggccataaagagttctgtagctattggattaactgattggaagatgagttcacatgtttaattacattctcggaaccccaggcgttcatattttcacagtcgcataatctatatttctttgaaagaactttgccagttttcccatggcttttagtagatagtaaaaatgtcacatttataattatgtaccatttcttttattgagcagctttcttttatcttgatttttctttttgttccttttgttgatagatgactcagaaagatatcacatttgttgctgaatttcttactgaacatttcaatgaggtaagaagttgatatttctgtaatgcagtttaaaaaaaaattacagtaaacctggataatgacaagacataattaaatttaacccaatttaattgaagtctatagcaattacttttttaaaactgttgaactaattatgtttataaacatagtcaataaaccagacttttgtttgtgtgtcttataatctataaaagaaaataataactgccactcacagctctcttgaaaaggaaggtttt

SEQ ID NO: 33475 - DNA, 1021 bp, Homo sapiens
tatttcatcatatatttgatggttcccaaatcattccttgcttcttatagccagcagaaacctacagttggattttggtgagtctaagtttgtagtaagtgagattgtttttagtgagctgtcagcgggggttgatgaaaggcagaagaccatggtcgtttttaatgaggttgtgtgaaaatccaatgaagtggtcagtgaaaattctacctcgagataaactgtgcagactggctctaacagtagattattttcttctaattataagtttgctatagcttcttttatttttgtttctgtttttgtttgaaaccagaaagtcctttgctgtttccttattatcctcgaaaatcattgcattttgtgaaaaggcggatggagaatattattgatcagtgtttgcaaaagccagcagtaagtttgaaagaaatgcatgtctttgtgtaggagcaatagtgtctacagtatgtggctcacttatgtaaatgatcttaatttttagaatgaactatgaaaatgttgatagtcaactgtttttgattaacaaaagtaacaatttcatatggttcaacctaatactccaacttaagtttcttacacacgtgtgtgtgtgtgtgtgtgtgtataaagattactgaaggtgttggcatcttgagtattttatttgttcccagaagaaattcattgtaaacagtcttagttacagagctgatgtgtctctgcttactactgaaggatgtgaatgaatggttgttatgagaccagagggaggtggtcttaaacctgccatgtgcttagcaccaaggtccttttcagctcagaattttctctttttccttactgttacaattgtcattaacgtttcttatgtacaaggtttggtgatgtaggcgatttttttaccacattcgaacagtgatggtcagtcactttctgtagagtatctgtgtgcatattaacgctctaattatattttaaaatcttattttatataggatgtaattggaaaatcgatgaatca

SEQ ID NO: 33476 - DNA, 1971 bp, Homo sapiens
aattacaagaagtaacgttgcttctttggaaccttcatcaaatacatgatatataaggtccttttgtgcaaatatttttactgtgatttatagcttgtattgattatgatcatgtggtggccttagctatttagttcttgttctgataaagcttactaagtagttaataataatactagattttaatctcacgaaattgccactgttgttatgtggagatctttttatacaaaatgaaggctgaatttattgattttgttgtaaattgatgggaatataactttcctataaaaccattctttgattcagacttctgatttctaattctttatatatgataagccattaatttaaaaatgcttttatggccttttcttttttagttaagctcaaatcttcgtcatgtgagagtatttgaaatggacatagatgatgaatgggagctcgatgagtcttcagatgaagaggaggaggccagtaataagcctgtaaaaataaaggaagaagtgttgtcggagtcagaggcagagaaccaacaagctggtgctgccgctttagctccagagatagtcattaaagtggaaaaacttgaccctgagctagactcctaatctagcttgccattattgtgtgtgtaattatggccaaaaggacataggagatggactaagatgtcttggaccacctttgtgtaacaaagaaataaacagtaaattttattttttcatattctgcttcatcttctcttagtgatatagtcactatgatagactttattttttctgagctttctctttaatgctatgtgcagaactagtgtttaaagaaaacagggccaggcatggtggctcatgctggtaatctcagcactttgggagtctgaggtgggtggctcacctgaagtcaggagttcaagaccagcctggccaacatggcaaaaccccgtctctactaaaaatacaaaaatgagctgggcgtggtgcatgcccctataattccagccacttgggaggctgaggcatgagaatcgcttaaacctgggagccagaggtttcagtgggctgagattgcgccattgcactccatccagcctgcgtgatggagtgagactctgtctcaaaaaagaaagagagaaggtgaacaaattgaatatgaagaaaaagtctaatcttttctgtcagaagggtaggtatcaggaattgttcctgtatcattgaaatagtcgctcatcactggaaattttaatgcatttagtattttaaaactatagacaacattcctatttttccatctccccttctagttcattttgggtctccagaatgattttaaaattatgttttcagaatatattatactgatttactgaaatgctaagccaaaggatggatcctgtcttttatggtttaaataacataaacactgcttgatacctacatggttatcttttctcattctgtccctgcatttgagctctgagttatttgaatcagcagtgcttagatgtgcccttttgccttttcagacttggttaaggacatatagtagctgtctgtttggttgactccttgagagtgtgagaaatatgggtcaactaaatgttatctggcattagtgcagataagctactgttgatttcctaatgctcattcattcctaaagtacaatagtattcttgtgtgactttcaaagaaattaatttaatatatgaattccactatcacttcatcgataatcactttttaaagcttaaatatctttaggcaggaggatatactataaccaggtgaatgggtaactgcagggttgctgtgtcatttgtctatttaataggtagctgtctctctaggtactccagggtacctctgtgaatggaagccactgttgggtgacatagcatttaggactgtgatcaggaggctgactatactgatctgtagccttgcatatgataggccttaaactctatta

SEQ ID NO: 33477 - DNA, 1054 bp, Homo sapiens
aactgcctcattagagaggcctcctcatcctacagacgaggtattagcctccttgcccaggccctctttctctcattctcccactttgcttttctgcctagcacgcgtctctccctgcaattatatgatgtgattatttgtttgcttattaaatcatctctctcctcactagagggtaagcactgtcagggcaaagagttctttgcctgacttgctgccatcgggccagcacttagagtagcccctgttggtgttcagtgtggaaatctaggagggggaacacccttgcaaaggtgccctctggaatggtgagtggagtccagtgttgagaggtggcaagaccaagacagactcagccacctgcctgccgtcctacctttccattgattcttcccagaattccacatggagataatgagttctcatttcatgtttagaaagagttggaggaggcagaggagaactgcatgcgtgtgggcatgggcgggggggacctctgatatagaaaaatgaaagatgattttgttttttctgatcaggaccaaagaccaagctattagatatttccttaagtgcttttttagtgtggatttggagaaataacttggagggatgattgctctctgcccccacttgtacagttcttaaaatgctggagttggtttttgctattgaaaaaggcaggcagcagcccccagaaacctcctgagggtgcagatgaggcaggggccccagcagacccccagctgatggacacagtgtctccccttttgggcgtggcctgctaacaatgacctttctggaaagcctttgattctggcaagtgtcctcaggcttcctggtacctgtgactgagaagagtcacctggtgagaaaaacaatgttttctctggtccagtgacagcactcaaaacctctccaggggtgagggagaagtatgcaaaatgttcctggggtgggctgggtgtcagatgactcctaaaacaaacggaaacagacactcaatggaaccacagtggactctccaacattccagaaaagtggggcgaggacc

SEQ ID NO: 33478 - DNA, 1028 bp, Homo sapiens
gattaaagcgtctccaattttcatcgccgtctttttagtgccgtgggttgttttgcttggaaacagtagccttggaaaaagatctggtctcttggtggttcttgcgccccccggcccccgcccccctcctggttcctgacggcgtaggccaagggcagctgtctgtcgaagctttgcaatctaggctgcctgaggatgattggagggtatcgtaggacggttagaaggaggctcaagatgtatatatgtgtttttctgttagtgtttgagaatagtttcagatagccacaatggatattcatttggcgtgtgagtaggagttgagtgaatttccatgttaaaaacttgtgagtgttggggcggagaatttcagcattttctagaaatctggatttagaatttatcagtaacttctgcctcataaggaaaaggagaggcattccgcttgggaattttatataaatgttttattttttcttaatcattagatagtttacagttatgtgctttttgctgccctgtagatgcgtgacaacccttctgtcccatcattggggttgaaatgaggacagcaccgaagagtgcagtttctggtcgatgaatactgcttctaagatctttgtggaagatattaatcaaatgcagttaaaaagtatacgtataatatgtatattatatatatatatacacacacacacgtaatagcctgtagtgagattattttaaagacacttcctagtgttaaagaacccttgaagtgtttcgagttcttattgttttggtaatgctaaaagcttggggttgtgtgaatgggggtggggggtgtggtgtgatgtattctaatgacttgagttattctgggtgctaggaataagagttattatatttaccaggattactatgctgaaggtattcttcaagagtttgttttttttctactggttgatctctacttttagaaggtatgttacccataaaatcatttggagtgtcatttcatttacaaactgaagttctacaatagtgaa

SEQ ID NO: 33479 - DNA, 1039 bp, Homo sapiens
gccaccatgcctggcctcaaaagttacttaagtatattgtgtaaagtgagccactatagtcttataccaggaaataatcactgttaacaattgggagtacctttgacccttgaacaacacagatttgaactgagtgggtccacttatatgtggatttttttcctccaaacttggatggaaaatacagtattcatgggatgcaagaatagtgtatatggagagctgactgccggtcttgagtatgtgtggattttgatgtatgggaggatcctgcaagcaatcccctgcggataccaaggaacaacgatatatttcttaatttaaagaaatggaaacgctgacattcgattctattttaaaaatttcagtagttttgcaaacataatattaaaggtgccagggagctaacactttgttgaatatctactcagtcctcaactacaatgtgagggaagtggtatctctatctattagattactttaaatgaatttccaggaaataaacttatttttaaagttacacttgattagactagtctttgggctcaaagtttctctgaagtagcgtaatgtatctttaggtaaaaattttgtatttcatttttaaaaagttttttaaattaaaaaaaattttttttttgagatggacgtctcactctgttacccaggcagacttggaaattttgggctcaagcattcttcctgcctcatcctcctgagtacctgagattacaggcatgcatcattgtgcctggcttaattttatttatttcttgggataggatcttactgtgtcacccaggctggaatacagtggcaaaatcacagctcactgtagcctcgacctcccaggctcaagtgatcctcctgcctcagcctgccaagtagctgggactacaggcttgcactaccatgcctgcctaatttttatttttattgtagagacagggtctccaacacctgggctcaagcgatccttctgccttggcctcccaaagtgctggaattatagttgtgagccactgtacatggctcggac

SEQ ID NO: 33480 - DNA, 2012 bp, Homo sapiens
aaaatatacctagaagataaatttctcaaaataatcctagaaatgacttttaaagcagaagagaaaaaaggaagggtggaatagcaacaatggaaacaaatgaggaatcctgctccccaccccacctcaaagcccactgtatatgtggggttatggtcagtatttctggtgttagagtgtatatttgcaaatctctgaactgtttatatgtatgaatctcatcataatagattcacattcttcttaaaggcaatgcttaacatgtttcctgatcataagatgttcatattgaagattttaaaaaaatacaggttgaatgtgctgcttaaaatgagctgctgctttatttttaaacatttaaaaaattttgttaaatttagtctcgttcttcctacaaaagagcttaaactttgacagtaacagctgttcttttgtgtgggacatgttttcatgaggatttttgtgcacattaaaaataaccatttttgtgaatcgtagttattattcatagtcactttataagagatataaaggttttccagtgagttacttctgattcataaccaaattatagcagagcagatgtagactaccagtggaataattagccaaaaaatattagggggctagagatctctttgtgtaacatttaactttaatttcttggacagcttatatgaataattaaagtgttgaggcagttaaaatttattttcctctcttgggatttcccagttgtcatagatagctgtagtcactagggaagtagaaatattatttccagcaaacagatggctttcctcgtattggtccccaaaagcgcctactgaggtttgtgtttctgttggatgatttcctaatcacaccaactcagtatacttttgaaagatcacacctggtaacagaatatgatgtaaatattaatatgacttagtgaacttgagagcatccaaaattgtaagtttatatagttcctacatccctggggagagtagtctgtccaatgagaggaatcgcctggtagctagtactttacttttcttatcacaagtcccctttctgcctcagttgtactctcagggattcccaagctgctacttctgctttttaactctcattaactctgtcatctacgtgctattttcatttctgcttagtcagatgactaccccatcccgtactttgaggcattggtaggtttttgttagaattaaggataggattctattatgtatggggaagattttcagagaatacagtgatgctggggcttaaaatgacaaaatcacatcttttctaagctctataatgaagcttttttggagatttcacttgttactaatctttctctttttaaaatgtctgtttttcttctcccattggaaattaaaacacacacacacacacaaacacaaattgggaatctacatgtatatttatgctagtgaaatttcaaaaatagtcaagtattagtgaagtggccacattgttggagtaaatacttgggggttcatcatctcactcccaaaaaatttaggacatggacatgcacgaggagttcaggagtggaggtttaataggcaaaagaaagagaaagagaaaggaaaacagctttctctctagtgagagagaggggacttccagagaggaaaagactggcgactgcggatgtactggattttatagtcagattggaggaggggatatctgatttacatagggctcacagattggttgggtcaggtatgacgtttacagcggggaaggctggctgcctaatcttattatgcaagtaaactttccccttggcaggtgccatcttatctactccttactgtacacatggctgacaaagagaagggaagatggagccgctatcttgaacatgattggcacaactgctgacatctatgtctgtagctcgattttacagtctgctctttgtgagaaaggaaaatgatttggggctgcttttcattaaaaggaaaaccttactgaggacttccataccc

SEQ ID NO: 33481 - DNA, 1101 bp, Homo sapiens
aaaaaaaaaaaaatgggtgtgggggtgcatgtctgtagtcccagccacacaggaggatcccttgagccccaggagttcagggctgcagtgggctatgatctgtgctactgcactccagcctgggcaacagagcaagaccccatctcttaaaacatcaaaaccctaacccctctcctgccaacaaaaaagcctcattaacagataagaactttgaacaccttgagttatataaaacgtaagtgaagacagtctggcccttgatagtttgtgccccactggggactgcaggtacactcacacaaactgtaaggaagaacaccatagctcatgtaacaggcatttcccaaggagcattgaggtacacaagaagaggggatggttaattcagactggggattccagtgaaagcttcaggaagggatttcttcttccacctctcagttttaaactttttaactatgttagaggaagatgaattctggaaatttgggggcaagagattttgttaaggaatacctgagtactgactgtcctctgaccctcctgccaattcaggatgtggttcttgttagagatgaatttgttcaaaaaccacgagtgcccatgttggtaaacattcctttaactggaagaaaacagaacatcaatagaaaggtaagcctgagtagagtcccagtaagaatgtggctattttctcacctctgctagagctggacctgcagagtgtgtcactggcagctgtgagtacttttagctagggagcttgtggcctaggtaagcctgccaagacaggctgcacatgcacttgggctctgtgtagctactgccattcagcttaagttttgtatcagtagctaagtagagtcagagctagatcaggccaaatagactgggagtgagaaagtaggagagtgaatctgtttagcttcttcctgtctgtttgtaacccatttgaaatgttgcacaaatttcgtttccttccccagagataaccactgttacaaatttgaatatattctcccagacaaattctttgtgtacttaaaaatacataaaagtgtataaatacagtttgggttttctttatctttacttttaaaa

SEQ ID NO: 33482 - DNA, 1068 bp, Homo sapiens
tactataaggccagaaaaagaaatgaaagacgtcttgatgggaaagaaagaagtgaaactgtctttatttgcagatatcatgatcatatgtatagaaaattctgcggaatcttgctactagaactgataagtgagtttagcaaggtagtaggatacatgattaacatacacaactaaattgtatttctgtatactgatgagcaatgggaaattggaatttgaaagcaatacaatttacacagtagtataaaaatatatatcaggaaaagtctgacaaaaggtgcaaaaactctacactgaagactaccaaacattactgggagaacttgaagtcctaattaaatgttcttcaggtagaagacctaatattgttgaaatgggctgggtgtgatggttcacacctataatcccagtacattgaaaggccaaggtgtgaggatcacttaaggctaggagtttgaaaccagcttgggcaaccaagtgagaccttgtctctacaaataataaaaaaaattagctgggcatgttggcacgtgcctgtggtcccagctacattgggaagctgaggcaggaggattgcctgagcccaggaggttaaggctgctgtaatccatgtttgtgcctctgcactccagcctagatgacagagcgagaccctgtctcaaataaatatatatatggttaaaatgtcagttcttctcaaattgatcctgtggattcaacacaatcacagtcaaaatctcagcaggcttttttgtaacagttgacaagctgtttctaaaatttatatagaaatgcaaataaccttgaaaaaaagaaaaaagaacttacactgcctggtttcaaagcttactataaagctatggtaatttaaagtattgtattggcataaagatagctaagtagaccattgtgacagaatagtggccagaaatagttcttcagatacgtggtcagttactttccagtcaaggtgcgaaggcaatttagctagatttttttttaaatggtagtctttctaacagttgattgtagaacaattggatatccattcctccttcaacccac

SEQ ID NO: 33483 - DNA, 1050 bp, Homo sapiens
tgttgttattgttgttgttttgtattggttatattttagtccactcagtccactaatatcacttagtttttattacggaaaaatttcaaacactctcaagtagacagagttgcaccatacagtgaaacctcttatgttcattctctaacgtcaacagtgatcttaacattcaaccaatcttatcttcatctatacctgtactccagccccactttcttctgcccttattttagtttgatgcatatccaatcagtgttcaaatttaaaatggtctaaaatattttaaaaatcagattgcttgaatcaaaattcagatctaccacttagtacagtttatattgtgatatgtccttgagtataatctatggacaccccctcaactcttgcaatttatttaagtaagttgaaacatttagtcactagagatttccacgtactagattttgctgatttcatttatttggtatagtttaatgtattttctgtaaattggtagagtcaaaaagaaatagagcgtgggcctagttggaaagacagatttcattcagtactattgcaataggggaaaatagaaccaagttccatttcagaatacaacaaagacacttggggatgaagcagagtgagagggtcaatggatggaaactttctaaaaggagacatcaaaggtagaaggtttctttctgacctgacttaggattcctgctaaaggcaggccaaggtgatcatagatccagagtgggagatagtttaggaggattcttactatatataactgagctaaacagactgatgacggggctcaaggacaaatactagttgattgctcagagcagcctgcttaaaagtatggtcaaggagagaatctttagtgtagaatggtgatcagatttaagtttgttgtcctttggttcttgttttctttctgaaaagcaagacctgcttcaaaggtggtggtgtgctctcttgcactaggaggtatattatgtcttgtattcaggctatttgcatttcagattacacagttttatgtaactgctttaactttgt

SEQ ID NO: 33484 - DNA, 1044 bp, Homo sapiens
gttccaagcctgaccatccttgtttaatctatcatactcttccaggttttttttttttggtctaaggctggaacttttttcttttttttcagctgaagtcttatgacttttcatgagtcaaaattgtttggatttcagcaagtcaaatcttgcaaaggcctgcatattttttttaagattatatgaagtctgtgcaaaagctttaaaaaaatgcctctgccttgcctgcaatacatgcaatgtatgttaacttagtctctcttctcagacactgttggtagttatttctgtgttttcctttttttaaaaaaaaatatggacttattgtggttatctgagaggttctaacattcacatgcaatttggtgtggccatttagctattaatgagttaatggcgcagaacttgttgatatttgaagtgttctctccccttttcccatgacgtaaatacataggtgtgttccaggatttgttcaggtttttcccccctcctaatcttgtacataacttgtattatgtgtaagttaaacattttattttgaacttggaatgttcccagtgatttcattcagcagggtattttctgccttgttggcaagtgacaaaaaatatgggaagtatttgctaccagttggtagatggtgcccttaatggtagaatgaggaaaatgtccgcaaaagcatgttttattatctttacttttttggggggttggagggggtagcctagccagaacatcattgtaatcttaaaacataagatgcttttattagatgatcaactaaaatagctggaagacagtactttagaaacagatagttgtaagattataaaatgcaaatgtaacttatgttttcatttttttctctgccttttttgtttgtttgttttctcttttccagtactgagcatctccacaaatgtctcctaactcagaaaatgtttcttttcttttcagttgagatttggttgcattcagggttgtaggttggccttgcttgctaaccccgccggttttaccgtgctttcattcctgaacttt

SEQ ID NO: 33485 - DNA, 1049 bp, Homo sapiens
gctgcattttattctatatcgccttttttcttcaaatctgctccaatcactcacttctctcttataagctaatcctgcctcacaccttaaatctgtttcagtgatcaagggcagaactcattgtggccttatctttctttgttgtaattgttcactgtctctttcttacagaccacttatttctgagtagtagttattcctctctatggagtcatggcaggaatcattacacagtgcttttgttcagagcatggacatgttcctagtgctgctttgctttaacggccacaagtttcctccacttcctaggtttggtatttagttaaggaatcatattaaattaaccaataacaaaagagatacttttgaagaacaaactattccttacccatttttgtagctcaaaaataatttttcaagttcatgaccttattaaaatgaacttgtgtttttttaacaaacatgtatgttttattttgatagtttctttccgtaagataattgaaatattatactgtaaacccttttcttttctttttttgaaaagtccaagaatgtacttatacaggcatttttccccacctatttttggccattctcataccacagactaaagagtgaaatgatttgtccattgtagcttattgtttatcagtagttcttttgtcagctgcttacattttttctttcatggttttgtgaatcattttcagtatgtaatttataggaaccttgtcctctggttatagtagactgtgtgccctcctccagtgatggcattattagacatgctggtcatttaccctcagaaagactctcttattagaatggtgagtgcttcagttatagtatgtttgaatttttaaaaaattctgttttagaaatgtatcttatgctctcatgactatgcagtttctaaacatacacatagaagctgagtctctgatccaatatgtttttatttgttccatttaatttatcacatagattgggaaggcaagctaaaagccttaaaaatgccctttatattttgagtgatttcagcgttg

SEQ ID NO: 33486 - DNA, 1034 bp, Homo sapiens
aaaaactgtctaaatatgtagtattgtataatatactgcctttcttataggaagatgatgctactgactcttagtcacactctcttggccagtcccccttgtgatgcttttctgagactgctggatgggggtaagagaagtagtatgtggctgaggagcagtttttctttgtgaaatttactggccagtacagatcacttaccttcttttattggactcattagcaccatgttctaactaagccattgagactagatataacataatagttaaataataatttaaatgcagttaccccccaaattcaacatgtttaatgaaattatactgttatggtcatttatttagcttttaaataagttattgattcttgtttttagttgtattgctagacttcaaaaaatgaaatgaaaccagtttcaaaattaccttttccagaggccagttggagaacagaaagaacttcttaataaatggaatgaaatgggaactgatgaaccaggtatgtgaacaattttttctgaatgtagtagtggaaaaataattgccttcttaactgtggatccaaaataacataattaacaattcttttgggaagattgcaattttccttctcattaattttctatcatctggaaaaccagaattagactgacctactcaaactcccagacaccacatgcaactaataaatacagacatcaggagcagctttttgtttgtttgtgtttttagagacaggttcttgctctgttacctgtgctggagtacagtagcatgatcacagctcactttaacctcaagctcctgggctcagagggtcctttcacctcagcctcctgagtagctaagactacaggcacacaccaccatgcctggctaatttttttattttttgtagagatggggttttgctatgttgccctggctctctctgttgaactcctggcctcaagtaatcctcccatcctcccaccagagcctcccaaagtgctgggattacaggtgtgagccactgcgcctggccttattta

SEQ ID NO: 33487 - DNA, 1066 bp, Homo sapiens
cctccgctggtgaaacccaggcaaacagcatctggagtggacctccagcaaactccaacagacctgcagctgagggacctgactgttagaaggaaaactaacaaacagaaaggaatagcatcaacatcaacaaaaaggacatccacaccaaaaccccatctgtaggtcaccatcatcaaagaccaaaggtagataaaaccacaaacatggggagaaaccagagcagaaaagctgaaaattctaaaaaccagagtgccccttctcctccaaaggatcgcagctccttgccagcagtggaacaaagcaggacggagaatgactttgacgagctgacagaagtaggcttcagaaagtcggtaataacacacgtctctgagctaaagaaggatgttcgaacccatcacaaggaagctaaaaaccttgaaaaaagattagacgaatggctaactagaataaacagcatagagaagaccttgaatgacctgatggagctgaaaaccatggcacgagaactatgtgatgcatgtacaagcttcagtagccgattcgatcaactggaagaaagggtatcagtgattgaagatcaaatgaatgaaatgaagtgaaaagagaagtttacagaaaaaaagagtaaaaagaaaccaacaatgcctccaagaaatatgggactatgtgaaaagaccaaatctacatttgattggtatacctgaaagtgacaaggagaatggaaccaagctggaaaacactcttcaggatattatccaggagaacttccctaactagcaaggcaggccaacattcaaattcaggaaatacagaaaacaccacaaagacactcctcgagaagagcaaccccaaggcacataactgtcagattcaccaaggttgaaatgaaggaaaacatgttaagggcagccagagagaaaggttgggttacccacaaagggaagcccatcagactaacagcagatctctcagcaaaaaccctacaagccagaagagactgggggccaatattcaacattcttaaagaaaagaattttcaacccagaatttcatatccagc

SEQ ID NO: 33488 - DNA, 1083 bp, Homo sapiens
taccagctgctatagttagtccttcattcctagaggaggatctctgggtggtgtgtcatacatctgccacacactgctgccatcttagtgaaagccactgtcaatagtctcctaacaagtctcctggaatgcttttgcacatatatccgcatgctaagtttctcaactcctttcaatctttgattagatatcaccttctcaaggaagcctacactgaacagcctctttaaagtgtcacccactctttctctgttcccctttatcttgtttccatagcacttgctacctaatacactatataatgtaattatctatcatatttgctatttgttacacacattctgctccatcataattaaactccataaaagaggtgttttgtttgtttccttttatgtattccaaacacaaggaacagtgcctggtgcatagtaggggcagaagaagagaattagtgaactgactaaaaaataatctgaggaagtcatccagaatggaacaggggggataaaagtaagtaaaaggcatggcaggttgaatacgtgtaggtaaatcttacagcttacaggagtcaggtagaagtaaataaagaaaatgtgggagaggcatcgttcaattaaaaatgcccaaagcaattgaccagacaggtggtccagtttttggaatttaaataactaaaggcgtacatatttagtcataagtaaattcactctagtgttgtttgtagttggggaaaagtggaaataattaaatgttcaacaacagtacaggttaaataaattattgttctttcatacagtggaatattctgcaacataaaaatgtgtaagaaatatttatcttacaatagtgaaaagaaactacatataatcctgtttggtttgaaaaaattatatgtatgagtatgttaaaaagcagtctgaaaggatatacctcaaattattaagactgatgggattatggctgtttccccttttgtttatcatctgtatttctttatttttaaaattaatcttttttttttaaacagagatgaggtttcaccatgttgatcaggctggttttgaactcctgggctcaagt

SEQ ID NO: 33489 - DNA, 1028 bp, Homo sapiens
agtgatatcaatccttatttttctgtggctactgtcaagatttttgttttcagttctcaccactttgattatgatatatctaggcatagatttctttggatttatcctcttgggtgtttgctaagcttgaatttataagtttatgtcttttgccaaatttggcagttttgacccattattactttaaatatttttttctgcaccatactcattcttcttttcttctggcaatccagtggcacaaatgttcaaacttttgatataaaagaaaaaaagaagatgaagaaaaataaggtttgttattttctcacaggtccttgcaggtctattttttttttttttttttccatagagataggttcttgctttgttgctcaggctggtctcaaactcctggcttcaagtattccttcctgtctcagcctccgaaagcactgggattacagccatcaccacacacagcccttcactttttcttaatcctttttctgtattgtgtagattggacattttctactgatctatagtcaaattctctggctctttcctccatcattctcattttactattggatcccatctagtgagatgtttttgtgtggtttttcggttattgtatttttcagttctataatttccatctggttcttcatacaaaacatattgaactgtacactaataagggtaatttctgctatactgtagtttccccttatctgtgggagatatattccaagacccccagtgggtgcctgaaactgtggatagtactgagccctgtatatacaccatgatgtttttccctatatatgaataactatgataaagttcaatttataattaggcacagcaagagatttacaataactaataataaaatagaacaattataacaatatgcaagcatcactactcttactctttggggccattattaagttaaaaaaaaaagggtcacttgaacacaggcgctgtgataccaggacagtcaacctgataaccaatgtggcttctaagtgactaacatg

SEQ ID NO: 33490 - DNA, 1025 bp, Homo sapiens
acttctatgagtataaaatatattttgggccaaaaaacagacaggtctcaacaattttacaaggattcaagccatataaagtatgtgctgtgattgcaatgagtaatattagaaattgataacaaaaatatctggaaaaatcttgaactattgaggatactaacagattgctaaataacccataggtcaaggaataaatcaaaagggaagcttgaaagtattttgaactgaatgaaaatggaaataaaacaacaaaatttttgaaattcagtcaaagcagtatttactaggaaatttgtactataaataccaatattattatagaaaaggggaagatctcacatcagtgatcttggtttctattaaaaaactaaaagacatacaaatggtcaacagacatatgaaaagacactcaatatcactaatcatcagggaaatgcagattaaaaccacaatgagatgtcaccttctacttgtcaaggtgtctattataaaaaaaaaaaagattactgttcacaacgatgttgagaaattggaacacttgtacactgttagtgggaatgtaaaatggtgcagctgcttggaaaacagtatggaggttcctcaaaaagttaaaatagaactaccatacaatccagcaatctcacttctggatatttatccaaaagaattgaaatcaggatctcaaggagatttgaacacatgttcactgcaacattattcctaatagtcaagatatggaaacaacctaaatgagtgaataaagaaaggtggtatatacatacaatggaatattattcagccttaaaaaagaagaaaatcctgccatctatgacatgagaaaaccttgatgacattatactatgtgaaataagccagtcacagaaagacaaatactgcatgattccacttatatatggtatctaaatagtcaaattcagaagcagagtggctgttgccaggggatgggggagggtgaaatgaagagtcgtttttcaatagtataaagcttcagttatgcaaga

SEQ ID NO: 33491 - DNA, 1050 bp, Homo sapiens
ggcagatgctttgacagctatggggttaaagggtagatggaaactgtccagaaccgccagtcagaactccccagctctggccctgactctggctttccttaggcgtgtagtccccaggaggcttatgaagtgctctgagccttgatttccccttctattaaatgggcttgtcagaggaccaacaggctgtgagtttgaacacaagggatgcccattctgatcaccacccttaggtagacttaaagtatgtcattgaagaacatgaatttcagcctcttaggctccagcttcaactgccttagaaggaggcaacatgacctgtgaactctagcttggcctaaaggaggctcttctggtagccttgctagaactccgttactggagcagagccaaaaagaaagtactgagacaactttggctgtttcatagaatgttggagctggtagttttgtgttgaaaggttatcaaaaggagaccattttgtcatttccaaatcatctttggactagcctgtgcttgaatggtaaaatacttgatgaaatgacatttttaaaacttctaagacactgctccccaaatctatgcacgtccaagtatagtgcagtaaagtaaagcggttgagagtgtgggctcgggagcacccccatcttcaaatcctgcttttgccacttattagctgtgtgaccttgaacaaattacttgaccactccgtgcatcagtttcttcattggtaaatagggataataaaagtacctaccttctaagactgtaaggaaaccctgataaattaacaaatacaaaggacttagcacagtgcctggatgttgtaagtgctgtgtttaacgttagcccttacactagggcttggtcattggtaggcactgagtacatgttagattttactggactgttttagatggtggaggctgtgatgcaggagaatggaaagaactcaggaagggagattaggacaaatccatttagtttatattccttagtcactgtatttacaacttttatcaaaccaattatctttcttaagagctatgg

SEQ ID NO: 33492 - DNA, 1827 bp, Homo sapiens
ggcagaacatttactttcatattctctgtaaaaccaaatcagtgagaaggatgcaaggagaactaggacagtatatgaactttttccttcttaaagctttttctgtgtaggagcatattcatataactgagaagattgtttgaaattttagcttaaggctaatatattatttcaatatatactcattgaacacttacagatattgttgtaggtattggagcaatgaagaaaacgatgagcttaatttcactgaggataagacagttaacaagtagacaaatatttatcaggagatgataaatgcaatgaaggaaaataaaataggtgagaaggtagagaatgttagggaaagtatatgtgtgtttgctgttatttaaggtggtcagggaaatcttcatagttgacatttgacaagagagaagggagagacagagggatgagacccttcaggtggagagaatggcatgtgcatgggccctgatggataccattgttggatttttggagaaacttccaggagaccacagggctggtgtagagtaagcaatggagagagtaatagatagatcagagaggttgtctgggctagaatgtacagtcttgtagacatcatctacaagatgtgaggacattgtcattgtatgtcatgtactctgagatggggagctactgcagggtttttgagaagtgtgacatgatttgatttatgtttggaaatgatcacttcagctctttcactgaaatgacactctagaaggtctagtcttagagcagggagaccaattagtaggcttttgtccggggagagaaagtgctagagctcccttgttagctatggaggtggtaataggtggtataggtggagctatatgtggatgctaaatacagtgaaagcccttctgttctgttgtcctgaaaatcaagttcattgttatatgaactttattgtgaagtaaagacataaaagcttatgcctttataggatataatttaaagagctaggaaattggaacaacccgtagtgttcaactgctgaatgttacaagatacaataagcaccaaaccaaataattaaacttttttttttttttttttttttttgcctcttgccttgtccgtgatccctttaaaacttagaatttatttgagctttttttctttactgttttgtttgatgttgctttcattttctacttgggttaagatgtatcttgctaataatctaagatcacaccgtgctgttacagaattacagactttgattgaactcaaggaagtggacaaagcctaaagctcaaactgtctgctaattacaggaacttctccggtgtatcccttatagactgtcattcattagctcctcagatactttgggtggttgggaacttattgctcctgaacaacttttccattagtaggcagttctggtttgtgagaagttctttgttgcattaaactaaaatctttcagtactttctttgggttctagatgtatcctttgaagcaaagagtggctattttttctcttaatgttttaaaagaccctgtattagggttctgtacagaaatagaaccagaaggaatgaatgtatatgttcattattacaaattaataatataattttatatagtgcatatctgtaattatattaccaattatttagttgcacttaaaatactcaaagatgtaacttaaaataattaattgttttatacatgtatctacatatctacatagatagacataggtaaaacatagagacttatttcaaggaattggctgaggtaattgaaaagatccaaatccaaatccaaaatccataggat

SEQ ID NO: 33493 - DNA, 1057 bp, Homo sapiens
tacctacctacctcaatccatgaaggctttttatttcccacttgtgacttcaatgtactttgttcaatttttaaacagttaaacattagaatgttaaaagtatagattttttgatacttttaaagaaaatcaatatgatctaaattgaaaacttaattgttttttaaagtctgctatagatgttaaattaagttacttatggttttattatcctttgtgaaaggataataagtgacagaagtaattaatgactataaaatattttcaactttaggctgggagcggtggttcatgcctgtaatctcagcactttgggaggctgaggcgggcggatcacgaggtcaggagatcgagaccatcctggccaacatggtgaaaccccatctctactaaaaatacaaaaaattacccaggcgtggtggcacgtgcctgtagtcccagctacttgggaggctgaggcaggagaattgcttgaacccgggaggcggaggttgcagagagccgagatcgaaccactgcactccagcctgggtgacagaatgagactctgtctcaaaaaaaaaaatttttttttcaactttataaatttctaaatcatagtaagtcataacagaaagtaaccttagaaaaccaaaactttttcaatgtagctactaaattattaacatacaggagtctttctacagctaagtttgcactgaagaggtttttgaaacatgtaacaaattattaaatcacacatggatgagctccaacagtgatcatcaataatatgtaaagtgttaaatgtgttgctcaaatatttaaatttgtatactagaaatattttcatttaatatatatatatatgtgtgtgtgtttttcaaataaacaggatagcagtgcacgaaccttcatttatgatctcccagttgaaaatcagtgaccggagtcacagacaaaaacttcagctcaaggcattggatgtggttttgtttggacctctaacacgttagtattctctctcactcagaggatgatgtaaaagaatatcctgatcatctctgtgttatttaag

SEQ ID NO: 33494 - DNA, 1011 bp, Homo sapiens
tttaggctgtttttgtgacatcatgtttttacttactgttgttttattccaaagatacaaaaatcatgtaaataattattacattttaaacagttatttattgtttgcaaaagctgtttattactcaattttttctgtgttcattcccctgtaaacaacaatgtgatttaaactaagggttgggatttagatcaaatgaaacattcatgagtaatagcagagaaaacagttaaatagttgccactattggaaggtcagactttccacaggtttgagtcattatttggcaatcaatctgaacattgttcagcttcaatttatgctaaaaatatgtaagtagtttttatgttaaatgtgtttcctttgagctcttttaggggaaatacatttatggaaatattaagaaaaatctatgattaaagagagtaacttgaatgaattttgttgagattctctgtataattccttggaagtgaaaattgtatagaaattttagctttaaaatcttctgagaagaagggcttgcggacttacattttgtggtgttatgcaggtctgcatgaacctgagcttaaattttatctccctgagagattagcagggacgccacacagcttacccaactgacttattaaacacagtattgtcccaagccattgcagttagttatgtaggcagatgttgctcgggatttgtttgcagtgagttagtgctcttccccttactttaatgtgtctttttgaactgtcacctagtgttgcattgtgaattttgtttttaattttggaatcttaaaatatatttttctacgtaattctttgttttcacactaactgacagctgttctatttctttatcagaagtttgtgtatagtactcttgttggtttattctggcacactataaagtttattcaaataagttgggtttgttcagatcaaacattcctttgctcttcagtgtccttagttagctttggggaaaattaatctgcggggtggtgctcgacac

SEQ ID NO: 33495 - DNA, 1022 bp, Homo sapiens
atctctcttaatcccctacatgaattcacccatttgtgttcccattctaggttgtctatatattggtgtctcaacatatctgtgcatttttttcaggttctttttttcattcttatgaagccctttcatccctacattcagcatgaagcattcatcaagtaatctcttgtgagtaaccccttctccttactcagtagtactttcttatacattcatggcaccttgccatatgctacctagtaccattttttaaattttgtgcctgatccatgtcaatatgtaggttcttgatattaataataaattctcatttaataagtttctagcagatgataagaactcaacaaatagtatatatctgctactattgctaaagataatatgtacattatttcatttaatccaaggagaattaaattatttcccatttataaatgagaaaacagaatgtcagaaagactaaacaacctgcccaagattacacaactgatggccccgggggttaatattcctgtacttccacatatgtaggaagagtgccttatgcttttttgaatactcactagctagcatagtaattcacgtatagtcaatactcaatacatgattgatgataaaaatgtaaacaggtatttatttcaatgaaaaagaaagtttcactttgttcaatatcccatttccccatctgaatatttaagaaaacaatataatgtcctagaaaaatgaatgaccagttgtacaagcatacccaggaatttctcatttggtaatttattccaaggaactaatactgagaaaaaatattgtaggggaaaaaaacgtttattttaccactatttaattttaaaatttggaaatatcccattcaatagagtagtttgtaagtataaatatgtcatttacataatgaaggaaataatgtgaaaaactggataattctgatgtctgtactacagagaaaaaatattttttaaaaatttagtaaaaaaataacaaaacctaaagccttccaagtctatcac

SEQ ID NO: 33496 - DNA, 1083 bp, Homo sapiens
ccgagcctggtttgctcacctttgaactgcaaagggatcaagttcagcttgagttccctgcattgggaaggagagagagcgtgcaagagagcgagtgggagagggggaaaggggaaaggagaggagggaggagagagaggagggaggagagagaaagggagggagggaggggagggatcgagagagagcggggagagagaggctgcaatctcctccctgaatcgcgcacagcgctgcagatcccactgctccgacatgcgggccgaatgcaggtgagaaaaggcacggactctgcggctgcgaacccaaacttgggcaccgcacggtgcgcactgctcagccttcgcccccgtgggcgaaaggctgctgcggtttcaggcggctgcttcgtgactaatgaccttgcgcagagttgttaagaaaaaagagaaacccgcgctctccggggtgagaagggactgactctgggcgtctctgaagatggctcgggcttctctttggcgcgccggggggaccctgacactgaccgctctgtgacgcgagtagtctcccctgcaccgtgcccgaagcgacgtgccgggggatttttcattctcgatctgttgactggctcccccgctgcatgagcagagtcggagttgagactggcttgttgctggccccagcgcctggtgcaggaagcgactcacgtttgtctgggtggccggagccggagcagagcctgggtttggagtgagtgcctggaacgtgaattggactcaactcgagtagcagcaaagaccagcgggctggcaggcgggggaggctgcaggctcattccccacctcttcccagccccactgcccgtctgccggagcggttctggccccttccgacagagcggggactagagccggggattctccgcccgctgaggggatgactctgggttgggggagcgccgaacccgcggcgcgcagtgtcccgtgaactgtgagtactgcgactgaacggcggcaggcgagcgggcgattagcacccattgcatgaattatgaaacaataactttcggaagaagcaggaggaaaaaaagaagcatctatc

SEQ ID NO: 33497 - DNA, 1050 bp, Homo sapiens
aaaaaactggaaaattgaacaaaaaagtcattaaataattttcaccgtgttccatttgttataactgaagttacacaagaaccacattttgaaggggaaaacaagattgtctttcatttgtcttttaaaaaaacaaccatatacactatatgatttattatgaaagaaattttgcaaaatataagcaaccttactttctgtaactatttttttcccaccacagaacaccacgagtaagcaggcagtttatgtttgagctgtgacaatttcaaatgtgaacactagattaggtcttcttagttctgggaaggtcacaccctaaaacttatttctattgggagctaacatttccttgataaaataagttacctaagtgttctaaacaggaaataagtgctatttgatctatttattttcaccagatggaaatattcctccacatttcttgtttttaatttgtgtttcttattttgaacgaattcataattttgccctagctacataaaaatgaccatatttgaaccagttctagatctgacaaatgactgttgttaaattaggattatagggaaactcagaagttgtacttcattgtcaacaaaacaaaataagactgtaaacataagcccttgcattctgggactctatccaaacgcattcagcaatttggctgtgcccaccttcagaaaagccataatttgattctaggatctgggtaccataatgcagtcagaggatcttagcattcaataggcactcgtgggggctgggggttagaagttggtcagttctgtttccttggcacctaaaatctattctcctcctggagctctttgctgctcacagaaaagaaaagtacacaattttatacataaatgtgatttttaaattttgttttgcaagaagactctcagattaatcattccagaaaatattttgtaactttaagattttaacaaatctgaaattttctttaatgattgcagacaccgggaatcataaataaataggaaattatcctcggttattaactgtgaatgcctttttatt

SEQ ID NO: 33498 - DNA, 1041 bp, Homo sapiens
accactggtgtataaagtgtttattacagaaaaaaattcttgaagtctgtcatttaaattccgcagaatcctctgtttattcaaatcagcagatgttcattgagtgcctgctaatgtgctaggcacaacagaagccggggtattgcagtgaacaagaaagagtgacccttggccctcatagagtttatgtgccagatatatttaaagtatgcaatacttttcatagagtaattagatatttattaagggcttactctgcatcagggactgttctacgtacaatatacagtttatgacaagaaatagaagatttctgctcttatgttctagggatatatagtatagaactcagaggccgtcattctcctgttgtttattaccaaatgtaatgaagacatacctaactgatagtatttcttaatctatagattggagtaattcatatgctttttacaagttataatacataccttatgactgtgtgtgcaatttagttggcttaaaaattgatttagatttaagtgtaaatttgttggactgaattctaacagctttgactccttctttattcttttgttttatagaatttaacttgaatggaatcttttatttgtctaagtctatttctgtctagtaagggagttgaaattgatcatgtcttgactttgtgggccatcagagaaccatgacattccagggtattgattttgtggtgttaaagggtgacagatctactgttaaagtgccgagagagaattgggtttcagattgtacaccataagcagtcttggcttttgctgagacatgactagctttttaaagtaatggaaggaattgtaagtcttaggtaatttttagtgcataattttgaaaagattaatttcagcaagcattatgtaatcatgcatagaggggaataagttccatctatgataaatattgtatatctaaatatatacaacttggagtgtgtgtgtgagtgtgtgtgtgtatattcagaaagtatactctatactaagggtattgagtaatgtttcaaga

SEQ ID NO: 33499 - DNA, 1054 bp, Homo sapiens
aaggtgaaatgcctttggaaaagataaccctgatccttcaatattctctatatgctattgtgtgaaactcagcaaaattcagcagatacaagttctccagtttctggtctgctataattcaaatataattcaaatcttatagctctgtgagctgtaattttttcaggcatagacaagtgaaaggaaactgtgaaagccaaaatcaaatctctgtcacaaaccgatgatgaaagtttccaaaaaggttgaagaataatttttgaaaatcactttatccacagtcataagggtatatacaagttcctccgactactagtagcataagaatcatgaaacctaagaattataaattgtcatattatcataaaaagataacactgattatgataaccatttcacaaatagttgttactttgcaaatatttaatgtgtctattatatttgatgaggattttatttcaaaagtttttcattaaatagcaaatgtgctgtgtttattaagtgataagatttcagtgtatgaacagaaacaaaaattcttgcttaattgaactggacaacatttaatatctgaaaagtcagtggctttcattggaaatagttaactaagagtattttggagaagataaaatgagcaaccattgagaatgttcagttttgcttgtttgaaactactttttgaaagaaatatattaattaataatcgtgactggaaaatgttgctctcagaaatggccctctggtcttggagtacatagtatcatgtgtgaaaatataagaaagttatattttgacttcatatcatagtttagcaactgaacatcagaaaaaaacaaagccaatttcagatttgcattagatgacaaatctcaataatttttacagattttatggaagggctggctactctatttttatggatgttaatatcaccataataacctatcttaagctgctttttttgaagttctaatgaagagttaaaattagggtgattcaaaatgaacgtcttagcctatatggttcgatgttaggggaaaaattaacatttcca

SEQ ID NO: 33500 - DNA, 1028 bp, Homo sapiens
tttttccgtctttgtattttttttctttagtgaagattcagattggttctctctatgcacatcctggaagtggaaagaactgtggatcttattttctgtggcagaacagtgatttacagggaaaatagttcaactgagaaccactaaatgcagaaagtctagcatccaagactataccctcagatcaggggccaacgtttcttagaaatcaactcatccacatgttgaaaaatctaactaatttatggactatagggagaaaagcatctccctactttcttcctaccttccttccttccatccttctttttttaaggtatttactttgaagtattacattagtaggcagagactgagtaaaatcaagtaacaatagagcactagtatgaaagggcatcctgaatttataatattgtttctccaattaataattattaaatatacagtatatatctatgttatatgtagtatatataataatcacaattgctatatataataattgctatgtattatgtagtatactctctctatatatatgtgtgtacataaccaattaataattactaagtattttggacctgaattatcattattcattagtagagataatatagccaaaaggaatgagaaggggacttgtagtcaagctgacttaagttcagtcctcaaatttcttgggcctaatttcttcatatgtaaaacagaagtaacgatagtttttatatagctattgtgtgtaagctgcaaaatatgctaaatacctggaatagtgtctggctcatggaaataataagtggcagcaagtatgatttcgtattatgcaagttgaataataattattggcatcctaggcccatccttatgggggtcacggtaatttttattttttgccatagaacctgtgatgagagaaatgtaacacttaccccaggtcacccaataagtcactctatgtcattaggacttaagggttttcagcttcactgtctgatttcagtccattaggccacaaagtcatcaaaaca

SEQ ID NO: 33501 - DNA, 1079 bp, Homo sapiens
gtgccttgtctccctgccttgctctgtcggatgtccttattctttccacttcttttctcatttggacttggcaggaatgccttagctcagtgccagtgtggtaaccttaaactcgcttacttaagtggctgatctcatcgcttcctttatgtggtttgtgggatttttcccctctttgccttattacgtcccttgaccaccttgcagcttcatctatctcatacttccgttattgtattatcctttaaaaataaaacaataaatatttaaaacataaagcatttttatgatagttgtgggggtagatatttttatagaaacaataatgagaaaaaaaatggatttctccaagctttataaagccccaactacgcagagggcaaattctcaagttacaggattctacttgtcctatttctgaggagcagaacaaaattttttttgcagatattttaagagatggcaaaacagggaagcaaaccaaagtcattacaaaagcctcccagtgtagacccagccatctgcatatagttcacagaactcttctgtttatttatgagtcgtggaatgtgtaaagccaacttctagctgtaaaaggacgtacagttgctctcatataatttctttggccctttttttttttctgcaaaaccaagagtttgctttctcatattcaaggaaacactgccatgcataaggacccagtttttgggaattccgattcttttgcaaaagcattttaaatgacaactaaaaaatacacttaaaacgtaagactatggaatttaaataaatgcaactgatcttgatatatatatctcgaagcactgcacctgcctaaaaatactttttcatagttctaatgtactctgtaaaagaaacagaattaaattgaagaaagaaaccttcatttttcagtataatttggttcttttcaagataataaccttagattaagacagtcacaaagaaagacaatgaaaaaaagtcacttattttaccttaagacttcacaatttgcttcctagtaatatatttttccggaggtttttataggggaaatgatttctcaaatttca

SEQ ID NO: 33502 - DNA, 1032 bp, Homo sapiens
aaagttattcaaataagattgcaaacagaggtgtacatatatgcaaccaactaaaaatatgaatttattgactttcaaaattcacatttttactgtcaaaaagaaatatagatttactttctgaaacctaattgtgaaattgtacactgaacccttcaaataattttggaagcttttttcttttttttttaatcttcaaatgactctactttgtcaggcatttcggttatgagagaacagtggtagtggtggtgactcaacgtggaggttgaaatagagatgtaattaaatacattctgaaattagaaaacaaggttaacgatgatatttgaatgaaatcttttcaaacccactgtcaaaacacaacttcttttccactcttgtttgaatctcatggcaaccttgctaccttttacagtgacttctcttctggggtgtgttttctgaatgcctttcatttaataggcatattttagaaacctaatttctctgtctgcgtcacatcagcaatgctgtagaaacctaaccattttagactgtctggatgctgttcttatcaagtcattaacattattattgagggtgacatagagaagttaactcccctcactcggagcatcttatttgttaaagaccacagccctttaacctttataaaggatgtggtttcagcaagttaacttttaatgtggagctgttttccattataatttcaatttatgtctgtctgcagaacttcctgcaaatcttacaagactttttgtgtaagtaaagctcgtctgggttgtgcataggtgtgttctgaggatcttagttcttggaatgttagaattggagcccagactcctcattttagggatgagagaattgaaactcaggttgtcctgccaaggagcatcaatacaacaaggtctattatgagtatcctgacagttcattaagtgtgttttcctctacctcatactgaccttttgcaccagttctatcttggttaaaactgtattttgagaccctgaaaacaggtaatttata

SEQ ID NO: 33503 - DNA, 1077 bp, Homo sapiens
tagtagttttatttatttatttatttatttatttatttttttttgagatgaaatctggctctgtctcccaggctggagtgcagtggcctgatctcggctcactgcaagctctgcctcttgggttcacgacattatcctgcctcagcctcccgagtagctgggactacaggcgtccgccacctcgccccactaattttttgtatttttagtagagacggggtttcaccgtgttagccaggatggtgtcaatctcctgatctcatgatccgcctgcctcggcctcccaaagtgctgggattacaggcgtgagccaccgcacccggcccagtagttttatttatttggggacttactgaattttatttttcatatcgttgcatatgaggagcacaaatggactttttttttttttttaacctccctgagggcagaaatagtagcagcagatgtacagtttcagagctttggacaacagaagtagaagtactagaagtactggcacgtaatagatggaaatgaaattgttctacatccatttccactcattcaggcaattcatgtacaaactaaaaagtcctttcccttttccacattttacaggtgaactacttaggttttgttggtttgttttttgtatgctgttcttaattttggtgaatagagaggtgctttctattccattgactaagattttcttttagagaaagtaagcaatattcagagttattgctgtaagttttgcttgagtgcttacgctttaattcatattttatgccatgctttttcacacaaagcacttatggcatgctctagaatccataagaaatgaatatatgttaattagcttgcattcagttattttacattcagcagctctttatttctgttggtttatattctaatacgatttgcaattctagtgtagtatatttagtacacggtctttaaggtatagtaatttacattttaatcatacattaatttataaagaataataaaatgtgataaatgttttcttctatgtaaatttatgtttacatcctgactcacaactgggagataaagcaatttggatca

SEQ ID NO: 33504 - DNA, 1032 bp, Homo sapiens
tgctccaatttttcttaatctgaacaccagtatttcatttgccattgctaaaatgtgtggactgttatgaaaatttaacatagtgttttttttatatgagtcattcagctggcttctaacatttattttaaaactttgatttttgtgtttttgtgtgcaggatttttttatttcttctaaaggattttccaattctaagtctgtcctacagttaagacaaaggttataaatggtgaaccactgttatctagaaggggccactctgtcatctacaaaaaatagtcgaatgaagtgagccagccctaaaattcagagtcaatttctggtccaggtacactaaacggtcttccagtgagcataagcctcttacaaagagtgaggtaatcaagactattataatgcccaacctatattaatgtaattatccactacaacacaaacaaattatctctaaaactcagttacacttcagagatcttattttgctcataaaatcactgacctcacccacatcgcccacaccctaagcttcatatcatctaacatgacatataaaaatttaggcacaatcacgcctagtccatctcaactgtaccccaccccactctaccacacggagtgtcagactcactggacagcataaactcacatacatttgcaaataaactattttaaaactttagccctcaccacctttcttgccattgtgtttggttctttctagtttaaacagttccattcttatgactgtttcttgaacacttcctagatgaggaataaatattcgatgttactaagagacgtgaagaaatgataaataccttttccaacctttcaaaaggtaacatgatgaggaaataagacatacagtcacaaattcccaaaaaatgtggaaataggattaaattcttaataagtttgcctttaaatggccaagtgtgtaatagagacaaaaatcacatttacaaaagatttctgatatagagatagattatgaaaagacctctagattgaacagattttagataggtg

SEQ ID NO: 33505 - DNA, 1061 bp, Homo sapiens
cacacacgaaaaaaacaaaataaagccaaagtccctcaaatctttattggtgaatttactatgtgaaatagtacttctgtaaaattgagcaagtgaaatttccgagtttaacttccttttcataaagtgtagttaagcgtatgtggcctccagattgcaggatttcttgaatttcaaatggtttatcttgtaaaagtgctggacgaaaacaaactgctcggcagatgttagttgttttatctgttgttgaggttatgaggaactgagtgttgcttgggctatttataatgggaaggttgggaagctggaagcgacactcctttgcatttatttgctgtgagcctttccccagtcacagagtttaacactgaaagtgatgtggaaggaaggaaatgggcatgagtggaggtgccacaggggcagtggtagctgtctgctggtgaacacataaggaatcttgcttcactattgtgtcatcaacccttcttcaaaaagggatcaacagatcagctggaaagggagaaaccaggttggaaataggtttcatgtgtgaaaaaaaagataaaattgggaagtaatgatttgccaatgtgttccctctgttctgttaggtttatcggcatgatacgatttcaaaaccatataacactttttctccctgtgcttgttaacattattttgttgagaatcggatgaaagattttaaccgttttgcaagtagaagtggaaacaggttgagtttatatgtttttgtaaaatacgtgaaacatagcaacatgaggcagtataggtccagtgtggtcactattagccatgtacagctatttacatatgaactaattaaagtcaatttaaattaaaaattcagttccgttttatagcccacttctatcaccggagaaagctcatttggatggtgctgatacagagtagtggttaacaggtcaagttagataaattcctgggttgcagcccaacttcatcacttactagcactgtgactttggacaagttcatctcgagcctgactacttcatctgcaaaatggagacgataataat

SEQ ID NO: 33506 - DNA, 1050 bp, Homo sapiens
caacatgctgatgtgggacccatagaatgaaaatcacagaaaaggctggggtatatatgaattgtctgaattgtttttaataaataataaagtacaatttcatcaactctcaactttaaggtaattacctatctaatcactaccatagttcaaaactgtaaacacatttatttatttaaaattaatgtttggggctatactaaaggaaattgacaaattacatatggaaaaactgtaatatattttctttttttaatacagcattcctataccataattattttttaaggtctacttttctaataatactgtcacttaaatcaacaaaaacaaatgattatttttagtgtagcattcttgccttttagttaaatattttaattatataagcatttgctaaaaaattacataccctatattttattcaggcatcaaatgaattaggaaaattttagtcagcaccaaatcttcttagaaacagtatagtttgaaaaacctcaataatttcttttgaaagttttgacaataagtggatttaaagctggcaaacatagtttcttgcaagaaaaaagctacatccatctctcgggtttgatttccttttggccatgtggaaaatacaaaagaaataaaaatcggtcagtacaccgaaacaaaccaacaaacaacaaaacaaaaagacaaacttcctttcaaggttatataaataatattcgttttatttttctaatttatttgtcatgttggtttattattgctgaatttatcctctgactactaaatatagaagatgtctcaattttcattacaaactgcccccttctagaaaagcaaaacagcaacactcacagaatacttgtctaaacttaaggtttgatgcttttagagagtcttgttatttactaggcattgggtacaaggtactcaatacattttgtaccaatgaggcataaaaatctacattttatttggtaaatgtatttgatatataacttcagataagatctctctatagaagaaaaaaattaacacttgcattaatcttgccag

SEQ ID NO: 33507 - DNA, 1030 bp, Homo sapiens
tagattgtttgttcactctgataatagtttctttactctgataatagtttcttttgctgtgtagaagttctttagttaatattttcaagaggttaaaggaggatgaggctgagcagttactgagtttacaaaggagatcactgtaagccttcaaggcaattgctttgtcatggtaaaggcataggctaaagtgtaagggacttaaaattaaatgggagctgagaaaatggagctggctggaagtagtttacctttctctaaggatatctaatgatgagagaaaggagagaagatggcagcttctggtgtaacttatgcctaaaagtggcaatctcttagggacaacttctgtttatttaaatacataaataggtcagtaagtaagtaaataatagtggtgcctaccattaagaaacaatgaggagagggttcattcagtataacagatgccacattttagggggctggaaagaaattagcaggttatgcagaaagccagacattctcaagattaacaaagtggactctgggatttttatacaaactgtgcagagaaaagtcaaaaggtatacacatgtctgtgggcacacattttaatactataactgtggctttttttcatttatatagtgtaaattttatatcccatatttctttaagcataaatatcctatgacaacaaggtattatggctttctcccttttcatttttttaagtgtaattatcagcaagaagaatgcattcaacagacacagaatattgatttcatttttcattgattgacatttctgtgttttcttatgctaggaggctaacaactttcaattttatgtattttatctagatttttaaaatataataatgatttaatatatgtgggataatacattactaccacatttgtgcactagagttattctaaagtactaagcagtgaaacagacaaaaatgtgagtgttgttagtaatataatttggtgttttaacaaacaataacaagaatctctaaattaattaattggttatttta

SEQ ID NO: 33508 - DNA, 1048 bp, Homo sapiens
ctttccatcaaaaagcttattcagatagtcagaagataacataactttaatacatgcaggtatataatacatcttctttctaatgccgacaaatttttctatgacatttatgtggttctcctatatttaattcttagggactgaatccacaaaatattttacaaaaagatttgcaagggttgagcatgctatcatacatgcttttttaatctggggcctgacagattgttaggatttaataaataatggtaattattattattattatcattctaaaacaatccaaatgggaaatgtattattttcctccatttcacatttgagaaaactcatcccccaagttaagtaacttgtaaaagagatagcagttattaagtagcaatgctgtcagtcaaagcaagggataattgattttaaataatggtcttgtcttctttataataagggaatgcatattcaaattaatgtattcagtatttaaattttctgcctcattctatagagtataatggtctctaagattgaatgaacaggtgttagatattgacatgagcatttctagatgttatctcttgtatgtattacagcatctcaatgagggtcagtttttataaatgtccccattttatagatggagaaactgagacaggcttagaaacttgctcaaaataagtagctggtagtaactggagaagacagtcaacccaattcgatctgaaaactatatgacttttaagcttgatagtggactggcacaaagttgtataaagtgttgaaaggcaagaagatttaaatgtttacagtatatcaaaaatgaaaaagcaggtaaaaagaccaaacattatattttgagccacataataagtatcagcactgttttcaaaacagaaagctagaatgctgtttttaaaaatttagattgccaacagaagaaaatcagatgaagttttacttattgttttctattatttcattgcaacagaattgtatgtttaatataaaaaatttggaaacaacacgcaggagaaaaaagtcacctttactccta

SEQ ID NO: 33509 - DNA, 1045 bp, Homo sapiens
ccttaaatagtcttttcttcttagtaacatcagcattttaatacagcattattataaattttagttccttaataactggtgtgttaactctggaatactccaaactgtttctttttcaaaaatcataaaacgtttaatgtttcaccttttcttttttttttttttttttttgccctcttttaagaactcctaaaatgtttgtggcccaacagcttcttggtggcagacattgctgatatgctgctatgaccataaattattttggctcaagagtgtgattaataatttactcttgcagtagtccttcagattttattttattaatgtaagaacacacttagaatcatctcctgattcatgcgtagctatatccgtattctgcgcagaatgttaggaaatggatagtgctgaatatttagggccctacctttcaatagaatcactgcacacatcagcatgtctatatgtctcctgtatgacagatctttaagaacataggaattcgaaagatatatttttttactcaatgcttctaaaaagatatataaaatgcatttgcctgttcaactgtctctatagtgtatctccaggcatataatttttcatcttatcaagtgacttttaccaatttgacagaatcaaacaattaaggtaaaccatagcttcagttttgaaaaataatgctctactttagaaggaatgtatatggcccttttattccaaaattcttgtgttgatattttggtagaagtttctagataattagttctagttttgctatacataatatctgtttgttttgccataataatgtttgcaaaacattattagttcttctaatatgactattataagatattcaaaaacaattctcaagcattgtattaaaaccactggtatcattgatgcaattgtaagacccttaacattcctgattaattacattatttcatttcactgaaaattattcccaaactttacgtttcttttaacatgtagaatataaactcatgaatagagaccatgcctctagatattattttaa

SEQ ID NO: 33510 - DNA, 1054 bp, Homo sapiens
gttctgttccattggtctatatatctgttttggtaccagtaccatgctgatttggttactgttatttacctagtagtcattaaggaccaggttgttcagtttccatgtagttgtgcagttttttgtgagtttcttaatcctgagtcctaatttgaaactggaccccttccttacagcttgtataaaaattagctcaaatgtattaaaggcttaaatgtaaaacacaaaaccgtaaaaaccctagaaagaaatctaggcaataccattcaagacataggcatgggcagagattttatgactaaatcaccaaagcaattgtaacaaaagcaaaaattgacaaatgagatctaattaagagcttctgcacagcaaaagaaactatcgtcaggacaaataaacaacctacagaatgggagaaaatttttgcaagctatccatctgacaaaggtctaatattcagaacctacaaggaactcatacaaatttacataaaaaatccctatcaaaaagtgggcaaagaacatgaacagacacttctcaaaagaaggcattcataaggccaacaaacctatgaagaaaagctcaacatcactgatcattagagaaatgcaaattaaaatcacaatgagatatcatctcacagcagtcagaatggcaattattaagaagtcgagaaacaatagatgctggcgaggctgtgtagaaataggaatgcttttacattgttggtgggaatctaaattaattgaaccactgtggaagacagtgcggcaattcctcaaggatctagaaccagaaataccattagacccagatatcccattactgggtatatacctaaaggaatataaatcattctattataaagatacatgcacctgtatgtttattgcagcactattcatgacagcaaagacatggaatcaatacaaatgcccatcaatgatagactggataaagacaatgtggtacatatacaccatgaacactatgtagctatagaaaggacaaaggtcatgtccttttcaggggcatggatgaagttggaaaccat

SEQ ID NO: 33511 - DNA, 1005 bp, Homo sapiens
gctgcagggtattctgttgagtaaagataccatatttaagagctaccttattgttatttatttttcaagttttcactattatgaaatcttcttgcatactactaattttatccttagggtcacaagtagaattgctgagtcagagattatgcatagtttccactgttaatacagattctcaaatttgctttcaacatctcctaccagtagtaaatgactagcagatttccctacatcctacactgacatcaagtatacattttaacaactcatttttatctgggtgcagtggctcatgcctataattccagcaccttgggaggccaaggtgggtggatcacgaggtcaggagttcaagaccagcctggccaagatggtgaaaccccatctctactaaaaacacaaaaatttgctgggtgtggtggcacgtgcctgtaatcccagctactcaggaggctgagacaggagaatcgcttgaacctgggaggcggaggtagcagtgagccaagatcatgccactatactccagcctgggtgacagagcaagactccatctcaaaaaaaaaaaagaaaaaactcatttctagttagataagcaaaaacatgtatgttttgtttagcatacctttgattgttaatcaagttgaacatattttcacatataaggctttccctttcatatactacttgttcaggtccacacggttctttttttaagttggtctcttgaataattccaacccatttcacattaaagccaatgttaagagtgaaatttttatttttcaagcagattttacttcatttatttttattttaagtttttaaaattatttttaatttttgtgggtacatggtatatatatttatggggtatgtgaaatattttgatacaggcttgcaatgcataataatcatatccaggtaaatgggatacacattgcctcaagcatttatcctttgtgttataaacaaacaagtgatattctttaattatttttaaat

SEQ ID NO: 33512 - DNA, 1030 bp, Homo sapiens
acctaagcgctgatgaatgatggatagagatactgtgatatactattcagccttaaaaaaagtaggaaatcggccgggcgcggtggctcacgcctgtaatcccagcactttgggaggccaaggctggtggatcacgaggtcaggagatcgagaccatcctggctaacacggtgaaaccccatctctactaaaaatataaaaaattagccgggcgtggtggcaggtgcctgtagtcccagctactcaggaggctgaggcaggagaatggcgtgaacccgggaggcggagcttgcagtgagccgagatcacgccactgcactccagcctgggcaacagagcgagactccgtctcaaaaaaaaagaacaacaaaaaaagaaggaaatcctgccatttgtgacaacatggatgaacctggaggacattatcctaagtgaaataagccagacacagaaagtcaaatactgcgtgatctcaaatgtggaatctaaaaaaagtcaaactcatagaagcagagcgtagaacggtggttaccagaagctgggccatgaagggattgggaagatgttgttcaaagggtacacactttcacttataagatgaacaagttctgggggtctaatgtagcacatggcaactatggttaacaatactgtattgtatacttgaaatttgctaacagagtagctctcaaatgttatcacacaaaatggtaactagatacagtgatcagtgtgtgttaactgacttgattgtggtaatcatttcacaatgtatttgtataaaactcatcacattatatatcttacatttatacaatttgtcagttatacctcaataaagctgcaaagaaatatcatttctaggttgtgcccatcacaacctgtaggagttaagatttcagcctgagtttcagtttcaattccaataccactactttctatgtaatactgaacaagttttctaacatctctaaactttaatttcttcctctataatgggaataaaatcaaattattttttcaaaatcat

SEQ ID NO: 33513 - DNA, 1026 bp, Homo sapiens
aacaccacattccaataaaaaatatctttagaccagattcttcacgaaagacatgaaggttttcatgcttcaaggtttttgacttttttttttttttttgaaaggagtcttgctgtgtcacccaggctggagtgcagtggcgtgatctcagctcactgcaacctccgcctcctgggttcaagtgattctcctgcctcagcctcccaagtagctgggactacaggcgtgctctaccacggccggctaaattttgtgtttttagtagaggcgaggtttcaccatcttggccaggctggtcttgaactcccgaccttgtgatccacccgccttggcctcccaaagtgctgggattacaggtgtgagccacggcgcccgaccagtttttgacatttctaagccaaaagttccatttgatgaggtcttagatgcaggggcaatgtgtcccttttcagatttcagatgtttagaaaaagatgtgtcatatttgggccaactgaaaaactcttgatatgtaggtttttatgaagctgtgcagaatgtaggaaatacattttagaaccaacaaagaggcatttaattttgagtgtgcctgtctcctttgagatgagcaacagctatttttctcttcaaaagacaatgcgtgtatttatcagcacattttatataatcagcaaatctaaacctctgaattaggtaagccctataggtttgttgccagaattagtgaatttatacatgcaaagtgcttagaacagtgcctggtacacagtgagcactcaatattatttattgctattattatgtttatttattttatacttttagagtataattttgatgttaggtttggattgctgaggccaagcaaaatttagatagaccaacccagctaatccactagaaagatatttgagggttattcccatctaaagatctatgggatctttggatatcatctgtgagaaacaacagaagtttgtagataagacagatatagattcaaatgccaccttcacaatttattag

SEQ ID NO: 33514 - DNA, 1045 bp, Homo sapiens
tgagatgtttttagactttttgaaattttaaaatatcagagaaaatagtaatttcctagtgttttttaaaattgtgctgtgtaggccaggcgcagtggttcacgcctgtaatcccagcactttgggaggctgaggtgagtggattacctgaggtcaggagttcgagaccaacatggtgaaacaccatatctactaaaaatacaaaaattagccgggtgtggtggtgcatgcctgtaatcccagctactcaggaggctgaggcacgagaatcacttgaaccctggagacagaggttgcagtgagctgagattgtgccattgtactccagcctgggcaacaagagtaaaattccatctcaaaaagataataaaaagtaaaataaattgtgctgtataaatcttgaggtgcatttctgaggatggtgcgtcttctggatacaactgaacatctcgttctctccctttggcagggcatcagacacgtggaccactttgggtttatctgtcgggagtcttccggaggtggcggctttcattttgtctgttacgtgtttcagtgcacaaatgaggctctggtgagagaggacaagcaattcttaccttggaaccttctttacaaggaattttagctccactgatttttctgtccttagggaaaaccagatggtcattgacatatcattatttgtctttagttatttacttatgactatttagtaagcagctaatacacatctgaagcttaattggctgtgcattttatattttttatttctgaagaacttgtttagtgtcaccttctggtctagcattttacaatgtcattttagacatctgatcaaaggagtttgccttttttctcagtagtttgtatttttagtttttactgtatcagtctgttctcacactgctaataaagacatacctgacactgggtaatttataaaggaaagaggtttaatggactcatagttccacatggccagcgaggcctcacaatcatggcggaaggtgaaggaggagcaaaggcacatcttacatggcag

SEQ ID NO: 33515 - DNA, 1046 bp, Homo sapiens
ttataaggtatatacaactgtgcagccagtgccaagattaagaaatggagcatttctggccaggcgcggtggctcatgcctgtaattccagcactttgggaggccaaggcgggcggatcacccgaggtcaggagttcaagactagcctggccaacatggcgaaaccctgtctctatggcaaatacaaaaattagccaggcatggtggtgcgcacctgtagtctcagctactcgggaggctaaggcatgagaatcgcttgaacttgggaagcagaggttgcagtgagccaggattgtgccactgcactccagcctgggggatagagcgagatgctgtctcccccaaaaaaagaaagaaatggggcatttccattgcctcatagtcctgttttgtgtctgcctccaggtaaccatcatcctgacttctgacatcatagtttaattttgaacaagcaagtaatttttgatggcacagtgatgttacccaattcgattccccattattttcctaagacttatctctctgactaatgaatgttcataaagttaaatcacctttaagaaataatgatttggcccagagcagtggctcacgcctgtaatcccagcactttgggaggcagaggtgggtggatcacgaggtcaggagatcaagaccatcctggctaacacggtgaaaccctgtctctactaaaaatacaaaaaaattagctgggtgtgatggcgggtgcctgtagtcccaactatttgggaggctgaggcaggagaatggcgtgaacctgggaggtggagcttgcagtgagcccagattgtgccactgcactccagctccagcctgggtgaaagagcaagactccatctcaaaaaaaaaaaaaaaaagaaagaaagaattaatgatttgctactatcgaggatggtgaagttgcatgggagattttagggaggtgacacctcactaattgtatttcagaattacattaaggaaagatttgtttcttgattgtgtataacaccatcgacgtttatttctctgctttagtgacttct

SEQ ID NO: 33516 - DNA, 1131 bp, Homo sapiens
aggtaaatgatagttccccttctcaaaggaatttctaaggtagtagccattcttttgatgcatattctcattctcatagagagtccaattatggataattggacaaagctgaatgtcgcttttatgagaatccattctttctcttttatgctttgaaaaatgtgtagcattcattagtgaattaggatttcattattcaaagaagacataaggtcttcgaacagcagatgactgaataaaataatacctaacagcagtagaatgaggggaggacatattcaaggaacattttatgcccattagattggcagaaatttttaaaaagtgacaataccgtataaaggtgaactttcctatactgatactgggaacatgaatttgtaccattcagggaagagaaacttgataatatctggtgtagtctgaaggggcacagtccctgtgacccagtgaggacattcctcattatttcccttgccaaacatttcacatgagtctataaggagctctatataagagaggtcactgcagcctcctttgtaagagcaagaaaaaaaagcaaataagtgtttaacaataggaacatagataaattaggttatgcagtgaatatttgcactctgactaaagtgagtgaatcaaaaaaaatttgtcaacaggaataaatctcaaaaataatattgaaagaagaaagctaatttacagaaggatgtgtacagtatgacaccattcatttagtttcaactacatatcttttatggacacatacatataaaagcagaaaacatgaattgataggataaacaccaaatatttctgcatatggccaggtgtggggaagtagtggtgattaagcttcaaagatgtctgcagtggttcccattaaaagtagaaagtaggctgggcacagtggctcacgcctgtaatcccagcactttgggaggccaaggcaggtggatcatttaaggccaggagttcgagaacagcctggtcaacatggcgaaaccccatctctacaaaaaaaatacaaaaattagccagatgtggtggcgcacacttgtagtcccagctactcgggaggctgaggcatgagaatcacttgagcccaggaggtagaggttgcagtaagcc

SEQ ID NO: 33517 - DNA, 1050 bp, Homo sapiens
tctttgttaaaagttttgattatggaaataataaacttggccgggtgtagtggcttacacctgtaatcccagcactttgggaggctgaggcaggcagatcacttgaggtcaggagttcgagaccagcctagccaacatggtgaaaccccgtctctactaaaagtataaaactaagccaggagtggtggtgcatgcctgtaatcccagctactctggaggctgaggcagaagaatcccttgaacccaggaggcagaggttgcagtgagccgagatcgttccactgcactccagcctgggtgacagagtgggactccatctcaaaataaaaatacatataaataataaactttaaaaatagaacacagatgtgtagaaagctgtcccacccaccgccactcccaagaagctcctgttaacagtttcgggtgtgtggttccagacgttttctttgcatgtcctttatcttcttgttttatatcctgtgactatcactaaaagcatcatcatttaaaagctattatcagaagctaccaaattggaaacaaagtgcttgtagacatgtgaaatagtgagtttgattctattctttgtgatatttgaattttgcacggactttttttttaatgtccagggatgcattatttagttaggaatttcaaaaataggtattctaatcctatcattccttctttgtttattaacttaaatacttctgtaatgagaacatcccttcatcaacatttggattactttgaggtacatttctgggcaaataaacatacccttgtaattattttttagtaaaagcaaatcaggttctgttagtgccagtgtgtttttttttttttttttttttgagaccagagtttcgcttttgttgcccaagctgagtgcagtggtgctatttgggctcactgcaacctccgcctgctgggttcaagcgattatactgcctcagcctcccgaatagctgggattgcaggtgtgcgccaccacacctggctaatttgttgtatgtttagtagaaacggggtttcaccacgtcggca

SEQ ID NO: 33518 - DNA, 1033 bp, Homo sapiens
tgaattattccttgaaatcatggccgggcgtggtggctcacgcctgtaatcccagcactttgggagaccgaggcgggaggatcacctgaggtcgggagtttgagaccagcctgaccaacatgaagaaaccccgtctctactaaaaataccaaattagccgggcgtggtggcacatgcctgtaatcccagctactcgggaggctgaggcaggagagtcgcttgaacccgggagatgtaggttacagtgagccgagatagcagagatcgcaccattgcactccagcctgggcaacaagagcgaaagtccgtctcaaaaaaaaaaaaaaaatcactcattgcttgacaggcatttcataggcaaacttttctcaacgccaccaggtatgagtgagctaaatactgtcctagcagctgtggatcctttaaatgggatctgcgcttccttaagacccgtgcccggtgtccccctaagatatgatcagcatagaacttaggccacaggtgaatcctctcatgacagaagtaagtttacaaaaattcctcagcccttttgtgtgtaaaaatatattaagaataggatgatttgcttaaaaaccaatgacaacagccatatggagctgtaactatatgagatgactgagggaagccagcgagagaaagacttggcagtgaggacggaatctcgtttacttggaagagtctggctgggtaggaattacgttcattgtccttttcagcaccttagcgctaagccagcccctcatgggagccaggccactggctgcttttaggccgccagggactagtgaggagtctggggtttctgcaggtacaacaccagtgccatgaaggtgagacatggtgacagaggaaggtgtctgacttcagagcagggagtggtttcaacttgaggattctggttgagtgaatattgaataacaaggcaatgctcccactctgtcttgctcttttcttccacgggcttggaaaatattcacaagggggaaaacttggcccgaggtgtgtatctgaa

SEQ ID NO: 33519 - DNA, 1041 bp, Homo sapiens
accttcccaggtgttttcaaaggaattattttattcctccacaacaagcctgtgggagtcggagcaaaaggcaaagtgattacctgagacattagataactcgccaatattcaccctgctaacaactgaggggccttgggcttgatctcctgcttccgaatcagggcttttcctgccatcttgtcatatccaacccattgcatctgctcatgcactcaagtgaaaggaaaaaatgactaggcaaaatggacacatcttagaggtggaattaactctttttttatgttgagggatgtttctggcaaggtaactagcaacgtggcctgcacttatagttgttcctgcatgggtgatgaaagagatgctataaaactaaataaaaccaactgcctccaagggagggatccgttgactggacaagtgttattccaaagtctgggttattatgagttgcaacgtaaaacattacataagaagatttgaaggcaatattctgtgctctgaatgctgctcaaaagaaaatacttttattttaagtaatattcttttgatgatctcaagctcagtggcttttaatgattaatgagtaatatgcttattttaatgctgacctaagaatacattctgcttctcaaaaaaacgcaacagattagccacagctgggacatgtactctttaagtaatgttctcacagatgtgattaagtaacgtcttggagtatgcccagtagcagcccacgtaggaaaccagctagccaggaaagaatcacttgaaactaggcacccagtaccactgcagtgaggcagccccaataatatttgccttaagaaacgcttcctttccagaggcagacttaaaagtacagctttgaaatccatttgctcgattgtggtgtggcaactttaggattatttataaaggcactcaaaggtacatcaaattctatttgttacagatttacaaaaagatttctttgttctaaatatacaaaactatatttagaacaaaaagcataaggatcagatttccctattgagttgt

SEQ ID NO: 33520 - DNA, 1031 bp, Homo sapiens
ctatcaatggtgatttcaatcgcaatattttaaattgatgagaatgatttgtaaacatgaagttactattacgtaaattctgtttgttatagagtttcttcagttgttacccaagtgtcatcctagagaagtcagaagaatcagaatccatcgtattttagagttatgtgaatctacatcataaatgggcattaacattctaaattgcttggtttggagaatgtgttagcagcatagctatattcaactagggagatgctaaatacacagaagtttcaagagccttggaacagaattacaggggaactatatatgtatatgtatattttattaaacacccatctgcactatcagtattgcactaatgtggaatttgaaagactattttgctgatactgtatatatgcgcatcattcctgattagattgttgtaaagacaatctgaaagatctaaggttttaaaataatttggtttgaaaatatacagttgtcttgaaggaattgctgtcatacatgaagttgctccgagctgtctttattctcttcttggtcaaggttaacaattgctaaatgatcgcaaattcacctaaacaatacatttacaaagccatctttacatgcattaaacgagggctacaacaatattgttttacaaatactagcacttttttttctgttatgtacttagtgttagagggtcaaaataatctttctgcttagcatctcttaaaccatacctgcaaatatagcaggattattacatttacagtactttaatacttgtataaactatgcagaaatttttaataaagtgtaatatattttataagctaataagactgaatgggtaaaggtttttagcatgcattagtatacttgcagatactgaaacattttggtaatctttcttactaaagatgtgaatgtttaatgtaccttctctgtttctactctgtagtccaatgggaattcagtaatgacattttgtcatgtcaaactgtgaacataaatttgtactgtacagtcctcat

SEQ ID NO: 33521 - DNA, 1023 bp, Homo sapiens
attcctcacatttgttgaaagatcaaaaaaaactacaggttcaagaaggtcagcaaactcccaaaagattaaacccaaagaaatctctacccagatatatcataatcaaactgctgaaaactagacaaataaaaaaatgaggggtcaggcataacctgcatgaagcacggtattgaatttttgcatccacaactagatagatactaaatactagaattgtaagtggttttatttgtattaaaacatttaatattttatttttgccaaaaaataaataaaacttcttagcttctccctctgcccaatcctgttcccctcattttcatgcaagacttatttattgcagatgtttccccccctttaaaccacctgcatgcaaatctctgtctcagaatgtatttccagggaacctgacctagacatgtgccaactggcacagaggtagaaagaaacggccccctgcctcctctttcagatgttggtatagtgagacaagcaaatggttagcttgctgatagatactattattaaatgtacaaacgtgtcaataaatttataatttattttaaatatctttgatttcaaattgtagatatttaaatacataatggtattttcccttgtattcttgccccaggtcccacaaatatttagagtaagtctgcccttccttcttgatttctattatattttctagtttctggtatagaggaacattattggttttataatatcatcttgtatctggcaaacaggctgagctgtctaattaattctattactttgcctgatgatgctattggtttgctgttattgtttttaacacctgtaataactacagtaataactatttaattttcccccaaccccctccatcttcatttcttttatgcttttctcatttctcatggtattggctaaattatgcaacaccatattaagcattagtagctaccatctggcatccttgtcttacagtgatcttcatggaagtgtgtctaaaatggctccaataagcatgat

SEQ ID NO: 33522 - DNA, 1056 bp, Homo sapiens
actgacagcatttcaaggaccttggaaaggggagaaattcctaataatagagcaccacggaattacctggatggaagtgcaaacactggccacagagtcgggcccgtggctctggatgtattgtgttgggtcagaagctcagagggaacaaaggagtggggacagtacctgtgagtttgttttaagaagggcaggaaagccgataggttggctgaaagggcctggaagagaggatatcactttcacccaggtcttatttaaaccattctacgtaggtgcaaatttagtctctttttaaagattaccaggaaaggggattctactgtctctcttagtagcttatccttttattagaagtcaattttatgcctagtctttgattattgttcatttttttctattttatttgcctcttgttgcatactcataagaaatcattttgcactgatgaaaacaactctttccctgttgctccagagcagagtgaattgtacaaaacaaattcttgaatctaaagttcattacaaggtggttgtttggattgaacacaggctgcccctgaggaatggcaggttctgcaggaaaatagccaagtgcaaaagcctatttgaccccatgtacatctacacctgataaattctcatcagccctttaaaaaagtttctgaccagggccgggcgcggtggctcacgcctgtaatcccagcactttgggaggccgaggcgggtggatcatgaggtcaggagatcgagaccatcctggctaacaaggtgaaaccccgtctctactaaaaatacaaaaaattagccgggcgcggtggtgggcgcctgtagtcccagctactcgggaggctgaggcaggagaatggcgtgaacccgggaagcggagcttgcagtgagccgagattgcaccactgcagtccgcagtccggcctgggcgacagagcgagactccgtctcaaaaaaaaaaaaaaaaaaaaaaagtttctgaccaggtgcagtggctcacacctgtaatcccagcactttgggaggccgaggggaccggatcacctga

SEQ ID NO: 33523 - DNA, 1076 bp, Homo sapiens
acataagataattgggtgtctcagcacatgccaactgtaatggatcaggcaagaatttagcagtggttttccatcatttttttaatgatattacagttttcttccttgtgcacagcaaatatgtgcttaacactgacaaaaatctaaggagtggatagcaagggaaccttgtgttttaccagtcatcaagctgaaggaatgttttcaaaagtaacgattttgttatatcatagtagtatcagctgtaataacttttacaggtgagcttaaaataaaggctatataatattaatttagctgagttttaaaatgtcccttgctttactaccaggtatcagtactgataggtagttgtggaataaaacgattcttttgatgttactgtgggccagtactttgtaagaaacagcagcagcaattgggagggagctaagtagggagaaatctgtgaggcacttgtacttggtgaataaatgtcattttggcatttaactgcagttacgatgaacttaatttaagtttcttcttatttaagaaatcatgtgttccttaagtattctgttccccctccccgctgccttttgtgccttacttgcttttagtttggtcagatattatcggcaaagaatttgtctgttctgctactctctactagacatctaaccttgtccaagtcaactatactctcaatctacttcctcatttgcacaactactctacctgcctcacaaggtatttttgagtagtgaatgagaatacttcttgctttgaaagcaagaagcactgtggtgtattcgaaagtatatggtttttagggtccatcctggaccctgccactcaccagatataggtattaagtcaggttaattaatctcacttcagtatcttcatctataaggagtggtgggctgggggcaggaatgacccctgttggacagagtttttctgacaacaaaatgccccagtcagtgtaaagtattttatatattattgtgctcatttgggcacttaagagatagtagctgctgctataaatcctgaccgttactcaatacttagatgtgccacttacttaa

SEQ ID NO: 33524 - DNA, 1084 bp, Homo sapiens
aacaaaattagaaaaaataaaacattcatttaccaacataagtaaattcacatataaaactcttaacatgttatctactactggagaaattataatgtgaatataaaatttttatacatgtgtaatcttggaaaaattatacacacattggttgctataattccttacaacaaaggtagtttgcatggctaatgattactgaaataaaattaagctattctttagtatgcatacagaaatatcttggtgggctattcattatgaaataaaaagattatccttttttgactgagagattgctatgtgcattcttcaagaattttaaattgacgtttttcatttataggagatataaaaataaaatggcatttttaaaaatctaaaataaatgaagttgtttaaaaaatgctactcaagaagactcatcaaagtaagacgggtgtggacagtttacatcttcagtgaccaaactattccaaaaataaaatttcaaaaataaaatgtactgtgagaaaatgtttttgatttttagatatgaggggaaatatgtcaaaggaatttaatattttggatggtttgaaatttcaatcttcttattgcaaataagaaaaaaacattcaagattttagaaaagtcctttgtgtgtatattctttttctctatttttttctagattaaatagatctaatttttacatcttccttcaacaccctggctgagtctttgacctttgtcataaagatacatttatttgccctcagctttttgattaagtgagcagtcagacttctctaagtagttgttcacctactgtaaacaaatcaaagcctgtcactgttaatgtcacactgacattcatcaattttttttttttttttttgagacagagtctcgctctgttacccaggctggagtgcagtggcgtgatctcggcttactgcaacctctgcctcccgttcaagccattctcctgcctcagcctcccaagtatctgggactacagacatgtgccaccactcccggctaatttttgtatttttagtagagatgctgtttcaccatgttggccaggctggtcttgaac

SEQ ID NO: 33525 - DNA, 1025 bp, Homo sapiens
tggtgatgaattaaaatttccatactaaaacctttaaaatggttatcataattaagtttttgaatggccctttaaaatgttaatataaaaattaaatgaattacatagtgtcaaatttttgcatttaaaatttgagagttggccaggtgcagtggcttatgcctgtaaatcccagcacttcgggaagccaaggcaggacggatgatcgcttgagcccaggagttcgatgctgcagtgagccattggttacaccactgcactccagcctgggcaatagaacaagaccgtgtctcaaaaaaaaaaaaaaattgagagttatacaggtatatagtagacataagttactaacgtatcattttaaaattctgaaaataagccattagtttttattttagtagatgtctcaaggagctaataattttttccccatttagtccttcttttctttttgggatgtcttaaaccatgtaggtctgtaatgcatgtaatgagctcttatatggaaccactactgttaacatcaattattttataaaataaggttaatgtagttccatggctaatggaatttctttttatcattaaggccgccttgaattaaaagaagataatattgagtgcctgttatctacagcttgccttcttcagctttcacaggttgtagaagcatgctgtaagtttttaatgaaacagcttcatccatccaactgtcttggaattcgttcttttgctgatgcccaaggttgtacagatttgcataaagtggctcacaattatactatggtatgtattttttgaaggtgagaaagtcgatcctccatatgcatatttcttattgttgcaggcttatctgcatgttactgttttcccatggctctgccacgtgtcttgcgattgagcttcattgcctagtgtgtcatattttcattgagttataatgggaaagcaccaagtaatacttctcgtgggtatctgaatcaagccctaagttactgcagtcactgggaagcagaacagtggcctag

SEQ ID NO: 33526 - DNA, 1028 bp, Homo sapiens
actgggtcaaaggaatcttaagaattctttgtaccactctcacaagttattattaatattaaaaataggccaggattatgcctgtaatccctgcactttgggaggccaaggcgggtggatcacttgaggtcgggaggttgagaccagcctggccaacatggcgaaaccccatctctactaaaaaataccaaaaaaaattagccaggcatggtggcaggtgcctgtaatcccagctactcaggtggctgaggcaggagaaccacttgaacccgggaggtggaggttgcagtgagctgaaatcataccactgtaccccagcctgggcaacagagcaagagtctgtctcaaaaaaataataatagctaaaaataatagcaataaacactatgcacagtgcctacagggtgtcagtattatgctagaagctttctgtgtgttatccctcaatatgcattgatctcccctttctttgaactcctagtactagcaggcttcaatctcctgacaatctctctgacttctggctacctctctgatgtcagctcattctattaatacttcttccctcactgatgcttttatttcaaccccattggccttttcattcatctaacaggccaaacattttatccatatccaggatattgctttagctgatgctctcactggcatgctctgcccccggatattgaagtacctagcagaaattattcactcaaatctctcaaatgtcagcttaccaaggagcccttccatgaccattcaatagcaacccccgactaccactttctaacctgaataacatataacatagcgctatttatttgtagatgcttaagttttagatataggcctgatgactgcatggtacagaaataaataacttaagataactgattagggttacagtataaatatttcaacattggaaaagattttccattgttcagataatctgcaaatacttattaagtatcatctgtgtacctggaactggtgctagcttttgtagtcattactagcactct

SEQ ID NO: 33527 - DNA, 1050 bp, Homo sapiens
gccacctcacccagctaatttttgtatttttagtagagacgggttcaccataatggccaggctggtctcgaactcctgatcttgtgatctgtccacctcggcctcccaaagtgctggggttacaggcgtgagtcaccatgcccagcctaaaattaattttttaactaagcattttattatatgcttctattattacaactaatttttccacatactttaaattattttttctcttccaagtaacatcatgattttacgacctttcacaaactcaacttgtatcaaataagtatgtaatttttaatcctcaaattctcctaatttagccagaggaaacctctttaaacttactcttttgtccttttatcactgccctcaacattcttggaagcagtgctgctttctgaaaaccataccatggtctgtcagcggtgctgaaagtttagctgcatcagaatcccctggagggcttatgaaaacacaggtagctgggtgccactttcagagttgctcggtcagtatgtctgggctgggatctgagaactggcatttctcacaagttcccagatgatgctgctggttctgatttcaaattttgagaaccactgttcttgactcattgtgatttcttttctcaatatatggaaagaggtactctccaagaagttctgcttccccttagtagggaattgtataacacttcaacctcatgaatcgtagaatgcatgtcagaactggtggtgggcaaaagtgttttctacctgcttttgagctactcttaatggtgacggagctggaaaagatatatcatttttaaagtcatgaattcccaatgatttttaccatttaatatgttattgggtgccacttttttaaagtatgaggtttcaccatccattaatatttttgtaatcacatttagagctaaaactatcattaatagacaaattaataaatatctcatcataggtcatctcatgaattttgaggttccatcataactgaagtctacattcattatacttttgtattttgagtctaactgaccct

SEQ ID NO: 33528 - DNA, 1034 bp, Homo sapiens
gatctgaggcaaaatgagcagaaggattcacgcaaaggcgagcaggtgcaggcacggacctccaagagtcccttcccagtggagcacacaggacgcaagttccgtaactcctccacgactgacttgtacaacatggtgaaacgtagagtgccaagaagctcattagagactcagcagccaggagttttattggggtgtggtcacataggtgccccctgcgtggcatgtgcccagttttccaggctcccagagagcaggtgttcggcataaaccacgttgtttgtacaaagattttaggcacggtgagccactcatcagttctggaaacggtgggaaccgtctccaaatctatgttccagatgcgagccgagggttagctgttcaagcctttccaaggatgacagtctcaggcctgcacacacaagtacttttctgaacaaactgggacaaaagaaataacatttgcccaagatcacattgtcagctaataatagcctgactctgtgttcacaagcacggtaggacgttgcctctgaaaaggcctcactattccaaaagacatgtcatgataacattcttaagtgattaaatactgtcacattacatgacagggatcagcaaactttttctgtaaaggaccagatgttaaatattttagacttcgtgagacatgtggcctctgtcacaactgctcaactctgccatcttctcatgaataatacgtaaacgaatgggcatgactgtgtttcaatagagctttatgtttggacacaaatgttaaccacatacacttttaacatgtcacaaaaatatttttcttttgatgttttttcaaccatttaaaaatgtaaaaatcatccttagctcatggaccatacaaaaagtcagagggctagatttggtccatgggtcataattggccaacccacattctctaagtgtatttttgttgttgttacatcaaagtctaccatgcgggcaaggtatgggataggacaggcactctcatgactgctggtggggatggaaattgg

SEQ ID NO: 33529 - DNA, 1087 bp, Homo sapiens
tgttgcccatgctggtctcagactcttaacaatcctctcacctcagcttccagagtagctgggattacaggagcaagccactgcaccctgctttgtttttaaatttaaattttgcgtcctttcctgatcccatcccctttcccctgaacactattcttattgctgagtttattatttccctttttagttttatcacatatatttatgttccttgactatcatttagttttgaatgtttcaaatttcttataaacagaaccaaactgtatgcattctttgcaacttgctttattctctcaacattatgtccttaagggtcatctgtctatttcatttaaattgtaacatttctattctagttgatgggtgacacatgtacaagaggttgcagattttgttctgttaagactgcaagaaatcctcctccactggatgccagtgagccctacaatactgcaaaggcaattgcagaatggggtctggattatgttgtcctgacatctgtggatcgagatggttagtgtgtcatcatggcctctaccagaaactggctctaaatgatgacatcatcctgagcagtggattcttttgtttctagatatgcctgatgggggagctgaacacattgcaaagaccgtatcatatttaaaggaaaggtacttatttttgcatttgtgtaatttaaggacctttttggacccatatgagttaagtttaagttcattaccttgaaacagggattattcactttttgaggagtttcatagttttctgataattcactggaaattatgtacacatttctttggaaaaagcatatttgtatgtacagatacatatttgcagagaattttaggggctcagtgacatgaacttacccatagacctttagcccatagaatccctccctcatattagagcattagtctaaactttgaataattttctttaaaaagtataaacctggtcttcttagtaatgatttttttttttttttgagatggagtctcgctcttttgcccaggctagagtgcatggcaccatctcactgcaacctctgcctcccagttcaagcatttatcctgcc

SEQ ID NO: 33530 - DNA, 1027 bp, Homo sapiens
tttcattgtccatataattatcagcatttttgtcaaagccatttaacaagcctctagggagttctaaactttcctgcattttcctgtcttcttctgagccctccagactgttccaacatctggctgttaacccagttccaaagttgcttccatatttttggatatctttttagcagtgcctcactctactggtaccaatttactgtgttagttctttttcatgctgctgataaagacatacccaagactaggaaatttacaaaagaaagaggtttattggacttacagttccacatggctggggaagcctcataatcatggtggaaggtgaaagtcatgtctcacatggcagcagacaagagaagagagaacttgtgcagggaaactctcatttttaaaaccatcagatctcatgagacttattcactatcacaagaacagcacgggaaagacctgcccccatgattcaattatcatctgccgggtccctctcacaacatgtaggaattatgggacctacaagatgagatttgggtggggacacagagccagtcatagtaaggtattgtttgggtaaaacataagcctttctttcctttcttttttttttttttacagggtctcactttgtcacccaggctggaatgcattggcatgaacacgtctcactgcagcctcaacctcccaggctgaagtgaccctccaactctgctttcacagtagctgtgatatggtttggctgtgtccccacccacatctcatcttaaaacccagtgggaggtaattgaatcatgggggcaagtctttcctgtgctgttcttgtgatagtgaataagtctcatgagatctgatggtttttaaaagagttctggctgggcatggtggtgggcacctgtaatccaaactactagggaggctgaggcagagtgaattgcttgaacctgggagaaggaggttgcagtgagccgagattgcaccgctgcactccagcctgggcaaaattgaagactctgtctccaaaaaaaaa

SEQ ID NO: 33531 - DNA, 1033 bp, Homo sapiens
aggggaaaggtggtaactggatcccaagagcagtgctgctcgaaggcccacacttttgagggtattcggggttattgcctgtcaggccttcactgttcttttcttggggaaggagcagtgagtccttaggtattgattaaaaaggaaggacattcagagttagtccttcttagttgggtgttaggagtcaaagggagacataatagaatactgtcttatttggtggcaggggtaagggaattttcacctgagttagcaagttaattccaaataagataattatctcttttccacttaacccccaaattcctaggcctcatctttattgacatctcaatcttttgagtgggcaaaggcaaggtgtttggtgtattaaagacatgtaaatatttttagttaggaaacaaataatggaatgtatgagtagcttatttcaaaatattgtttacaagttacagatcagagagactgtcttaagacagtgcctctgtgactcgtgttgtgccacgaaacttcattatgatgtccctcatagttaacttgattcttacttttgaaaagcagacctattaaaaatgtgaaatttcaccagattaatacattgtttcatctccttattgagatttatcacgacttaacagattttcaaaaaagttgcctcccgttgctcttaagtcctgcagaatttagatacatttgtactacgtttatttatgtaagatattcacagtgctctagtaatttgactcaaaattatgcaagtattagtacagtttctcataccaagatcaacaagaatgccagattgtcttccccacatgaattaaacaaaaagtaatacagaaaatgattattttcaagattcacataccattattgaatatatcattgctatttgtgtttttcttttacagttagtactttaatagtgtcaataataatttgtgaaattcagcattctaagtatgtgatgagtatacatggagaaaaaattatttaaaattcaaaaatgacaacagacttattgaaagta

SEQ ID NO: 33532 - DNA, 2207 bp, Homo sapiens
gccaggcgtggtggctcacgcctgtaatcccagcactttgggaggcctaggcaggtggatcacgaggtcaggagatcgagaccatcctggccaacatgatgaaaccccgtctctactaaaaatacaaaaattagccgggcatggtggtgagtgcctgtagtcccagctacttgggaggctgaggcaggagaattgcttgaaccggggaggtggaggttgcagtgagcgagatggcaccactgcactgcagcctggcgacagagcgagactccatctcaaaaaaaaaaaaaaaaaaagaatactttgagacttaactgtatcagatgtgtaagataatttatctaaagaataaatggacacagacagtaaagacaaaaaatatatactggctttgaatgttttatttttaaaacttttaagtttgtttcccgtttttagtgtttttcttttaaaatttctcgcttttgattttaataaaaaggtaaaattttctaccaaaaatgaatgtaacgagaatttgaacagttgtttctaagactagaggcaggcgtggtggctcacatcggtaattgcagcacttggggaggctgaggcaggagaatcgtttgagtctgggaggtcgaggctgcagtgagcggtgattgtgccactgcactccagcctgggtgacagagcaacacactgtctccaaatagtaaaaaagtggtttttaaagtttttatttttattttattttttcaaaagtgtgtttgaaagttatgtaagttacagttttatgtaatatttaaatagtatttcttatggtttctggaatgggttgagcaaggaaagcctatagattgggttaaaaaaaatcaaagtctgtgcaggtaatatgtttggggtgaattccttgtatacagtgttacaaagactttgagctctgtccattgggcgtaggtttagacacatctgggctccctagcttcttccctttttatttatttatttttgaaacagagtctcactgtcaccaaagctagaatgcagtggcgtgatcacagttcactgcagccttgaactccccaggcttagatgatcctcctacctcagccttccaagtagcagggactaaaggcgtctgccaccatgcccagctaatttatgtaattttttgtagagacggggtttcaccatgttgcccaggctggtctcgaactcctggactgaagtgatcctccggccttggccacctgaagtgctgggattacagacgtgagccaccatgcttggcctgtcaccccttcttaaagactatacacctttttttttttttttttttttagacggagtctccctctgtcgcccaggctggagtgcaatgcgccatctcggctcaccgcaacctccgcctcccgggttcaagcaattctcctgtctcagcctcctgagtagctgggattacaggcatgtgccagcatgcatggctaatgtttttttttgtttttttttgtttttgtttttgtatttttagtagagacgggtttttaccgtattggccaggctggtctcgagctcctgaccttgtgatctgccgcctcggcctcccaaagtgctgggattgcaggcatgagccactgcacctgggtttttttttttttttttttgggagacagagtcttgctctgttgtccaggctggagtatggtggcacgatctcaactcaccacagcctctgcctcccgggttcaagcgactctcgtgcctcagcctcctgagtagctggtattacaggcgcaccccaccacgcccagctaatattttgtattgttagtagagacagggttttaccatgttggccaggctggtctcgaacccctgacctcaagtgatccaactgccttggcctcccaaagtgctgggattacaggcgtgagccaccgtgcccagccaagactatatactcttatttcccgtgaatacattattgacagttattgaaaatattgactatagccccaaaaggcttaactggttagagatacagggcagacaaaggatagataaaaatggtgggggcaaagagtaaatgctatgggattctaaagggtatctgcatgagagagattcctttttgttgttgttttgttttgtttttgtgacagagtctcggctctatcacccagcctggagtgcagtggctccatctcagctcactgcaacctccg

SEQ ID NO: 33533 - DNA, 1637 bp, Homo sapiens
cattgtattggccaggctggtcttaaactcgcggcctcagatgatctgcctgcctgggcctcccaaagtgcttggcttaaatggtgagccaccatgcctggcatgcctggactttttttttttttttttcccagatggaatctcactgtgtcaccctggctggagtccagtagcatgatccaagctcactgcagccaccacctcccaggtcaagcggttctcctgcctcagcctaccaagtagctgggattacaggcgcgccccaccgcccagccaattttttatattgttagtagagacagggttttatgatgttggccaggctggtctcccaaagtgataagattacaagtgtgagccacaatgcccagccaagactatatactcttatttcccagtgaatacattattaacagttaccgaacatgttgaccacagccccaaaaggcttaattggttggagatacaggacaaaggatagataaaaatgggaggggcaaagtgtaaatgctatgggattctgagggtatttgaatgagggaggttcttttttgtttttgttttgttttgagtcagagtctctgtcacccagcctggagtgcagtggctttatctcggctcactgcagcctccgcctcctggcttcaagtgattctcaggcctcagcctccagaatggctggaattacaggcatgcgccaccacacccggctaattttttttgtatttttagtagagactggatttcaccatgttgaccaggctggtctcacactcctgacctcaggtgatctggctgtcttggcctcccaaagtgctgggcttacatgtgtgagccaccccacctggagtttttttgttttgttttgtttgagatggaatctcactctctcacccaggctggagtgcggtgacatgatcttggctcactgcagcttctgcttcccaggtcaggcagttctcctgcttgacccagtagctgggattacaggcgcatgccaccatacccagctaattttcctatttttagtagagatggggtttctagccaggctggtctcgaacttcagacctcaggtgatccgcctgccttggcttctcaaagtgctgggattacaggcatgagccgtcgtgcctggcctgtatgactgtatgagggaggttcttgagctaggtgccttttttttttttttgagatggggtctcactctgtcgcccaggggcacaatcatagctcattgcagccttgacctcctgggttctagcaggccttccacctcagcctcccgagtagctgggactacaggtgtgtgccaccacacctggctaatttttattttttgtagagatggggtctcattgtgttgcccaggttggtcttgaactcctggcttcaagcagtcctcctgcctcagcctcccaaagtgctgggattataggcatgagccacctcacccagccttcttgagctgagttctagaggaaagttaagactgacctcaaatttcaggagacagtcccaaaggaattctggtaatattgcaattttttttttctgagacagttttgctcttgttgcccaggctggagtgcagtggcacaatctcagctcattgcaacctctgcctcccgggttca

SEQ ID NO: 33534 - DNA, 1027 bp, Homo sapiens
acattcagtaaacggatagctgttagatgtcagaattagctatgttttcatattctgtcgtgcttattattcttggattataaaggtattgttcaatggtttagtgattattggatgtaaatatgcctcaagaaaagctcaagatgagggttaaggtacttctaatagtgtttctttgtcacctgtgtgccaataatccatggggctagtggccaagtagtccacccttatctgcagtttgattttctgcagtttcagttacccattgtcaaccatcgtccaaaaataagtgagtatagtacaataaggtattttgagagagcacattcacgtaactttcattacaatatattgttataattactccattgttaatctcttgtgtttaatttatagattaaactttatgatatgtatgtacgtatagggtcggtactatctgtggtttcaagcatccactagggatcttggaacgtgtcccctgtggataagaggggatatattaatacaaaggaatatatgtgggctctgttctccagatgtgatttatttaatctttctttaggagacagttataaatcgttcaaagtttgtgttaaaatgttgccttcctgaatgaaaaagttcatttgggaaactctcaaatgatatagagataatgggattattttgaatttcttgacatggctctgggtttcctgaaactagaccaaagaatctagattctaatcctgtggtgtataatcttggatccctttgcaaatccctttttcagtgggctttgggagccagaaaataggcagtctcattcatctgacatccattttattctcttacataaatctgaaaaggtgggagaactttatttcattgaacatgcttttttaaaatttttttatttttttaaggctagtcaaacgaagcagtggaaatggaaaaggaaaaaagtctgtaactggttatgatcaattaattgtaaacaccactgcaaaaccctttttttctttctcttccctttagttctttg

SEQ ID NO: 33535 - DNA, 1033 bp, Homo sapiens
tttcctgaatgagtttaaggatattcctaagctctagagagctcatccccaaccattgtgaaagtttcatcctgattctgggactaggaagagttgaatatattgataaaggtggcctccaggtaaagttggatttctgttgcatgtaagtgttaataatgtagtcaggtcttgaattaggatgatggaatgtccaagcccaaaactgggaaacaagatagtgggaaggtaattttttttttttttctgtagttttcccttttgaagatctcactggcatctatttagtatatatgacatcatctgtggttcaattctttagtgtaactttacattttttatttattcacatatttactgaatgctacctatgttaataaaatggacatgatccttgctgttatggaataaattatggctcagtaaggcagtgagaaattgaacagctaataagtgtgtttgttgactttaagtaaggggacctatggaagttgggtattctagcctcagggaaagagtttcttgggaataaccggtaactgatacttacaggataaattagaatgaccatgatcaactctgtatacgtatagatagttaataatcattttacaatgaataatggaaaaacattttattgtttttttctatgtatatatgtttttatttattagagactaggtctcagtttgttgcccaggctggagtgcagtggtatgatcatagctcactgtaaccctgaactccagggctcaagtgattctcctgcctcagccttccgagtagctagtactacaggtagacaccactgtgcccagttaattatttttaaattatttgtagagactgagttttgccatgttacccaggctggtcttgaactcctggcctcaagtgattttcctgccttggctttctaaaatgctgagattacaggcctgagcccctgcctggccaacttctgtttttctttttttcttttcctgatggactgtcctacgactgtttttatttttttaaccaaaactgcgtc

SEQ ID NO: 33536 - DNA, 1033 bp, Homo sapiens
gaaaaaaatagttgggtgtggtggcatgtggctgtggtcccagctgcttgggcagccgaggtcggaggattgcttgagcccagtaggtacagtgccatgatcatggctcactgcagcctctgcagtccggcctaggtgacagagtaagaccctgtctccaaaaaaaaccccaaacttctatttttcagttgacttaaaaaaaagtcttatctacgtaacgttcacagattgtatataattgtattcttgggtcttttacaatttatgattgttaaccccttcacatacctttctttttttctcatctcattaatactgaaaatcctgatgtctgtgattcctagtttaggtgtaaaggtttgattagcttcaggttaaacattttggtaagaagatcccaagtgatgttgtatacttcatattgaatcatattagtacatgtgtaatatcagattttcttactgttattgatgcttggtcacttgtttaatcatttgattaaggtgggaactacaagatttctttgtaaaggtacattttatgctctttgcaattagcaagtaaaggatggattacttctttggcatcctggaaataatcttattcccaaaatccttttaccaggtgcactcacacacacccccactctcactcatgctggtacagtttaaccatgccagttaatctagcatgtttatctttggaatttgggaagaaacctgagtacccggagaaaacccacaaagacgtggggagaacatggcaagctccacataagacagcagcccgtgtgggatttttttttcctcataaatgttataaggaaatgatgttatccaaggacctgctgtattctctttttctctcttttttttttttttgagatggagtctccctctgtcacctaagctggagtgcagtggcatgatctcggctcactgcaaccttcgcctcccaggttcaagtgattctcctgcctcagccccccaagtatctgggattacaggcgcgcaccaccacacccggctaattt

SEQ ID NO: 33537 - DNA, 1050 bp, Homo sapiens
ggtctatcatccaggctgcatgtagtggtgcaatctcggctcactgcaacctccacctcccaagttcaagccattcttctgcctcagtctcccgagtagctgggactacaggtgcctgtcagcacacctggctaatttttgtatttttagtagagatggggtttcaccatgttggccaagctagtctcaaactcctgacctcaaatgatccacccgccttggcctcccaaagtgttgggattacagtcgtgagccactgcacccagccaaattaaaggttttatagttaatgttgttagggaaaggggaactatgctgcttacttctatccaagaaacttaattctgaaagtattctcattttacagtaataaaattgagagttaggtgttaagtgttatacctgaatgaataccacaagtaagcgacagaactaggattcagcacacatatgtcttactccaaaggccatgacttttgtaatactgtcatctttcaccattctccatgtcttgcttatagttcctgactcttaaagtaagactttaagttcgcttgtgggagcagggggattggagttttagattgtgaaataactggatgtttgaattaaactgtggtggtataaagaataattgttgcttgatggaaaattgagctgtgaaaaatttttggcttaactttgttttctttttatctttagttctgtgcaaataaagaccctattctaagccctctagaattttttttttttttttttgagacagagtctcactgtgttacccaaactggagtgcaatggcgaaatctcggctcactccaacctccacaccctggattcaaacgattctcgtgcctcaacctcccaagtagcggggactacaggcacacaccaccatgcccggctaatttttccggatttcaccatgttggcctcaaactcttgactcagtgatctgccttggcctcccaaactgttgggattacaggcacgagccaccgcatgcacctgaccagaatgctttttcataatgtaattcatcatgatgat

SEQ ID NO: 33538 - DNA, 1030 bp, Homo sapiens
cactttaggcattcaactttattccctgttttgtctattatttaatcacccttccatcttttccatttctactcattctctgcactgttggtctagaaatcttcctagagttcagttttgatcatgctgcttttctttccctgaataaagtctaaactccatggcttggcacttgaaacctagaacctgaccccagtcttgtttcccactctaatcttctaccacttccacccacaatgtgggtctcattttccatcttagattgtttatttgtaggtgatgcttattcttccacagctttctatcagtttcacttaaatctttgtccctattatttaaaattctagttttctatgaggcccgagtatcactttcttcattaagctgagttcatcaaatgtttctccctctcctctctcagtagcattttatacaatttatatagtggcaacacaaatatagttccaactcatgtattattttggatatgtatctttctctagcttttatgctcctgagtcatataggtcttttacacctatatattatcagtaattcccaatagtatagtgtcccttgggcatatgatagcagtcactcagaatgttctagaatttgttcattcaacctattggttgttccagtttaagaatagatatgataatggaagttccagggtgattttggctcacttagcattatgggctgcctattagtctattgtttatgtacatctattttctgataagtctggtcgatttttttattgtgataaaatatgcatgacataaaatttaccattgtaatcatttttatgtgtgcagttcagtggcagtgtatttaccttgttgtttaacctttaccattatctgtctgtagaactttctcaccttcccaaactgaaacttcgtacccattaagcaataactccccattattccccgctcccagcttctggtaaccactgtttctgtttctccgagtttgattaattcagaaacctcatgtaagtggaatcataaaatgtcat

SEQ ID NO: 33539 - DNA, 1038 bp, Homo sapiens
cagcctggccaacatggtgaaaccctgtcactactaaaaaatagaaaaattagtcgggtgtggtggcgcacacacgtagtcccagctactggggagactgaggcgggagagtcacttcggcccgggagacagaggttgcagtgaaccgagatcgcaccaccgcactccagcccaggcaaccaagtgagactctgtctcaataaaagtaaaaaaataagattaaaacaaaaggcaaaatacacttcacatatcttcagctcacttgactgaaccgtaatccttctgacatcttcaatagtgttttaaaattatattttctaatcttgttgaaaatactaaaccacatggggttttttgtatgtgtttgttttgttttgtttttgagacggagtctcgctctgtcccccaggctggagtgcagtggcacgatctcagctcactgcaagctccatctccctttacgccattctcctgcctcagccatccgagtagttgggactgcagtagctgggactacaggcgcccgccatcacgcctggctaatttttttttttttctttttttttctttttttttttttttttttgagacggcgtctggctctgtcgcccaggctggagtgcagtggcacaatctcggctcactgcaagctccgcttcccaggttcacgccattctcctgcctcagcctcccgagtagctgggactacaggcgcccgccaccgcgcccggctaattttttgtatttttagtagagacggggtttcaccgtgttagccaggatggtctcaatctcctgaccttgtgatccacctgcctcgccctcccaaagtgctgggattacaggcatgagccactgcgcccagccaccattttaaagttataaaatgctgtgaattccttgagttctgacattatggcatatgcttgtttatgaattgaactcaatagtaaatagaggttgattattcaaaattcaaaaatccgagatttgaaatgctccaaaatctgaaactttttgagtgtttacatgtcactc

SEQ ID NO: 33540 - DNA, 1030 bp, Homo sapiens
aaagcaatgtttgatgtgggctcagtggctcacgcctataatcctagtactttgggagcctatgtcgggtggatctcttaagcccaggagttcaagaccagcctgggtaatatggtgaaacccccaacactattagaaataaaagaattggctgggtgtggtggtgtgtgcctatagtcacagctacttttaagatggatcacctgagtctgggaagttgaggttgcagtgagccacagcagtgagaccttctctgggggggaaaaaagggagaaatgtttgttgtacataagccctatattactgtcttacttagcttgcattgtatttgatatttagccttataataacatttttgccgtaatattaagtgcacattcattccatgtgagtcgcttacatctggagatgctttattaagtaggatggatacagtgtcttttagggaagaccggacaaacaaggcagaaatcacagaagtgtaattaatatactatgacaaaggaaactgcaggtgtgtggaatagatcaggaagaagtgatatggaaagtgaaacttgaagagtaggaattagttgggagaagagggcacagaggtatgttattgagaaaacaaatatgtatgaaggcccagaacaggggaaaagtttaatatgactttttgagcaggagagtggagtgtgggatagaggtaaaaattgagatttcaggagtagtctaaggccaggttaagagtgtgggcttggccgggcatgatggctccatgcctctaatcccagcacttagggaggccgaggcgggtggatcacctgaggtcaggagtttgagaccagcctggccaacatggcgaaaccccatcttgccatgttggcgctccaagatcgcgccactgcactccagactccagcctgagcgacagcgcgagactccttctcaaaaaaaaagagagagagagtgggcccacatgaagggaatgagaggtcattaatggtccttaaagcagcatagtgatgcaaatcagatttgtttt

SEQ ID NO: 33541 - DNA, 1032 bp, Homo sapiens
cacctcagccttccaaagtattgggattacagacatgagccaccatgcccaccctaattaacagtatttgtcaaattttaatgtgcatcagaatcacctggaggacctgttaaaacaaccctggagtttctttttgtttttttttttttttcgttttgttttttgttttttattttgtggaaaacaaaagtagaaaaactaaaaccccaaactccagaaaaaatcctaaaaaatgttttttcttaaaaaatactgtatgtctctactcctctccctccctcccaacagcccttcttgtgttcttttctaagtgccttacccccccacccccatgactatccattgttcttgctattgtgcccccacttcccaatatctatccaggatgtgcaccccatgttctcttacctggcgtcttacttttttctccctcaaatttcagcaagcctcatacttgcagtctcatttcgccagcatgcaagaactgtctcccccttccttttctgggactcaataatcttttccccttaccactccctcaccccaggcctattataagcaggagcatgtcctcctgccaaattccctccctgttcccacccacccccccacccttcttatctcgagaaatgtcagaaccttcccctgggcaggcttagccaggaataaaacatttttgtcttccctcgttctataggacccttttccctccctccacatacacatgcgcctctaagagaaggaaatctttctctgggaccccgtattcccctggcctactccaagaaccctgtcccccgctccagcttcttgcactctcaagagcaacaacagtcttctctccaaggaatcatcttccctctctcaggatgtgtgcatctgctcagcctcccactcttacctttctgccccagaccccccacccaccaattctcctgggccaaagagccctttccccacctagcccagggaccccagcctccgggcctccacgcctgcgcggctagcggatgaggacattaatctcggcca

SEQ ID NO: 33542 - DNA, 1054 bp, Homo sapiens
attctgttatttgtctcagagtacttccaattagggttttccatgttttatatatgtgctatttgttcatatttgttgttataagcatggcttgtgttccagctttgctttcctattgagctctaagccttacacgttgaggttggactcaagggtttcttttagctcctaaaatagttcaataatttgacttatttccttgtgatgaataagtggtagaaactagatttatcgttttaatatgtaatagatttaaatatataaattacttttaaaagaaatattaaagtgaattgaatagttagtaatttatactttgctttactaagtaatggtggttccaaagtatttgataaatttacctctttccaatgcatatgggaagtcttttaataaaattactctattgtgagtttataatcatctcaagttatgtaataagttaggactttgcatgtggggtttccataaatcactgtacactaatgcagctgtaagaaaacagaagaatctagttgtattctagcctgggctgtgggtaatacaaaagctggttacatcgtaaaaaattattctaatgtccacatatttttataagctagtaatctgtgttcagttgtataatgtttgctgctttccagtgtttggaacatctcttaatacctcacttaacctaattttagtcttgctagttatatttgttgaatttggagattaaagtagattaatgttacttgtctttattattgtcaacacaaattgtgagtcgaagcttcaggttaagtggtcttttctcgagtgacataggttgtctataatgcaaagtgaatcacattttaaatgtagatttgttttatttggaaaagtaggattgtaggcgattaagagctgaaatatatcaaatattataactgtaatgtcatgtcaatcaatttttccccccatatagtacaaacaaaatcccgaaatgttcaaacagacagctcgactttgggcacatgtgtatgctggagcaccagtttctagtccagaatacaccaaaaaaatagaaaac

SEQ ID NO: 33543 - DNA, 1448 bp, Homo sapiens
caatacaaaataacaaaaatgtaatggaatcagactgaattaaagtaaggctgtatattgaaagtcatattataaaaggtttgctttctttaagtgttatttatcttaaattataatcgttaaatgtttggaagataatttttgaatcataacgtcagcataacttcatttgacttctcaataatcttgatactagaagcaataaaagaaccattattaaatatattgtaatgttaaagatgtgaaggttcttccaaaaatttgtaaggctttcctaattaacagtaaactcttatagctgatattattacatactaaacacaagttgctgttttttccccatatgtttgcttacgcatgtctttatacaatcacctctttttattgctgtagtttattttctaaagatgccaaaggaaacaagatttttctttatttattttaaatacctgaaacctcgtactttatattttgaagtaaggtgggattgtgtgaaaatgtggatggtttttctccagtgttggttagaactactttttttaagtggagggcaacttggtagtattagtagaatttgggtttaaaaatatcagacacatctacccagtttattttttgcctgtattatcagggtatatttaattgtcctgtggttaaacaaaggtgagagagctcagaggtttctaaaggtcaagcattttacatatatacatacatacatgctcttggaggcagctatatcctgctttgatttttatgcacatgagccctatagggttatatactcatctaactacacttcagcatccccagtgcccaagaaattggaaagtacaatatttggtttgagacattcttcataaaagattctttattataaaaatttacctcatttacatttaatgtgatgatcttttttttcctttctggtatatttcccactgtactgtttggtttttgttattctcttgtctgtgggtagatttagttacccaaacatagaaactaaagcaattgcttttttcctctggtcttaaatatgtttggacaaaaagacactaaaaggtcaggcctaggggaaaagtaccctggtggaaattatttttgtaattcttaatatttttgagttggctccgtttgtcagttttaaaagcctcaaaaattatgttaaaaaaaaaatccagtgaaatcccatttagggcaggccgatttgttagaagtcactgatgctccagtaggcttttgttataatcaggcctgtttcctgagtatgtgcctcttttaaaagaagaaataattagctgtatagtatttcagtactgatgaatgaatgaatgaatgaatggcagttagtggacccaaataagtattcagtggtatataaatatttgaggaactaggtactgaattaggtgctctgagttggcaccccgaaatgtttggaatca

SEQ ID NO: 33544 - DNA, 1051 bp, Homo sapiens
tttgcactgctgcaatatagatcaaagatcttgtggcataggggtaggggagtgttagtatctcccttgtcccatttgttctgttactgcttcattggactgatacaccctcatgaacttgcaatcacctaaatggaagtcttgaatgtgtcaccttttgcttggttatttcaaccatgctgctatatataatcaggtgtggcacagtttgtcagtttgattataggtgtgagtggatagaaatcattacactgtgctgttaacgatccttgtctgcttgctgttacctactttttacaggcatcataataaaagctagactatttctttggggggaaagagacttatttaatgtaatttaaaaaacttttccaatagaaaatgaaatattattgaaaataatatctattttttagctttcagcaattgatggtgctttgttgtggtgtctgctggaagtctactgccattatagggaaccttgcttgttagcttctctagatctctattctaaacaatctgttagtgatgataaattctgtaggagggtctattctgagccgttaacttcctgtaaggggaaaatgggtgggttaccagaaataccattgaagcagggtgggctgtggggtggaaggttggggtatttgtcttgagaattaaaaactacgaaacacttttgtacacaactgattttttaaaaaataaacacatttttaaagatgttgaatttttccccccttattgggaattcttaaaaataaatgcatgcatgttttcccctgaaaatggtttatatcttatttctgggtgctcatctgtggacaagcaattaagtcttactctaaataagaaccaggcagatatttctccttcacaaatttcatagtgattgacatataaatgcagtaagttgtatcagatctttgaatttaaaaacattgaaatttagttctaattaaatttactaaaagaacatatttgcttaggttctaatccaaaatttagagtaattaagagttagttaagtaatactttgtattctgtttcc

SEQ ID NO: 33545 - DNA, 1056 bp, Homo sapiens
tttaaactcacttacagcgtggttgaatttttcttttttcttctcgacatgtaaggacagataacctatacataacctttgaaatatggagtgtgccctgctttataaaaacttggcatttttgaattacatgtttcatgttaagagttgatatttgaattaaaaaaggattttggccaggcacagttgcccattcctgtattcccagcactgtgggaggctgaggggagaggattgcttgaagccaggagttggagaccagtgtgggcagcaaagcgagaccctgtctctacaaaacaaaataaaagaagcaacaacaaaaaataagccaggtggaatggtgcatgcatgtggtcccagctttgggaagctgatgcaggagtattgcttgagcccaggagttcaaagctgtagtgttgtaccactgcactccagcctgggtggcagagtgagaccctgtctcttaaaaaaacaaaaaacaaacacaacccccaaaaactctttctttgctttgtagaggtattcttttagtggattaaatatggttttatcttttcaaacatcttagaagcaaactagtttgcttgaagcatggtacattttaaaaactttcattaggaaaatagagatatagaaaagtagtatgatacattgaaaccacaggtacccacctgcttgattcaacaattgttaccattttgccatatttgttttatctacatatataaatttcctgaaccatttaaaagtaaactaagaggggcaaataagtttttttcagttttcccttttaagtatcatatgattgtattataaatgtatgtattttggactttgacatttaaagatttagattgatatttgctcttttaaaagattatataagaagacgtatatcttcagatctcgccaaggaaaaggaggacattctccctatatagccataaaaccattatcatttctagcaaaattaccagtaattccctagtattatactactttttgatttttttttgagacagggtcttgctctgttgcccagactagagtacagca

SEQ ID NO: 33546 - DNA, 1012 bp, Homo sapiens
gggaaagacattgatgatactggtttttggtagcttctctttctgaggaagttgtttgctgatcgtgtttgggaacatgctatgtttgggtcctgtaacttccctatatattacatatagagagattttttttgtttgtttcttttttgatggtcttaaggagctaaatatttggttcttagtatcagttttcttaggcctattatttctagttggtcgatattgaatattatgtagaatatatatgtgtgtgtgtgtgtgtgtatttttgtttttgtttttgagagagtcttgctctgttgcccatgctggagtgcagtggcgtaatctcagctcactgcaacctctgcctcctgggttcaagcaattctcctgagtagttgggactacaggtgtgtaccaccatgcctggctgttttttgtatttttagtggagacagggttttaccatgttgcccaggttgatcttgaactcccaacctcaagtgatctgcctgcctcggcctcccaaagtgctgggattacaggcgtgaaccactgtgtctggccagaatatcttttttttttttttttgagactgagtctcgctctgtcacccaggctagagtgcagtggcgcgatcttggctcactgcaacctctgcctcccggattcaagcgattctcctgcctcagccatctgagtagctggaattacaggcaccggccaccacactcgactaatttttgtatttttagtagaggtggggtttcactatgttgaccaggctagtcttgaacttctgacctcaagtgatccgtccacttcagcctcccaaagtgctaggattataggcgtgagccaccgcactcagccagaatatcttttttgattgttatagagatctgttattttctggatattgttccaccgaggtaaattattcaaacttaattgtccttgtcatatactacatataaaagatttatttataaaatgatatggagtgcagcacatttcctaaaattggaat

SEQ ID NO: 33547 - DNA, 1028 bp, Homo sapiens
caattgtgaagggtactgtttctttaatttcagtgtccatgtgttttttgctagtatgtataaatacagtttcttttatatgtttatcttgtatcttgcacccttgttaaactcactttcttgttggagattttatagattatttgggattttctgtaatacatagataaccatgttatctgcaaatagggacacttttatttcttcttccctaatctatatgcgttttattttctttttttctcttatttcatgagctagaacttccagcattattttgaataaaattggtgagagtagatatcttgcctttttcctgatgttaggaggaaagcgtttagtatttcattacaaatacaatgtcagctgtaggtttttgtaggtgcttttatcaggttgagaatatttttgttcctgtttttctggtagttaccatgaatggtgttgaattttgtcattattttctgcattgattgatacaattctttcacgcattaaaatggtggattatactgatttttgaatatggaactagccttgccttcctggaataaaccccatttcattatagtatacaatcctttttttttttttttttttttttgagacagggtcttactgttacccaggctggagcatagtggtgtgatcatggctcactgaagcctcgaccacctgggcctaagtgatcctttcacctcaccctgcccaccagtacctgggaccacaggtacgtaccactatgcttggctaattttaaatttttttgtagagttgaggtctcactgtgttgcccaggctggtcctgaactcctgggctcaagcgatcctcccaactcagcctcctaaagttctgggattataagtgtgaactactatgccccgccaaaattcaacaatatataaaaacagttatatccactgcactccagcctgggtgatagagcaagaccttgtgtcaaaaaaaaaaaaaaaaaaaaaaaaaattatatatatatatatatatatatatatatatatatatagct

SEQ ID NO: 33548 - DNA, 1025 bp, Homo sapiens
ttgagaccaccctggctaacatggcgttaccccatctctactaaaaatacaaaaattaaccgggcatggtggtgcacacctatagtcccagctacttgagaggctgaggcaggagaattgcttgaacctgggaggcggaggtttcagtgagtcaggatcccactactgcactccagcctgggtgacagagcaagactctgtctcaaaaaaaaaaaaagtgttagcatggttcagcatgcccttataacagcaacaataatatatgttaataggcggaattcattttaaaactgctttgttaagacaaaattcatgtgccatacaaatcatccatttaaattgtataattcagtagtttttagaacttaatattcagggctgtgcattcgttaatacactctatttaatttggctttgctgcaacttttagaacacgctaaattttagaacatttttatcatctcagaaagattctgtacctattagcagtcactcttcatttctttccagtctgtgttttgtccctatagataatttgcctattccagacatttcctacaacatgtggacttttgtgattggcttctttcacttagtataatgttttcaagcttcatccatgttgtagcatgtgtttcattcctttatatggatgagtaagattccactgggtggatatatcacattttattaatctattcatcagttaatagacatttgagttgttttcactttttggctattaagaacagtgctgctataaacaaacacacatgtctatgtctaacctttttaggaactgccatgctgttttccaaagcaatcatacctttttatgtttcctctaataatttatgagggtttcaacttttctacatcctcaccaacacttgttattgtccgtttttttgattattcctattctggtaggtgtgaagtggtatctcactgtggtttcaatttgcttttctctgatggctaatgatgtggaacatctttttgtgtgttttttggccatttgtata

SEQ ID NO: 33549 - DNA, 1030 bp, Homo sapiens
gcctcttacttttaccaatagtgcaccaactgtttctggagtagtagaaccacaaacgttagctgaatgtcaagagcaaatgcctaagagagaccctggaaaagaagtaggcatgtgcacccagactgaaccacaggattttgctcttttatggaaaatagaaaagaataaaattagcatttcagattctatcaaagtattaacaggaagattagatggatttaagccgaaagttttcaatattaacacaaaatcagacgttcaagaagcaattccatatagagtaatgtatgataaaagcacgtttgttgaagaaagtgagcttaccagtgcagatgaatctgaaaatcttaacattctttgtaaactgtttggatccttttcattagaagccctgaaagacttatatgagaggtgcaataaagatattatttgggccacaagccttttgttggattctgaaactaagttatgtgaggatacagagtttgagaatttccaaaaatcgtgtgatggatcacaaattgggcctttttctctggggttgaatttgaaagaaattattagccaaagaggaactttagagaattctaattctcctgtgccagagtttagccatgggattggtattagtaacgctgactcacagtctacttgtgatgcagaaagaggaaactcagagcaggcggaaatgagagctgtcactcctgaaaaccatgaatcgatgacaagtatatttcccagtgctgctgtgggtctaaagaataataatgacatacttcctaacagccaggaagaacttttatatagcagtaagcagtcctttccaggtattctaaaagctactactcctaaagatatgagtgaaacagaaaaaaacctagtagtcacagagactggagacaacatacattctccttcacatttctctgatatttttaactttgtatctagtacttcaaatcttgaattaaatgaagaaatttattttactgattctcttgaaataaagagaaatgaaaattttcca

SEQ ID NO: 33550 - DNA, 1047 bp, Homo sapiens
tcctttggtgctactccagatacatttaagacaagattaattttttagaacatatttattgaaaagtcttgactaatagaaatgaataaagtaaacatatttagactcatggaaaggaataacttagatttactgtgaagctttgtataactgcagtagtcaagaagtgtgaagacagtaacatagcatataacataaatagaaatactctaagatttagtaaatagaagcataagttaggaattaatagtacaagttagttttgtgatgcataaggtggtttagtatgttttctgcaaatatataatgagtaatgattacattttcttccctcccccttcccccacaagggtctctaacagttgaagattgtgtggttcatatagatctgaatctggcgaaagtgattcatgagaaatggaaagaatctgtaatggttggtaggcttctttttataaagagctccttttttgtccattttgaacctttgaatttcagtgaaatctaccacataatattaaggagttctattgaattttggctttgagatggaagagttctattgaattttgactttgagagagaatgaacttgtaccatttaacagattactgtctttttttttctctcttttcagtagtttaagtatttccagacagccaaattatataattagcgatggagctcattgtaattgttgattttttttatatcttttttctattttagagacagtgtctagctctgttgccctggttgagtgcagtggcacaatcatagctcactgcagccttgaactactgggcacatgatcctcctgccttagcctccagagtaggtaggactatacaggtgcctgccaccacacctaggtaatttttttttttttgtagaggcaaggtctcactatgttgcccaggttggttttgaattcctggctttaagtgatcctcctgccttggcctcccaaagtgttgggattataggcatgagccactgtgcctgacctgttttttttttaagaaaataattataaacagtgagttt

SEQ ID NO: 33551 - DNA, 1047 bp, Homo sapiens
tgttatatcacaatgtttaagaatatttattatcatcttaggttagaattaaaatagcatatttttaggaaagttctttttgtctgacagtttagagcagatccaaatatgaaatgtgagtaataatataattcttatacagttattttggagtaaatatatttgtgaaaaactgaaaaaaaaaaattgtgaattccaagatttctgtcaatctgaatttgcagcttgtttgtacactgtagtttctgcccattgaggagaatatgttttgaggacgatgttcacagcatcacacagtgtcacttttatgaggacccatggggaaatttctctcaggtctcagtaccagaaaaagctgtacttctgagcaactggtttgtttttattttatggacactgagaatctttgttttcccctttgctttggccactaagagtctcagaactaaatttgtggcctacttgtagcaattgtacaggattttgtggcatgcatttatatactaatactgctagccttagcttatattttatctttattttctctgacttcatttatttttatcctgtttatgtgtgtgtatgtatatatatgcctctatatcttcatccttttaatgattcaatgtgttggatatgcatgtgtgacagtatgtgtatatatatttacatacagatgcccacacatacatgtatacatgtgattgtgtgtgtgtgtgtatatttataagcaacttcaaatactttgcaaaaaatgagatataaataaatagtgcaagagtactcgtattactaatttcagcctttaatccgtaaagaaagtctgtgattgcttttaaatcatcagtagttttgcaacaagttaaccatgcctttggtcagtgtttctagtattacacatttcatcttgaacatgatttttatgtttttgttttagaaaagggagacccttatgtttgaaaaagattgtgccactaaactaaaggagaagcagctctttaagatatttccagccattaaccaaaattttctggtggacattttcaa

SEQ ID NO: 33552 - DNA, 1047 bp, Homo sapiens
cacagacatgatgctcaaaggaaatactcacagagcattttacatttgtaggttagcgatactcaacaagtaaatataatgcacatgttctaaaatatccccccaaaccccagcaatccaaaacacttctggtcctaagcattttgagtaggggatactcactcaacctgtatatttgtgctaatacatgactcattagaatgattctttgtaaacttaatattttaaaagtacagcacttctgtagtatggaaggtttcagtaataattatattcattcagtagtctcttaccattatctcccagatggaaaaagaggactaatgtggaaaccccagagggtgtccagttggaccagggagatattagacacttaacagtattttcagtctgtccatctctttattccaatgtgagaaatggaagtgtttttttttttacgtttattggctcttcatatttctctacattatttttaatgtgcagtttcttcaattggttagtatttccatactatttgcaactttatggcctttaaatataggacatattatatagcagaaattttgactttaaatcctcttgagtagtatattttgagaagaaaagctatactgctcttctggatggtttccatcctttatttaggtcttttctttttgaattcaagtgttttgtatgcttagaaagtagacatgtataatattgagatcggttatttctgagctggaaattggaaactttggaaactcaggaaattgctctgacaatgttttaactgctctcaatttaagaaaatgacgaaatgtataaaaaagacaaaaataacgtgtgctgttttttccaagtgctttttctaagtgcttttccattgtgcaatgaggtgaagtttggtaatttttcggtgtagtagttaaatattgctcaatttttatttacatgtaaagaaaacagatttaaatgtttatgtggccaaaaggtgtcatttaaaaggtaaaataagtttatgtagaatgtatgttcatggtgcttatttttaaaatgtaa

SEQ ID NO: 33553 - DNA, 1050 bp, Homo sapiens
tcctcctctcgcctccatcttccctatccccagagactgcatctgacttttgttctgtggccctttccaagggttggggcacaggcccctctattagggtagctgacttgagcttgtgcgatcttgtcaattgtagactagaattgcctgggatggatgcctagggacacttgaacctcatttgcagcctcttgcttcataaccaggcttccttctgtgggtttggcagtggtttttggaagaatctaaaacttccatctaggctaggtaagcacggtagccagaaaacatgcagagaaaattgacatgcctggcttctttgttacagatggacgaatgccttttccggtgaaccatggcgccagttcagaggacaccctgctgaaggtcatctttggaatgcatctcttcttaatgtgcctcacaattctttggctaaattttctattctaaagtgctaacactcttccagtatagccagcatcagttgcctgggttaatagcagtctttagggctgcaagatcctcttagtaactctatctaccttattttattgcaagtggttttaaacagggcttcagagacaccctgagtaatctgtttcatgtgttgtctttagtccacagttagaattagcctgaaagctgttgctttgcttcctggtgggattaaggtgaccattgtcctcccatcagattacatcatagctaaagactcacaaaacagcagcctttcataatccctctaagacaacgggatttgggtcagtcttggaggtagtgtactatagattctagttaggtggttaaatttaggagtttttccttcccacatggtctactgttacaagaacaaaataagcagatttaaaatccacctgacaaaaactgttaatatccaggatcactttgtaaccatcctggacagaaaagtgattctgggcaaaggttggtagacgaccctaggcctcttcactaaaaaatgagcctctagagttgaatcaatttgctattataaaggaaaattgcttaattatgatacacaaaata

SEQ ID NO: 33554 - DNA, 1142 bp, Homo sapiens
gaatttcctggttgatttatagcatggtatttaagatgcaaagaactatgttgctttgtttcatgggacccatcacgccgggcacggtggttcacaactgtaatcccagcagtttgggaggctgaggcaagcggatcacttgagctcaggagttcaagaccagcctggtcaacatgatgaaaccctgtctctactgaaaatacaaaaattagccaggggtggtggcgcgtgtctgtaatcccagctattcgggaggctgaggcaggagaatcgcttgaacccaggaggtggaggttgcagtgagctgagattgtgccactgcactccagcctgggtgacacagtgagactcagtctcaagtaaataaataaataaaataaaattaagagacccatcagtgttttgtgtttggttactctccagtaataactttgtaatttccacctagctcctgcattgatcttgcatttttcaatccaatgcattttggttggtctacttatacacttaattcccatagcaagcctcattaatctcattaattccatgccctagtgaactgctgagaagaaaagttgtcattaccatggattctatcacatgaagggatggaatggtggaaaccaccttccgttttctccctctgtctctgttttgctgctgtccaaatatttaacattaaaagagtattataaaaaacaaattgatttcagacatttgagggataacatatttgagatttaatgtatttggggaactgagaagtgtttgatgtgaggtagaggtacaaggaaatgggagtgggttttatatgcataatagtgcatgccagagctaggataggctagaggctagattatgtgtcagttacaaatgacccccaaatctcgttggcttgcaccatagacattttttcttgctcatgctatatatccaatgtggattggtacccagactgacagagacttccttcaccatatctccaactatgaccacccttacagtggggagggaaaggagctttctgttgagacatgattcatgggccaaagcaagtcttacagcaatgcccacctgcaggtggggaggggaagagccatcagactttgtgtctcaacaggaagacccgataccaatgacag

SEQ ID NO: 33555 - DNA, 1031 bp, Homo sapiens
cagaggagggagctcttttagacaatgaaacatagtggggtccttgagtgcaactaaaatttcttttctgattaatcaccgtccccttgattcatctttgcttggtcttgtgtatttccattgcatagtctgacttataatgtggttctgcagttgagtctttcttagaactgggtgatcacaggaagttatcttatttatctttgtagtccattacccctcctctcaccctacaggccttactcagtaacttgtgcatagtagctgttcaataaaagcttgttaaatattaaggtgatagatatcacagttaccctgatttgattatatgaatgtatcaaattatcacctatacccctaaaatatgtgcatgtattatgtatcaatgaaacataaaatcttgttaagggatttgattttcaatgatgataggggttgtgcttttgaagtgatgcaaggctaagaacaaaactgtaattgtttaattcagaaagtagttgtggaatggagtctgaagggagacacgacaatatggcctgcacgaaggaagattttgtgtatagaatgttctagcctgtttagattgccttgacttgtgtcaggggagcagtttgtttcactttgcctatataagattaatgtttctgagatgaaaaaaacacacaaaaaaggagctttttgacgtaatcaagcctctatcaatcacttcttgcttcctaataacttttgtatcttcctttcaggagagcagttgaagtgaattcttctgggaccaaatccagtgtttctgccttgaagaaacataattaactgacattttaaaagccactttatagacctgttctgactctggtctaaggacattacttgatttatagtttatgaaaagtctacttttagaatttgggtatgttttatggtagctcttttagttgattgctttcatttttctttgggaaattatctagaatagctgtagtgatgtcatcagaagcttgacttttacctctgtgtacttagagggctgactg

SEQ ID NO: 33556 - DNA, 1030 bp, Homo sapiens
tttgaaacattgttattttacaaataaggaaactgagaccagaaggcagtgacttgcctggagtcaggcagcaactttgttccagagttgggactggagtgagtctttgttcctcgggtcccacttgggtgctttttctagatccagatttcctgacagtactgcaaacctactgtgtgctagtggctgacacaaagctctctgcacaattccaatcctggcatctctacttctgaagatgccattccttttcctcagagggaatgggcttctccgcctccctctccaataggtgtggcaatcagctgtcttccagttccctttcactgcatcagcatttcagccgcagcagcctgcttgtggacagagcaggggttggcagtggtgacgactgttttgggaaaggaaatgtaagggcatttcggctgctgtgctggggctgacgaggagcacacaggagagatgcccctcccatctcccagagtgggttggctggagttcattgcggagcatgaggacgtgtgggggtaagtaaaattcattataaaagaaatacatgcttaggggtatccatgatggaaagaaggaagctatttagactttaatacttggtttaaaaaaaagtgactttttattcacttattagtatggcgaaaataatatgaaaattactttcctgtggattcatcttgtcctttgataactgttagcacctgttgcttttaattaagcttttttttttttttaattccctaaggaaagcattgttttttattttccggtatgtggtacaagacacataactccattagtttagtcaaaataaaaaggatttttgagaattttgagaatgagaagcaacttggctgcatttttaagatgtggtccagcagcacatggtgttgtgggggagatgtggctgcattcatggtggggctgcttcacctgagcccctgtcacattctgctcctgactccacagccccctttgctttttaaaaacttccatttcttaaaatgaggaggaaaag

SEQ ID NO: 33557 - DNA, 1045 bp, Homo sapiens
gtggccattctgtgctttaaccagtagtcttacagcgaagctctgacctgaggcattctgcttatagcactaacaaaactttgctttccaaggggttaaagaaatactttcaaaacatgtggcctcacttccacttaattgctgtagggactctctggtttcaacaggagcctttgaatctgaagtttaagccttgcttttgttctatcagccctcttttccttcagtgatatgttttgcattagcgttgcagtggagtagacactagcctgtattgattttggtttgcatgcttatgctaaggcagaggtgttaattttgaggaagaatgaatcctggtttggacctgtgcacttgaggaaaggaggaaattataatttccaccatctgtaacagtggccctgctccgaacattttgtggcaaagaaatgtttagtaggtagctctgggcggacaagagggattcaagaatcaataacatttaggcaaaggttaaagacagaaggatgaatggcaccgcccaacaaaaatagactgatgagagttattggccatggggtgtgacttggagaaactgtcgtttaaggattgggggagaaaaagggactcaggaagaggactgagaaaaagaaacagagaaacagtggaaagtggagcattctagcatccatttgaaggagagtgcagaaataggaggtaatgaactgtgtcaaatgcaggtagagatttagcacattgcaagaactgaaaagtgtcccttggattagcaagtaaggaatgattgttgaccgtaagaggatttgtaccagatggtgagaattgaagtcagattgtgagggggatcaaacaggaggagagaaataaagactgtgattatgatcaactcttgtgggcaggagagctgagaaagaagaggagagaatgtgtggctcagggagccacacagtccttggaggactgttcgttagggtagaaatgttttttgtcttgtttataggacaaggagaagactggtgagaaaaagatgaagacagagacagagaag

SEQ ID NO: 33558 - DNA, 1058 bp, Homo sapiens
gcatttgagtaggtgccgtttttcttataactgagaccaactgcaaattccttttagatggcaaatgtcaataaacatttcttgagaaactggttttctccatctagaagtagttgtaagattgctagatttaatgatttttaaaagtcattaaagatatttagataaagataaagatgcatttacagatttcgagaaagcatacatcagggaaaataaaaaattaacctggcctatctatccagttacctgggtcaaaacctcatttttttttaatttgaaaagtttagtacaaaaaaaagtttaagacatggagagcctgattctccatatagattccctgtcttccagtggcagtagatatttggaggtataaaagtgaaaagagaaacccatgcacagcatatgtggcacctgggtctggcaccgcagtgccagagcataaatagactgattttccaggcttgtgtccagataagttgtccaagacgagagccaggaaatcgctcagagtcacagaaccgttgctcgggaaaggacgttggacatcacttgttccaacccatagaggttaaatgatcagtccgagctcaccagcaactccatgtgagaaacaggcccagcacccagaccctcagtctcaggagggtgcttgccctcctgcttcacatgtctagtacatcttccaatgtcgttctctgggccagtccaccaccaagattctagttaaaatgagcagccagatgccaggtaggctttgggctagaccatgtctctctcaagccaggaaactgccacctcccacctgaggccccagggctgagtctggcacccgggcagtttggatcgcattctcagttaaggggaagccagctcctggctgagtcccatgcaacctttctgtgctctcattcattcacgtccagggatctgtttttatttacttgttttcattcttgagaaagtgttaccagttggagaagggaagggctctcctctgttgagctgtaaccaaagaaaaatacaggtcagaaaacacatttttccatcaaggcggg

SEQ ID NO: 33559 - DNA, 1027 bp, Homo sapiens
taaccaagaacaataattagtataggctgtttagatttactgatgagccagtgtaatttttttggtggaggggagtgtttgtttctttttatatatataaaataagtcacttttcatttgcatattttatgaagctttacaacttgatttcatcaattagtaattacggaattatttaacattttctgatttatttagtattttaaaaaatttcaaaagtaatacagataagaatacatttataaaaaaattaaacaacattttactctttaccaatcatgtacattcttttatatccttttttaaggataacttggatttagacatgatagatttcactatgaccatttgatgaatgaagatacacatattctccagttgaattgcttttaagttttgagagtatacacatgaattgaaatgtatatttatcacgcttgtatttgtttatttcagtggtcaaggaagtttgctccaaccttttatatactatagatttcttacccttcgatattcgtctcgaagaaacccatattgtcggtaagctgatgattattttaggcatgttttatttgttgagagtattgtgaatatatagtattcgcaattcttaagagttacttagctaatgtgttagactttagaagcaagcagtgtttttgtaaatttaagttctaggccttagaatgtactggggttggtgaggaagtggttgtatttgttcttagaaactgagactgcagttatctacgccacctctaaagcactgctaaaacttagcaaattttaaaatgtataagacatagattccactctcaactttcctagttgaagaaacaaaacacgtgtcaattagataaacaatggttaggatacagaattcacaagccaatagataatgaatgccatatgtttgctttattatatcagtactgcagtccacagaagggagagatcattgggccagaagatagatgagcccaggaaggtttcacaaaattgagattgtgggaggagtaaagctttt

SEQ ID NO: 33560 - DNA, 1087 bp, Homo sapiens
agtgaatcaagataacacaaatatgtgctggtaaacatcttcaaagctgtcttataagcacccattttaaccaaaccagtggaaaggtaatggaaaatatttcagcttgtaaatattgataaacaggctataaaactacattttcagtactacactttttttaattaaaggttttgagaccatctctattcacaatttgtaccattttcacctacgatatttattctcaagttggtggtttcagttgtttttggatctctagtgcagattgtctatagctgtgctgtccagtacagcacagcaaccacatttgacctttaaataaaattcataaaacttagaacttggttccttttgagcacagttcaggtgggtactcaaaagccatgtgttgctgatggcaactgtgggtcagcacacatatgcaaaaattttgtcattactcaaagttctgttgtcagtgctattaaggaactctctgactggtccttcagcacagatatgcaaaaattttatcattgttcaaagttctgttgtccgtgctgttaaggaactctgacttggtctgtgccagcgatgcagccagtaataaaagaactatgtgactttagtgaaagcgattgacttcattagtcctcatgtcttctagctttattcatttgactgattggttaaaacagtgattgtatgttgatgaacttatgtggaattaaaatatcttctttcagaggtactcactgctgaataaattagacagctatgtaagtcagtgtgatgatgaaggtgctctgaaagcatagagaacagacagagacaaataagaattcactgaggaggtgggaacataagccaagtcttttaaagaatgagcctgagttctgacacatgggtgcctgaaaagtgcttagcatacttgagctcaggaagtatatagagaattgataaatatctgtgtccacaaaggtagatggtagaaaggactagatcatgaaagggtttggattttattttgaggtaaggagagcctttgaagattgtaacatagagaggctgggaacccccatgatgaaatctgatttagaaatat

SEQ ID NO: 33561 - DNA, 1011 bp, Homo sapiens
tcatgtaaaaaaaatagctctaaaatttgtttcaacctaattggtaacctgagtttatatctggcatgaattcattatggtgatacacatatgtgaattcagtacattttgagacagtattctaccattcagtaattttggttaatgattttaacacttctcagtgtatttaatttcaaattgtttttttaattggttttatgctgctttgttaggacagatgtgttttgaatgtaccattataagaagaattctatgtatcttaaactatgatcttctaaaattttatttccgtaagtacttctgtggccttgagtattttttaaaaggctcaactgtaagcctcttagccagttggataaatatttggggtcacctagccattgaaagcagaaagcagtagtgacacagctttcccttcaaagagccattgagaaacatttctcaaacaggaaatccttcttttactaatgtggacatatagattattcgtattatagtttgtagaactacctagttcagaatcttgactgccagttttcttggtttcttaggcttgaattttcatagacaattgcaacagtttagatgccttttgaaaggaatgtaatgaagattcagcatctgactatatgtgtgtctatcctgaaataataatggagagtatactgtagattacatgtttacccatcaaatctgacttaaaaggttaaatggaaggttttataggtaaggtaattgattgggaatggggtagggggaggagttgtgggggaataatgtgcatttcagtctcaacgcatagataaatttaggggaattggatgtattattcaactttgatttgggttgtaaaatgtgttaaatcctgttcattgaactcccatcaactcttataaaattcatgctgatcttcattaccgttgcatgattggaaatgtttaaaacattgtacagttttagtatagagaaatgtaatggtttttgtgaccagtttctgtctgcatgtaa

SEQ ID NO: 33562 - DNA, 1135 bp, Homo sapiens
cccgacctgattatggaatttttgagtagcttttacaggaagcttcccaagcaggttgtggatcctggctccttgtgatctcttgtttttctagatttttattctcttgttagagttccttggaccttatcattatttctagtttctaccaacacatcttcccgttttctacagccttctttattagagtggtttgggccgagtgaatctttttccttatttttcttattatttcttattctgatcttaaagatctcatttcctttccctgttttgcccctcccatgagttcccaaacctttcttctaaagaaatcttatttttcaccgtaagcagcattctattgttcccataataatttcattgagttttttctctattcatccaaataatacaatatattcttattttaataaaacatacattctgtttgttatcaataaacagtataattcagaaatctagacccatagtcagagtttatggcttacaaatcgaagtaaaagttgagatcacatggacaaggtttatccctgtgtagttccttctcttagctctgaaggcaggtcaatacagaattttgggtgtctgatttcacacattcttagagcatatgaatttcagcacagtgcatttttctactttattactagtttttatgtagccagctcagatcctttctggaagtaggcaggacatgaattacaaggaaacaaaacaaacaagtttctggaaagagacccagatatgctttcggttttaatctttccactttctaaacaagaacttctagagaaaaataagtaaatctaattcagaagttttgatagaggaaaatgttctggtctgtcaaagccaccagttacagtgcttctctgcaaaattttggaggtattaaaaaaagtttttgtttttttacagccacgctccagaacagcatcagtgttttttaagggaccaggaaaagtggtgatggttgcaatttgcatgtaagtactgaaaaataagctttgtgaaatagaatatattcttttaaatatgtatatccttaaatatgtaaatttattacatggtagctagctatagagtttgaggtttattttgttttaggaggaaattgaataagtctttatta

SEQ ID NO: 33563 - DNA, 1127 bp, Homo sapiens
gcacccaggtggagataagtcaacagggttctttccaccagtaatacagggatagtgattatagcttttctcattggagggatgtatgtgtgaaaagtgcttaacatagtacctgctctaagatatgtacttaagaagtattattgttaatatatattggtctgaagctcaggagagaaatctgagttagaggtttgatagtttttagtatatagatgataactaaagccataaaagtaaagatcacctgaggaatgtatgtatatatagtatcaggaataaaaagtcctcaggaaaaattccttgaagaatgttaacattaagaaaaaggtggaggctttgggagacctcgtgatccgaggtcaggagattgagaccatcctggctaacacggtgaaaccccgtctctactaaaaatacaaaaattagctgggcgtagtggtgggcgcctgtagtcccagctacttgagaggctgaggcaggagaatggtgtgaacccgggaggtggagcttgcagtgagccaagattgcgccactgcactccagtctgggcgacagagccagactctgtctcaaaaaaaaaaaaaaagaaaaagaaaaaggtggaggaaaaagtgcctgcagaggagattgaggaggagtaaggagaaaagtagaaagaaaaccaggagtgtattagtccattttcacgctgctgataaagacatacccaagactgggcaatttacaaaagaaagaggtttaattggacttacagttcccgtggctagggaagcctcacaatcatggtggaaggcaaggaggagcaagttatgtcttacatggatggcagcaggcaaatagagcttgtgcagggtaactcccatttttaaaaaccatcacatctcatgagctcattcactatcacaagaacaacatgggaaagacccaccctcatgcttcagtcatctcccactgcgtccctcccaaaacatgtgggaattataggagctacaagatgagattttgtgggagacacagagccaaaccatatcaaggagtgtcaagaaagccaagggaagaagcgtttgttttttttttgtgagacggaatctcactctgtcgccaggctggagtgcagtggtgca

SEQ ID NO: 33564 - DNA, 1053 bp, Homo sapiens
taaaaaattttttgtagagatggggtcttactttgttgcccagactggtcttgaactcctgtcctcaagccatcctcccacctcagcctcccaaaatgttggcattataggtgtgagccattgtgcttagcctaattttactttcaacagaatctagtgtagagatatacagctgattgagtatgcttttggcttaaatttttgtccaaacctatgctaaattgttttctctttctcttctagcaatggattaaactgcttctttaaatttcttgcctggatttataccggttcagcaagtatgttctcagaagctatacactcattatctgatacttgtaatcaggtgaggactaaagctttttttataagtcaattttaaagtaatagttgtaggctttaatctaaaagttgatctattttaaaactgaatgattccagtagttggcttgtgggataaaataaaagtttacttttcagcaatgaagtgcatagaaatttaatcatagtattttaaagcagattgttatgctttaagaacctctgacaatggaatgtgaagtataacattgtcagtcactgagcagaaatctggtctctgaatatgaattctcaatgactgtaatagtcaatgaatttaaacttttggaataaagatgtaaaatcatatgtaattggttaaaatgctttcacattagattcataatttgaattactttccttggctttgcaaatggagaaaaatttttgtattaatacaattaaaagaccttctaaaccccctgtggcccaaattgtgaaaactagaaacccaaaacttttctaagaatataataaaaatttctgtgtgtgcatcctattacattttaaagagtgtggtatattaagaggataccttttcaatatttacttatttttagtcctgttatgtaaaaactgatttgggagaacttcaatgagagacacaggtaaaataagaatatttaagacaaggataaaaataacgtgaagataaggagcaaggagagcaatattaattaaaaattaagcctg

SEQ ID NO: 33565 - DNA, 1022 bp, Homo sapiens
aaacaagaaatttggagaacttcaagacattataaacttatatagaaattaggacagtgagttactggcataaggattgacaaatcaatggaacaaaattgaggatccaacaacagagccacatttacatggcccgtgcctttcggcaaaggtatcaaagcaattgagtgaggaaatgaaactttttaaaacaaataatgttggaaaaattggatccatatggggagaaaaaggaccttgactcctacttcacacactgtatacaagtttgaaatggatcatagtccaaatataaaagttaaaactatgaagattctagaagaaaacctaggagaatatcttttagacctggtaggcaaagatttcataaataggacacagaaacaatatcataaaataagatttacaaattcaacttcatcaaaattaaaaacttttgctcattgaaagacatccttaaggaaataaatacgcatagattgggagaaaatagtcacaaagcattctgacaagggactggtatccaggattaagaaattccacgattcagtaataaaatgagaaccagttttttccccccaaggataaagatttgggcaggtacttcacaaataaggaaacatgaatggtggccagtggacacctgaaaatgtgctaacaccgttaatgatcaggaaatgtatattaataccacaagacatctctgcatatccactataatggctacaagtaaaaacctgacagccaaatgttggtgaagatgtggagcagccagatctcccagtcattgctggtgtattactaaaatggtacaaccactctggaaaatatttggcagcctcctataaacatatacttatcctgtgacccaccaattccacttctaagtatttacccaagggaagtgggaatgaatggtcccaaaagatttgtataagaatgttggctgggcgcggtggctcacgtctgtaatccgagcactttgggaggccaaggcaggcagatcatctgaggtcaggaat

SEQ ID NO: 33566 - DNA, 1060 bp, Homo sapiens
attttgtttttgtttgttttggcgataagtcattgaaataactaaatatcagaaatctcctgcaatttatgtacctgcagtttgttcaagatttggtcatttcttccactgtagtatctaaaatgcagaacttcccactgtgtcaaagtaaattcaaggtataatttgaaaatggagttcaagttatttttatgctttgtagcacggcatggagatcttgttttctccatatttgataataataaagcacatattttgatcttagaggtctgttttatttggtccaaggaaacatatattctagatttagactcataggctgcccaatctaaaattttgatgataacttctattagatacacacttattttaatcctcctgttgtgatttggaaatgtattttgttaatatttcagaattatttatttgtaaaatgagtatactttttagaatgtattattttgaatcatagccattatttgatacagagatttttttctattgcttctattaacataaccatctaacacttttgaattccacaaacatcattttaagactagcttcagtaatataatttgataaatcttaagaccaaaaaaagtgcacttttatttctgtaaaggagtctacctctattctttagaaatgcctttctttacttgaaagcaatactactgttttcccataaataacatatttgaatgttttgtaactgtcaagctagtatagagaatagctctctagtgtgttaattacccatcattacagtgttttaccatcttaagaaaaatttttttttcatggccagttttatgtacaaaagatttaaaaacagaaggtacaaattttaaattttaggttgtgaagatttcttctcaaggtatttttatagtctactttagtgctgcccaacagaattttctgcaatgatggaaatattttatatctgtccagtatggtagtagctaactacatgtagctattgagcacttgaaatgtggccagtgcaactgaagaactagattttaaactatatttagttttaatttatttaaat

SEQ ID NO: 33567 - DNA, 1029 bp, Homo sapiens
ctttttatctagaatgatactagctatatatcatccttggttggatgagaagagagtcacccatattattttctgtagggcttaattctcttacagaacattagtaggaagaagatacggaaaaaggtttctttcagcttttgattccactgttattttgtctatctggtgtaggaaaagtgctatggatatatctaaaagaaatggactcttcattatgtcatttttttgtattggtgtctctaatctaaatgtgctcagaaacttcacatatgtaatgacaggtacaagtaagagatcttaattatgtcacatagtactcttatgaaagcaagttgtagcatcctcattttgtggtatattaaaactattaggagttgttaaaggaagtaattaaagaaattaggaataaatttcaagtgccttgatttactcgttctggttctttgctctctataaagttcactgaaataatataaactgttaatttactgatttttttatgtgcttcatttaggcaatccactgtatgacagcctaggttctttgggtgtgggcaccttattaggcatggtctcagcattcctcatctacactaacacagaagcactcttagggcggtccatccagccagaacaagtacaacggctcactgaactcctggagaatgacccatcagtaaggtcagccttattccagtaatcctgttaaggcttacaaaaacatattaaaaaacagaaatgcctggtttgtaaatacttccagaggaagttttggattcctcgtcttcagaacgttttagtctgtaacttttcagaattataatcctggaagtaagaaagaatacacttaggaaactccttctaagtttccttttaaattttctatacttctaatttttagagtaaggaagagtcaagttgatataatgagaatggaagtttgcaaagtagttgtcttcttagtggaaatacttaatatggaacctgtagagttgccttatattcgcattgcaattacaaattgaat

SEQ ID NO: 33568 - DNA, 1576 bp, Homo sapiens
accttcagatttaataactcactaggactcttagaactcaccgaatcatgttatacccatcatggtttggtttattacagggaaaggatactgcttgaaatcagccaagggcagaagaagtgcatagggcagggtccaggaaagttccaaacatgaagtttcagttgtcttttctctgtaatgcatagtattactctcctggcaatgaagtgtgacagtagcatgacgtgttgccaaccgggaagctcatctgagacttgatgaccagagattttattgaggctccatagttgactgcataagtagctgaccttttgtctctagcccttctagaggtagagcagatactgtgtggccaaaggcccccatcatatatcacattctaaagttaatgcccccagataaacaaagacactcttaggcaggacatgtcaagggcctagaaattccctcccggttatggagaacaaaagccaaacctccctttgggtaagattaattctctactatacactgttatattaaaatctgttggtctatttttatactctgaatgaatcttttacccatgcatgattctataacattatgaattagtattttggaaaatactggttcacagaagtacttagatctttcagatgttgatacatttctaaatatgggtacactctcaggctgatggggtggatatgtttttcaacttaaatttccacttaaaagcttgcattttatcattagcaacaaatactgttgttttccttgaaataagactcattttgttcattttttaggagatgcctgccaaatacccaaatttgaataaaccgagtttgttaatctttcaaataaaaatgtactctagattaaaaagcagtttattcagctcacaacttaagcaatcaaagaagtacttttacgtactttccattttgtcacagtatttttaaaagtgaactcaagggtttaggtttaataaaatggatatatttgctatttcatgaaagacttttttaaatgaaactggctttttttttaatgtcaagtgtgggacagtagagacaatgactactggtattgtttgatgccatttgtgttgaattgtgcaaaggtgcaagcagttttacccaccattgtttttatgccatcaggaaatgtcagcatagtaaaaaaagcaaagaatgtcttacagttactgtgaaaatagttgtgaccttagagtccccctaaaaaggtctcaggaccccagcagtccttgaaccgcactttgcaaacaactaatctgtataaaatgtgagacaatggttatttttgtgcaaggtagcacaagattgaataaactttgctctttattctacttgtttttattttgctggcaaggaaaataatggactaaatatttgctttacattttagtagatacaagaaatcagaagccagatttaagaataatcaccaaattggtccttgtcacctacatttactcttacaacaatcagaccttattgtttttgtttagctaactttgtactttaactagaggctattaaatcattaataatgtttttgaattatg

SEQ ID NO: 33569 - DNA, 1054 bp, Homo sapiens
gttttcaccacacaaaaatgtgtatttccagtgcttcgcaatgcttggcatgtactagatccttaatgcacttttgtattaacaaacacatgaacaaacttaggaatgtgatactacttattgtactgtttatagtatgtctatttacctattgatcttactttttttcttatgcaactatttctctcattagtatgctatagtgaaatagtttgcaaatgttttcattggctctaatgaccaaaaggaataaaaagaaacaagattttattttgctacaaataatgtggtggtgatttttctttccagaaacgaaatcctgaagttcgacatgtagatttggagatactgtgagtttgatggaatgaatcacctgggtggggaccttggaaacaagtttgtccgtccactctacaaagtttcctcctctcctacactgaaagactcagtgccatgcagaagccttttttttaagatgaaggaaatattttatgtaaagagcaactcagcaggacacagaactaaaactactacttacatctaacagacacactacaagttgaatcaatttgaaaatcatgtttttatgcttccatagggaacattttggttatttaaattgttcataatgtcccatatttcacctgttcagtgtatactgtactttgcaatcatctttccttttttcacattggtaaaaataagtggcatccataggatcatgatttttaatttgttgcctctgaagatttcactccatcaagatctgccaatcttcaatattctggctaaatcttggtatgtggtttttaaacagtcactccgtttcaaagtctgtctttccttatagaatgtggaaattatttctccataccttgtgattttgacctgagtgctaagagaatcactctccttacctagttatctacaaatgttcattccagaaatgtttagttactgaattgaatgaagacatctcagtacactcttttaggtcatagtagttgccattttgtaaaatttcttttttcttctttgcttttttccccttatt

SEQ ID NO: 33570 - DNA, 1114 bp, Homo sapiens
gctgtgtcgcccaggctggggtgcagtggcgcgatctcggctcagtgcaagctccgcctcccgggttcacgccattctcctgcctcagcctcccaagtacctaggactacaggcgcccgccaccatgcccagctgattttttttgtatttttagtagagacggggtttcaccgtgttagccaggatggtctcgatctcctgacctcgtgatctgccagcctccgcctcccaaagtgctgggattacaggcatgagccaccatgcctgtacatgcctacatgtacacatttaatccccacaaagagccagtgaaatgtggtctgtaattcacatttttgcagatgaggaaacagatacagtagttaatattagtgtctgagactactcatccaataaaaggcagagtcaggatttgaactcacaaggaagcattctgctaaacagaaaagcccaagagaagtaacactgtataaaattagaaaggaaatattcattatattgttatacagtaacctaatttatattcagtagtcagaacaattagctaaatctaactcagactgcttgggacagggggatgacggttggggtagggcgtggatcaatgagttgtttttttttgcggggcggggggcggtgtttgggtttttttggtttgtttgttttcttttgagacggagtctcgctctgtcgcccaggctggagtgcagtggcgcgatctcggctcactgcaacctccgcctcctgggttcaagccattctcctgcctcagcctcccgagtagctgagactacaggtgtgtgccaccacacccagctaatttttgtatttttagtagaaacagcgtttcaccatgttggccaggatgatctcgatctcttgacttgatgatccaccccctcggcctcccaaagtgttgggattataggagtgagccaccgtgcccggccctcattaaggtttttatggacgctgaggtcttgtctgtttcgttaggctattttttatttatttatttatttatttttttttttttgagatggagtctggctgtcttccaggctggattgcaatggcgcgatcttggctcactgcaacctttgcctcccaggtt

SEQ ID NO: 33571 - DNA, 1057 bp, Homo sapiens
tggaacaaatctcgtaaagataatgtttagccaaagaagccagacgcaaaagagtacattctgtgattctatttacataacatcccaaaacaggcaaaactcatcaatggtgtgagaagtcaggaaaatgattgcccacggggtcaggagtgacacaggaaggaacagggagagctagaggtgctggacagctgaatgtgatcaatttctttttctttctttcttttttttttttttgagacggagtcttgctctgttgcccaggctggagtgcagtggcacaatcccggctcactgcaacctctgcctcctgagttcaagcaattctcctgtctcagcctcccgagcagctgggattacaggtgcccaccaccatgcccggctaagttttgtatttttagtagagatggagtttcatcatgttggccaggctgatctcaaactcctgacctcaagtgatctgcccatcttggcctcccaaagtgctgggattacaggcatgaaccaccacatcctgccaatttcttgatcgaggtgctgagtacatgagcatgttcagttttttttattattatttatttttgttgttgttttgagacggagtctcgctctgtcgcccaggctggagtgcagtggcacgatctcggctcactgcaagttctgcctcccgggttcacgccattgtcctgcctcagcctcccgagtagctgggtctacaggcacgcaccaccacgcccggctaattttttgtattttttagtagagaaggggtttcaccatgttagccaggatggtttcgatctcctgaactcgtgatccgcccacctcagcctcccaaagtgctgggattacaggcatgagccactatgcccggccgcatgttcagtttttaaaaatctcatcagcctgtacacttttggtgagtatacttttcttatgtatgtcaataaaaagtaaaaacaaaaaaaatcaatttattgtgcccttcgtaccttctgttcctttaattggcatcaagtgtccctggtagatggcaaacattcttcctcctccatcc

SEQ ID NO: 33572 - DNA, 1079 bp, Homo sapiens
ggccccggggccccggtccgcgccgacccttggggctgctccagagtcctgggctaccgacaggctctacagctccgcagaattcaaggtgactgccccctggaatctgatttagccaagttttcaaacgttggagtgccccatgcgatcttggacatgtatagggctttctgggactagctctgaaccctgcttgcaacttggtacagggaggcagagcggagagtgtgagcactgctcaggttcccgaccctccactcctcactagtgtgaccttgggcaagtcactaactttgtaggttttctcattttcaatgtcaaatgttgatttgtttacgcgagccactggtcgaagtgctttgcgtttattcatctatttaattctaaaaagcctactaagcaagttgctagtaaatattaatataacgtccattttcctgcaaattaagtagctatgtggcctgggcaagttactacattgtcactctcctacttcatttgttgaatgcagaactgatcaaacatccagtggctaatttgtgagatttgtgtgatgtgagaagtggacttttttagactaatacctagaatgcaggaagttctcggtctgtctttgtagttttatttcattctacctcagccagagcaaacctgtgtaattttgactctggtgggagagggtgggaggttcaacaactctgataattgtgaatggatacattttagtcagaaaagtgaagtgactgaaggcaagctataagtaggcagaaagacaaaaccttaaattaatcaactttggccctaatatgcctgtgtttttaaaaatggatttatattgcaattcgaagtataaagatggtgcaattctctataccttttgaactgaagggaaagaaaatctacagggcaaacatcagaattagttttttttcggcagactttcagctataattgtgcttttattatctgtctttatggggctattaaaaaacaaagctcacgtgaattttatatttcattgtaatttcatggttttgctgattgtgaaatatgcagttgattggaaaaaaatagagtac

SEQ ID NO: 33573 - DNA, 1102 bp, Homo sapiens
attagtaggtttaatgtttataaatatttttaacagaagtctgtcaattttagtttgcatttgggtactactttctgaattataagtggtcttaaaaagccttgtcgtttggaaacttaaatacattttgaatttaatgagagaacatgatttatttttgaactacataaaaataaaatattccagcttccagcattaaggtaattatgttcaagatggatgttttacataggcagtcaattccacacttaacagaaagtcatcatagactatgaattaagatcaggaaaaaacttatttcataccaggaggcaagaatcaacagcaactagtagctttttggaattacaaatgtgtttcctgcattctaaggaaacactagaatacctatgttttcaatagaggttaggtatcaattggactgcttggaaacaaaaacacaatttttataatgatttcttttgaaaaaatgagttaagaaatttttaagatttttaatattttggaccacaacatagctggagctgtaacaacttcaaagttaaggaccatgtctgttttattctctatttgctttgtattctgtatgatacttaacatggtatctttcatacagtaaatgtataagtgatgcttcctgaagaaagaaaggattttaacagtacttctgaaaataatctgttaatagagtgtattattgtcactttatgaccttcctgctgaaaatctttagaaaccaaatataattttgcaagtccaggcaccaattgttttaaaattaagacaataggagtatacatattcttgtctgtgattgggacaacttgtaagcctaattgaaattttctttagacttcagttttataagtgaaacatttaaatgtctgttttgactaacattacaagctttgaccacattgttaaaagtaatagctgaaactaagtgcttgtgtgtgctaagctaggctctgtttaaacacttattatgtactaggcattgctctaattggtttacatgtattaactcatttaatcctcacaaaagccctgtgaagggagatgcaagctgaagagccaaataggaaatccaaaggtctcattt

SEQ ID NO: 33574 - DNA, 1387 bp, Homo sapiens
gcctcccaaagtgctgattacaggtgtgagccaccatgcccagccatgtcatttcatttaaagtcacaatttccatgaatctcaacaagtgaggacctgctatattttgttgcatgcagtttttctttacggacactaaaaggccccatacttaagattccatctactttaagtttaaaggattttcagaatcaccttaagtgtcaaatttgttagcaggattaattgatatgaattcacttattaaacagtaaactcaaataacatagacatcaaataacagacatctgctctagttaatgataaaatgtttatagattttatcaggtggttagtttgaaactaaatggtttacatctaaattaagggcaggagctgtctttcagacattcaaaacgcatttgtgtaaaatgacaggtgtttggtattaccaggaactcataatgacattttaataattattgtctaaatttcataatcgaagcgattttagagtagttaacttgagatttcacagccagtaaatggctgtatttctccagagctctcagctcccatgtttattcagccaacgaacaaaccagactgcagactgtattagagcaagacaacatcatttagccattgatttttatcttctaccttgaatgaattgaatgaagaaaatgtcttttagggataaacactatcaaggatgaattttatactaaggttatatgaaagaaaaatctcaaaaccactaagccaaagggaagtcaagctgggaactgattgaggcaaacctgcctcccattttattcctaaataagacagccacaaagataaaatttgctcacaagggaattccttatggacaaagaactcaaagtcttcacatgaaacaaatgcataaatgattgctttctctgtttcatgtttcactaagccagattaaggtataactgactattcctctactctcctctcacatgtaaattgtatattcagtgaaaggctaatcagaaactcaaaaaaatgcaaccctttctctcttacctgcctatgcttgaagcccccgcccctcttcaagttgtcctgcctttcaagaccaatgtacaccttacacatactgattgatgtctcatgtctctctaaaatgtgtaaaaccaagctgtgccccaaccaccttgggcacatgtggtgaggacctcctgaggctgtgtcatgggcacaccttaaccctgggaaaataaactttctaaactgacttgagagctgtctcagatattttgagcttacagttattgtgaaatcattttaattataaattaagtggagatttacttaaaatcatgtgtagaagtagcctgtgatatagtcctagatacatacattatcatcttatgta

SEQ ID NO: 33575 - DNA, 1056 bp, Homo sapiens
cagttaatgaaccagagattttatattttggagggtaaagaaatgagttaagttttccaggtattaagaacatgggagggtggggaaaggcacttaatgcggttttgcaggaaatgggattactggattggagagataggttgcttgttagtaaacagatgttccttgtcagaaaggctgcaaaaaggactctaaaatcccagctttgagaaagacccacttttaagggacaagcaaagagtactgggaagtgtttgtgtagtaggagaaattctaaccataagaatgggactctaaaggagggaagggggaagcattccattcactagtcctgcaactgctcaacagcctacttgaaggtcacctgaaacttcatgtccagtaggagaggggacaacaaagataagggtaatatcagctgtatgatttagaagatgcaacattttccagagtatcactttgtagaggatcgtttttctacttaaatagtattcatctgtcatttgctaacaactttgattacggaaagaatacacagagctttaaaatacatgcaaattaaaatatcagtaaatattaaaaattcaactcctttataaaatttttttctttacattggatatatcttttatacatcaaataggactgcttccaaactagaaataattattttgaaaattctattaattgctttttagatattaagtcaaatatttactgtgactttaggtaaaaactgacaactttctacatacgaattttatataaataaataattgctacttaagtcaaacagaaataattcttctgataaaaatgcaccagacttcctgaaacgttaccagaagaaaggttaaatgtcacagattctaaccaatgtctatacaaagtaacttttatggttttgactcaaaatgaactcattctacctttgtcaaactactgaggtggagcctaaatacaaagtaagagaaaaaaattcatgatgatgatgtcatatactaaaaatcaaagctgttctatttaaaaagcaaaaatgaaaagcgagaatgaata

SEQ ID NO: 33576 - DNA, 1046 bp, Homo sapiens
gcagtgattatgtattgtatcatgtgacaaaatatagatgaatttagtaagctaaattctgttttgagttgcgatggttttcttgaaaactatgttatttatgttggtactaatttaattaaattaacattcagaaattacacagccaatttggcaacacttaaattaatgctgctatttaatcagcattgttaatgtgactttaagcattgacaatgtcaccattatttagtatttacttaatatttctgttgtgcagcacacttagaatagttcatttctttaatttagacaattcttattatagacctatagactatcacctatcagaaaacctattaaaacacaaatacttacagttaacctcaaagtgtgtctacaattggattaaatacagactccttgatggcaatagctgttttccactgtctagggtgcttctcttcctcttatcttctttgaaaattgtggaggcataaggaagtaagctcatcaatgacgttgctggaaagaaggaaaacagcatagcccctttgttaccatccgaatgtctggacatatttagagctctcctaataaaagttggatatattcttgtaacaggcatattaagacaaactgtttgttttccttaattagaaacagttctttcttgcttattctatttacttgagaaaatactctcagttaatcatctttaataagcatccttagccacttcctaatgctataataaatattcaaacatatagattgtccagtgttctaagaggcataaaactcaggtatacatggaaaagtgagtagagtggtagatgtaagcccagtaagagaaagtcacacaagtaaaaggaacacttcaggatgactcaaaccaatggaaaagttggaaatattggccttttgtctatactttgaagaacctctttgtttctagaagttacttttgcctttctcttgagccgtaatctcctgcctttaagctgctaataattataaatctgaaagtttgctgctcagaggaagaatgcattaatctcttctgg

SEQ ID NO: 33577 - DNA, 1064 bp, Homo sapiens
ggtgtgagccaccatgcccagcctaaacatcatttttaacagctgtcttatatttccattagaaatagatttaacacaattagatataatgcagtcaacaatttctctatttctcaacatttgtgtagtgactttcctttttcttttttttttttttttttgagacggagtttcactcttgtggcccaggctggagtgcaatggcatgatctcagctcacagaaacctccgcctcccgggttcaagccattctcctgcctcagcctccggagtagctgggattacaggcatgggccaccacgcccggctaattttgtatttttagtagagatggtgtttctccatgttggtcaggctggtcttgaactcctgacctcaggtgatctgcctgcctcagcctcccaaagtgctgggattacaggcgtgagccaccgcgcccggctgtgtagtgactttctaaggctgagttcagtatatttctactgagggccagagaggacatttttagagcatattatcctatgggtctagagaagtaagacaagtaagagcaggttaaagtcccccaaaactatatgaatgtatgccttcattgagcattatgaataaagaaactctttgctacattctacattcagagtcaaaaaaatgctaactctgtcttaaattcttttttttaggttactactgaagttgaaaatatttttttcctatatatttatagtatatggcttctgtgtttgttcaggctttttttccaactgtgctattcatgtgactattaaaccagaaatgaataatttttaatatttatcttataagatattaattaattaattaatttttgagactgagtttcactctactgcccaggctggagtgcagtggtgtgatctcggctcactgtaacctctgcctcctgggttcgagtgattctcatgcctcagcctcctgagtagctgtgattacagttgcccgctaccacaactggctaatttttgtatttttagtagaaacgggtttcaccacattggccaggcttgtctcaaacttctgacctcagg

SEQ ID NO: 33578 - DNA, 1079 bp, Homo sapiens
ctttgttcttccttctgcacctccttcttaaactagatagctaattagttattttaagaaaaaagaaatttaaaaaaaagcctgctttatttgttagtgggctagaatacacaagacatacccacccatgaagagtttatgaattgtaacttattgacattatcataggaatttactaccagttaaagagggagaacggaggaagagaaaaatacttcagataaaggaaaaagttttcttctcacaaaaacacagacacgtgattgttttcacaggttccattaattaactcaggtctggaagacataggacaaaatggagtttctgaagaagtccaggtgaattcagctttggagtcacttatgttcattttttttccttttcttttactattatcctaaaggttatttttcttgttgatatagagatttttgtaaaagattgctacattatttcaggattatatcctacatttcgattgctctcaaatgttttatccctaaagagtgagttttccacagactgtttggaagcaactagaaaaatctttgtgaaaaatctgaacaaattatcataatggctctcttgaaattttgcactttcacccttattaaggaaattataattagttactaacctttaaaaatagatatattctaataggatagaaagttaacttcctggcaaacaaaatactaagatctcaggggctactgcaggaaaatacctttttcgcacattaaaatgtttataaaattttcccctctcatttcaaatgcatggcaggaataacatttttggtggtctttaatgtgatggacagatttactgtcacttattgattttatggaaaataaattggctatcttatttttataacaatcttatttttctcaaaacaaaaatcctaaccaaaaagttgtcattaaaaaaaaaaaaattcaggtagactgaatgtttttctgctctaaccttaaatgttattaggtttggtttttgtttctaagctacttcaagactacctgaggtaataatggtaaactttattattcagaattcgattaaactaacttcagcat

SEQ ID NO: 33579 - DNA, 1074 bp, Homo sapiens
tgggggttcgaggcgtgcgcaagtaacagggttgtagctcgttgtcctttggattgtggaccttctgagtgctggaccctattggggtctgtgggttggggcagcttgagaagggctgttcgcctggggaggagtcggaggtgggaaactgctttgtaggcagggatcctgctttgtgtaagatactggctttcggatggtggccctgggcattctggatgtaggagaggggtctgcttgatgaggtatcaccaggtgtgggggtcaggggcagaccagagtcgtctacgtctatgcagcggttggtgtttgggacccatttctggcggggatggggagaccgtatgaatcagcactcccctttgggtagtggggtaaaccttgctttgtgtgaagagagggcagaggatggtgctgcttttttttttttttttttttttttgttactctgtgtgaagagtcaagggtggaacgagccctggctcttattttctaaaacaagaattgagtctggcgttttgcagagctctgaattgacagttatcacatccatctttcatttccacgtccttctaggggcagagaaaaagagtcctatttaaaaatttaaaccaaagctatattgtcataagccacttcttgatgaaattgtggcccccccaccttaatatcactttcataaataggacatgggaggcttttcctctcgttttattataaagatgtgtgtgggcaattatttgtcttaattcatttttcttaaagttttaacttttagctaaaatgtctctgctctattgaaattaaaacttctaacagtgaaatcgaaatcattcatagactctggtattgcagggctggaactttgcagtgttctgaggtagttaagagctttcctgggttcgcccctggttttgccacttactagcagtatgaccttgagcaagttactctgaggctcactttcttcttgtatttgatggagaaaataatagcacttacctctatagagttatgaaaatttagtaagataattatgtatgcatttagcgctggatctggcacatagtaaac

SEQ ID NO: 33580 - DNA, 1805 bp, Homo sapiens
ggttacgtttacaaaagtgctataatagaagttttggcaaatttattactgcaaatgtttttgcactgatttcttggattgagtataatttaaggaaatagttttagataataggatttgaaggtaagtcaaataggcaaataaaaaagcagaatgtatgaatgtttgtattttgaatatcagaagttgaccatgggcctccaatatgaatgttttttggtgccatggtcaggtatgttagtaatagactggatagattatgtttgatgggaaaggaggtgacttaataggggttattatagaaaggggtttttgtggacttatttgggaaccttaggcttttttttttttttttttgagacttttcaatattttttagtacttccatggctaggggtaggaggcatataaaaacatgaacctgaaaacactgtggtatctaaactagggcaggagatcactataccataataaaagagtagaagattttaagtttatataaattttgttgtttgcctctgtaagctgtttcataatgttttttggaattaagtaggtttacataacttaaaatttttacctaaagatttcatgttgctgtgttgatcaggttaagaaaaccataacttctagctgaatttttaaaatttgcctataggggttacattatttttatcactccaagctaccaaactacctatcctctctgataagataacaggaaagcccaaacttggaactgttatgaactggaattcttggcatctctagctgtcttgttgacttagtaaaggtaaagaagggggaggaggggcagggggtgtgctattctgttttgtttaatcccttacttatttaaattgatccagacttctatattttctgattagtattgtgacgtgggcattatcattacctacctcttctctgtaaatttttaaccagttgagaaatggacacagatataaggtaagatttaaaatattagcttaataattgatgaagctgagatggagaatatcttttggatccaaggccaaaatggattttctgatttcccctcatatcgagacattaaagggaggggtctgcattgactggcaggagcctcttctcttgtggggttgtgaggcacacaggagacaaaggccacctgttcacaggtatatttggcatattaaacgtgtccagtaaagaaacatggaccaacaggtgataaattggcacacaaatcaattcatccatcctggggatgaacctgtacaattgtctagaaagctaatatatcgtaggggtgacaggatcatgggaggaggaaaaagattacttaacaattggaaatatagtcactttgattttaattgcatttagtagtagcaggtgtttgaaaatggaaagtaagaactgtgttgcttggcacagtcactccataaatatttgttgaatgaatatagtcatgctactaaagtcaaaaaaggatggacacgttcttctttgcattttctttttgcaagttttttgtgtttcttcagcctatcccactctgaagaaaacaatccagtctatatttttaagacttcatggaagtggctatttaaactgctttgagaaagattttattcattccctgttgttgggcactgagtgaagtggaggtaaatagggcagagacctcaccaagccagcgggaaaaaatgaagactaattagacaaagtgaatgcagagataacaggatattaattccttcttagttgcctctttccttctaaacaccccattaaaaaatgggcaaaggacatgaaca

SEQ ID NO: 33581 - DNA, 1221 bp, Homo sapiens
aattatctcataaaagagataatttataaagtcgctctcaaaagagggacaacagagggttccggaacgttcccgccagccgccacgagaagaccagagaggtgcatcacaacagcccaaagtcaagcctactcccaacccccttccccgccatccagggaaggggcggggcagggttcttggtccgccgctgtcgcctgcgcagtcgcagtgcggctcgtggccgcagctgcctgaaagggcaaagggacgagtatacgcatgcgtctattcctaggctgctggctctcagacccgcagtgaggtctgacgtcatttcctgccgtaagtatacagtgcctccgggtcgcggtcattttgagcccctgtctggatgacttcttgcggctgttctacccctccccctccccgcggtaccttgcacttttctccctccctgccccctctcgagtccaccctccgggccttctgcccctgatcgcttggttttccttgcagtcgcctgctgctgtcgtcgggaggtgggtgaggtgacgcaaacagccccgttgttgccctccgcgtatcccctcaccacctttgcggccatccacgactttcgcaccttccgccattttcctgcctgtgagggtggacagatcgcgctcgggtctcggcctcctgagtgccggtgactgcgggaggcgacggagtgcttctgggggtgtgagctggggaagttcgtggtcacggatgcgtgtggggttgctgctcagtctgtaacggcaggtgggagacggacactgggtggaggatggagtgcggtaatcagcggttgtaggccgcttaggctttaatccagcgttgttttgtgtaaagaacttaaaatggtattgtcttaagcgccgtgtcagccctgacagtcttcctggtgtttctaggaaggatgccgttatgggaaataagagggtttcattttttctcatacggttgtagggtaaaggtagtttattcagcaggctccatccatccatgaattcagctgaccttttttatttcttttctctaattaaggggttggcatgtagtaggccttcatggcttattgactgaatgaattatggaagggctcagttgctgtcctcattgtgtatgccatttcctgtttccatgcaaattgtttttaaaatgagaataatcatgatcccacgtaaacgttctgtaaaatacggttacttgatc

SEQ ID NO: 33582 - DNA, 1081 bp, Homo sapiens
cctgtaaccaatgaagttgaagacctttccatttgtttatacttcatttcagcatatctttttctgtgaagtatctgtttaagtctgttaaccatttttccattgtattgtcttttttcctattggttttgtgagacttctctgtatactttggaattgagtcttttgtcagatatagatatggtgattattttttccccactctgtttaactgtagttttcagtgttaatagagtccaatttatcaggtttcttctttctaataggtgctttttgttgactctttaagatcttcgtctactctaaggacacaaagatggtctcatgctttcttctgtaaaattttttaaaaaaatctttcatatttaaatttttaagccatctggattattgttcgatgtaggatcaaggtacattttcccctgttaatggatattaattgacccagcactatatttgaaaggactatgctgcagtgttgtctttgtcataaatcaagtgtgcaggtgtggatctgtttctggactcttagttttggtcagtttgcctattcttgtacttaataccagactgtcttaattactacagctttatcatgtagattttgctatctggtggtagtcagttctataatacgattcttcagtgttgccttggccctttgtgttccacatgactcttagaataagcttttcaatttttgtaaaactttgattttaattgggattgcattgtatttataggtgaagttatggagaattgccatctttagaatattgggtctttcaattctcagtaagttttataacttgtcagtgtagagatctttcatatctttcattagatttgttcctgggttttgagcgtttttttttttggtgctataattaattctgtcttctaaaaaatgtttgtttttttgtttgttgttggtataaacagtttttcatacacacacacatatatatttggtctattgaccttacatcaagtgatctttctaaatttacctgttctaatactttgtagagtcttttggattttcgtcatatttctcttgatactgaattcatttggtttt

SEQ ID NO: 33583 - DNA, 1331 bp, Homo sapiens
ccctgtctcaaaaaaataaaaaaaattatatgtatatataattttggaaataagctatatgaaagaagttattttaacacttctttaagatataggcaatgactcatatttcttactacaatatgattttcatttacaggcactattatcaaaagtcaaaatatgactcaagtgtgagtggtcaatcatcttttgtgacatccccagcagcagacaacatagaaatgcttcctcattatgagccaattccattcagttcttctatgaatgaatctgctcccactggtattactgatcatattgtccaaggtagaaacttctcttgaaatgaatttcaacattttatggtccaacgtatgtataaactttatttgatgaccttttctgctggatatcacctgtgtgttctaccatcaatcatcaacctaaactcagcatgtttgttcatttgtttcttcattcattcaacttttcttgaggaccagtaggtgtcaaggactctgctagacgtggaagaagatgaataacacttggttcttgtccctgaaaaactttcagtctgttagaagatatagaaatacaaggatgaattactagtatgtcccagtaattgaaaatactaaggcaagcttagtggaatagtgaagaagaaatgataaatcgtgtctcaggaagtagagctccaggaaaggtataaaaaggttacatttgataggctgggttttaaaggctttcagcttccctgtctgtaatacaagaaagaactgttgtcaagtgagaaaatccatgtgaaaatgctttgtgaagtttgtaaatactagctttgaagatcacacatgtaagtgcaacaacatcaattttgtattaaggcttggatttgaatcatgattgacatttgctagctatgtgaccttgtaatactactactacattataataatgtagtaatattattataactactttatgatcctttcagtttcttgatcagttgaatggagatgatactacctctcttaatgaactgttggaattagaggaaataatcagaggcaatgtctggcaaataatagactcaaaaaacattagtttctttccttcagtctagtcggcagtaaaagatgaggaattagaaacgggaaatacaggtctgtaattctttatctaaaatcctgaaattcaaaaaggtttaagccaagtttttttttgttttttgtttttttttttttttttgagatggagtcttgctctgtcgcccagtctggactgtagtggtgcgatctcggctcactgcaacctccgcccccccagcttcacgccattctgcctca

SEQ ID NO: 33584 - DNA, 1023 bp, Homo sapiens
tccttccttcctcctatttctctcttactccttctgccctctctctttcatatgccttaggtgcatcccacattctgcgtttttttggggaaatcctcgacaggtgcaggaaacttgtgttattgtaactatgtaccgctatctctctttcacggctctccatcagttgtgaacatctattggtttatcccaagtcactaagcacatttttattaggtacacctgtttttccttatacagctgtttctggagtatagggtcgcatactcataaacccagtgtaactcagaaacgcatctaatattccagtaaacccatcataacgttgaaaaatcatgaatcaaaccatcataagtctcggcttgtccgtggatatgggtgtcatcaattccagtgtatacagtaatgctgtacaccattaacaatggcagactgattgggagtgcctactgatagcattataaaagtcagttattagagggatacttctttaacctgactgaagaactgatctaatggctttagtacagtgcatgattatgtgagatgttttgagacagagtagtacatttgtgaatgaaattttatggcttttttcacttagtaggaaccattgtgtgtggaaaagtgagaaaattgctttctgctgtagagtctggcattcattgtagatttaagcttatttttctgtgagcaaatcttattcaataaaatactactctttatactaaaaaacaaatcagtggtgatgtgtggtcattatcctcagcaaactaatccagggaaagaaaaccaaacgccacattctcacttataatgggagctgaaaaatgagatcacatggacacaggaaggggaacaacacacactggggcctttcgggaggcagagcgttaagaaaaacagctcctgcatgctgggcttaatacctaggtgatgggttgacaggtgcagcaaaccaccatggcacacgtttaccttagtaacaaatctgcccatcctgcacgtataccccagcactta

SEQ ID NO: 33585 - DNA, 1042 bp, Homo sapiens
gtaagcactgggttccagcattcccttgcataaatatgagaacacagtggaggtacacgtaacccttgtaacgataatataaactatgtgttggtatttcttggggtgtttgaaaaaataactgtcttgaaatgagtgatggaggtgggttagtggaatttagggtggaaatgtgaaggtgagcaaaggtaatatgtgacgtcttcaattttcgaagaagcttggaaagcaaatgagaatagaagaaaactgtaaaaagtggagaaccataagactttttttgtttgcttgttttattattagctgcaggctgcaattccttctctccttaatactagaaaccttcctctccataagtagactccctaaacgtcacatccttcaccagttccctttactgtttacagggaagggactccagaatctgtaatgtagaaggctaagattaatgcagagatgatagatttttgtatgtaatatataaggtattatgaaactacttgcaacatagtcattagaagaatattgtaatttttctgatgataaaaatattaccaagaagtcctaagatttgtaaaccttttggtgtggttacaaacatactgaacttggatacttgattgtttgatggttcttttcatgatgagtgaaaaattgggcaatgtgtgtggtgttcttgtggagatcatttatatctatctgtcatattttacttaatcgtgtggtgaaatatccaggaaactcttggtaatataaaaatatgtacaaaaatgtgcacttaactctggaattttttcttgcagagggtaaagtgatgaggttgaaaaacatgcaagagctataattgtcttcaaaatggtgtttttaaagaaaatatgaagctagtcatagctttctctttttcttttgttctattatatcccaaagggcaggtgctttttatacacatatagcccacctccctccattccccaaagccctaggctcctacacactttctgctctggtttttaggttcctttttgatttttggcgcttgggg

SEQ ID NO: 33586 - DNA, 1026 bp, Homo sapiens
tttgatgcttacaattactgtgtgatgacagtctcctaggtagcctttaaaaaatcactcttgagaagaaaagttataagaaagaacagaaccaaatgaggcattccctcactcagccattcagcaaacattcaaggggatttttgctgccaggtgctgctgtcacaggcaggactgtgtgggggagaccggggcttcaggagcttccttcagtgagttcattgtggagacagaaggaatggatgcatgggacgatgatgcctgctaggttagatggatgccccgggggctttgagaacatgtggggaatggttagcagttgtcatgtgagttttagcttttgaagttggattatgtgaagaacaggatgtgtatgcatgtgcaggtggcatatggggtcaggtgggagctttccaagcccagcgacaacatggcatggtggggacagagaactgtggcaggagagtgggtgtttggtaggctagagtggaggggaaggtgaggtgcagggctaggcaggagctggtggcaggggtggggtggggtcggtgggaagaactcaaaagaggcaccagggagagtgtatgagtggaaaggaactgagagaaggaaagagaagtcccaggtggggcacagggagggaggaggagcaaaggggaatggggagggactaacacgaattcagtgatgatcttggatttgcttcaactgctttgcctgcattaactcatttaatcctcacagcaaccctcaataagttagggactgttattatctctgtttcacagatgaggacgctgaggtgtagaaaggttaactccccttctcaaggtcacacagcttataagtggtgaattgagattctaactcaagcattctgactccatggtcttggtaaccctctactgccactgaaatcattcttaacattttgtttgtgcttttcattgaaccctgattggaacactgcatgtatattggaattctttttttttcttttgtcactggcctatgaatgatgctgac

SEQ ID NO: 33587 - DNA, 1045 bp, Homo sapiens
gatcattccatatcagcaaatatagatcaactcaaggacagtcaaaaacaatttatttaataattttaaaagcagtatattcgcatagttttgaaagaagtattgaaaaaatataaaacaaaaagtgaagatttctgtcccagtttatcacccctaggttccatcccccactagtagtccacgtttgactttccagaggtaactcttctgtttgttaaccaaattatggtgatgatgatgatgatgatgatgatgatgatgtattttttccttaaatacaagtgtacatttatatttgccacttttccactcagtatatccttgagatcttttcatattaacacatttataaagcatctgctttcttttttaatgactgtaattttctaatccatgggtattttataatacgttccttcagcctcctgttgatttatgtacacttatgcttatatgtttaacttttagccaccactaataatgcaggaatataacttttggaccagttttagtagttctgaacttttgaattagataagtattgttactatagtaattttgcatgtaaatatttaacccaaagtgtggcacttgaaattcagttaaacgaaagtatacttggactcatgcctccacttttgccttggttacagtggatacgtccaatactgggagtacttttcatgggattcttggggtgttgctttgccagccggaaacttctgtggctggtggcaccttctgcctgagtattgcctgtgtctgctgggctccttccacccacttggccaggcaggctgcactcagttctcactactggcctggatcccacacctgccaagtgtgagttagacatggagcagcacacggtgtgtgggtgagcaagcacccgctccaatcactgcacacagccaggcatgctggctgctgcagtggggcaagtagctccaggtgccagcacaggcgccagtacaggcaccagctctgtgcgaggctgcagctggaccagatgtactgcatgtggcttccactgtgggcacctgca

SEQ ID NO: 33588 - DNA, 1711 bp, Homo sapiens
ttatttgcttagtgttctcttgagttgtctaatattgagagattcttccttagactgtgttccgtgcccagtctaacttgtaagacacagaagacagacatgagttgtaggctacattaataaatgtaggcaagacatttcttgccatatctcaccattattttgtagttctggctggtgaggtagaagggagtatatcaaatacctgttctgttcagttcttactgattatttgttaatcagagaaaaacttgtattaagtgcttaccagttctatattaggagtgactgtgtttaaacactgtagttaaaagctgaagcctgcaaatgcaggaaataaaacgtttaaaatatacttaaaatactgattgaatagatgtctggtttgggtaaaagaatataaattatctgctactttaaagaactcagtatctttaaataacttaaaactgccttttcaatttccagcatgtatagaaaatatgattcgactagaataaagactgaagaagaagccttttcaagtaaaaggtgcttggaatggttctatgaatatgcaggtaggtattcatttgtatcatctaagactgatccttatgacaataaggagtaccttagagatgattaaagaatttaaaaatgtgtacatttcaaatttgggtgtgtgtgtgtgtgtgtccctgttagagggagagagggacatagctgtaacaaatcaccagatagcctattttatagccagcagctaagccaaataattcagaacactagaagggaactgaaaagatgaaatgacttgggagaaatactttggattgctgggaaacctatttggaatgctgataatgggtgattatttggtcaaagcacctgtgttaaaataagctttgctgctttgaacccttacttagtgcagtgaaatttctttatattaagtgtttctatttggaaagatcatttggcagaaaatgtttgttttgtcacttaaaatgttttaaatttagtctttctttttgcaatttactataattggttgggtaatataatgttgcgacctggggcttatttgttattgtggctttgtatggtgtaaaaaagaaaaagaaaaaattttcaaacaagctcaagctgaaggctcttttatctttcttctttctcaccttatttcaggctcttttataacttaccaactggctattctagcaacctttaaaccaattttcctgtcatctcctctccagacaacctgccatgtgccactgttgtctaatttttttaaaactaagctgagcagatcatacatacattcctgaacaacctcaaccactcccctctaatcccaaccctatctcctggccaaaagaatccctgctatctgcaggataaaagagagtgaactccccgtgcctttgcctgaaatgattttctccgtttttccatctgacatgctcttacatcttttaaacccttaattaccttagtagccttttctgtacttccacaggatagtgtttataacttgttgtaacttgttttggttcccttttattggtatcaaaatgaggaattccccctgtagcctgatctggctatttttctcctattcccatgcaaccctttttgtgataagagccttgcccctgttggccacagagattggtctaggtggctggcacataacccaggccaggccagtcagacaaatcttcac

SEQ ID NO: 33589 - DNA, 1070 bp, Homo sapiens
aaaagggggccttactgtctttatcaagaacagagtgataacttgatttttttctatgtaaaagaaacatttatgttttttcttatttaattttatagagactattatgtggttctttgctatgtttccaaaaattattttatgtattgaaattattacccaagtaagagtagaacattaagctgttttaaagagcaggaattgaattcagccttaactttagacaaatggtatataccatattccaacgattgaaggacatggtgataagttgatttaaatgattgtacaaagtagagtcctttaaagatactgaaattcgagaatacttttcaacttagacttgatttttttttccaaaaggagttaatggcctttaagtcttacttgttgacagtataatactactacagtggtaatagtatggtgtgcatggtcagatttaatttacataagactgtatttcacaggaactgatgatgttgtaggccctgaaggcatggagaaattttgtgaagacattggtgttgaaccagaaaacgtgagtcaaacttactgagttgggtgaatcagttggttgtttttcatacttaaatctttgttctttagcaaataaataaataattaaaaagtagtggtatgttagtttttatgaagcagtctaagaaataagttctaattctagtttgacttataagcagattctccattcttgtaagtgatatggtgtaactacagttattttttctctcatttaatttcttgtatgtaaaaggtacagtaagccagatgcttacaaaatggtgtggccacatgtgcctacaatgacggatcaactggaggccacattgtacgctgtgtaccttcgtgcccctcagtagttgttttagcctaatgtagagtcaatctaggacttataattattcatcatgattttgagtagattgtaatcatcaagaatttttcatagatcgtttacttccaattgaatttagctcagaagtgattgcttttttttttttgagatggagtctcgcactgtcgccaggctggagtgcaatggtatgatg

SEQ ID NO: 33590 - DNA, 1029 bp, Homo sapiens
tgttgggattacaggcgtaagccaccgtgcctgaccatcattgctgagtagagcagccgatggctgctttttaaagtgtccttgtgatgatgaaggcatgggcatatcaggattttatttcaagccttcagacgaggcaccatcaacattttcaggtccatttttatttgtcttaagaaggtgtgatacccagtttgtatagtactgagttctttacgaaagaatgtccctctacaaaagaatattacctgataccagaccttgcccatgtgttttgagggccctatctcctgggaagtgagaagcaatttcctggaagaggtctgcgtctgcgttctgagtccagggtactccttcaggctgtttgttgggaaccttgcttgccactttgtatgatgcaggtggtggcaggtgggttctcagggtgattgccacttgatccttgcaattcagggtttagtgacaagcctgatccactgtaaaggcatggaggaaccgcttgctttttgtggtatgaaactctgaagttgatgtcctcatcagtgaggtggagataattattcagaataacttttaaggttctttgtagtgtcctcatcagtgaggtggagataattattcagaataacttttaaggttctttgtagttcaaaaatagtccaacttcaagtttaagaacctctgcctaccctcccacccccaccttccaacctttctagattagtcatttgtttggcaaatgtttgaatgacagtgatgtgccaagtgtagtattccaggccctagggaatcaaaaaccatgagtaagataaagtccattaagaggaggggcttataaacaatattcagacaaaagatccagaagtcataaggtcacttgtctttatgccagtaaagtaactaaataagcattgtatttgtgaagtatgtgcacctagtacacaagaaaacccagagagtaatcatttatgtgctctaaaggcagaaagtagtcgatctttaaactattttgtcttctattttggattt

SEQ ID NO: 33591 - DNA, 1050 bp, Homo sapiens
cagggctgacgcgccactatgtagcgggtttcgggcgggccacgcgtgcgggacaggaacccaaccccagccgaccttgagctccaggagttcgtctcttacgtctgcggaagtgcagctgcctcagttcttagcgcaggtatgttcctagccttgagcggggtgggggaaggaatgagtcagcctggagcacgtggccagtgggaccggagggttccccggcgtctgtttgtcgccaaggtccgaatccggctccccttaactggaaggaaacatccatgtaggggctcaccaaacaaaacagctgtgtttctagtgtggtttcagacttagagaagcagagatccacgaggtattgagagcaacgcggaaaatagtagtgaaccctgtaaaaatcaaagaaaaaaaatcacaaagcaccctttcctgtgcccttttaaggttgacccagtgctttaagaggctaacacagaagggtaaagtaagtctccataaaacccagagaagagactggaaagctcctctttggatcctgtctggagtcacaactgaaccagaaaaagtttcgttacaacttgagcgcctttgtgattttctttacagtttatagaacaagcaatacatttcagttttctttggttaaaacgtcattttaaaacttttctttctataggttgacaactacaggcacaagccattgaagctggaatgtcctgttgctggtatttcaattgacttaagccaactatcccttcagttacaataggaaagtgcctctaataaggccaaatatgcgtactaacttgtagcaaccacgtgtccgtgcagtgccacaggagctagagcagtgacaatgctggtggcaacagggcagtgtagcaggtgcttcatgttcaccttttcaaccttttcatttaattgtcacaactcggaggtggattctgttagggacaggctgccccaggaccactccgcccccgctaactcaatgcagctgacccttaccctgaatactctgcagctgcattcctgaaccgttatctaggcgct

SEQ ID NO: 33592 - DNA, 1057 bp, Homo sapiens
gaaatcctttacattttctagatgtatcaaaatttcttctgtgtgaaaccatttttcacctattctgtgtaagaataccttatctatatcaactgacatgaattactaatgcttttttattaaagtgtttgagcaaaaccatcatttgactggaccatgatgtacttgaggctattcgtgggctcacgaatattcaagtaattcaagctttcctttattgaatgctgtagagctgaaacatagcatatgaaggtcaaaactcagtcacttgaaaagattgtatatattgtttacttgttaataccctttgaaacttctcaaactatagaatctcattctcatgatgaaaggatcagactgaaccctatttgccctttattctaaatcctagagatgaacagtttatatataaaaatccatttaaaagtgaaatttagattatttaaagaacaaagtatcgtgagattctgaacataatcaggtcctcacgttttggtgggtgggaagagtgaaagagaacagtgtgtgtgtgtgtgtgtgtgtgtgtgtatatatatatatatatattttttttttttttttttttttttttttttgaggtggagtcttgctctgtctcccaggctagagtgcagtggcatgatctcgattcactgcaagctccgcctcccaggttcacgccattgtcctgcctcagcctctagagtagctgggactacaggcgcccaccaccacgcctggctaattttttgtatttttagtagtgacagggtttcaccgtgttagccaggatggtctcaatctcctgacctcgtgatccgcccgccttggcctcccaaagtgctgggattacaggtgtgagccaccacaccctgcgagaacagtatatttttatttaatgcttaaactgcccacaattcttcattgctttttctttcttaatcgaatccctgtttccaacatctgagctccatcttccactcccaaaagaagtttcattattacaagttaaatatttctgcccaagtatggccagtctcagactacttttgagatg

SEQ ID NO: 33593 - DNA, 1025 bp, Homo sapiens
tgtaccacctccaggtaaaacttttttcatgttttctccatcattgttaataaacatgaaatttcaagcttatagttacaggagagacggtgttgatgcggttagaatatggaataggctatggggatttcaaggtcctattttcagctctgcctttgcttcattccagttttgattaagatatttagttttcttatacctgtcttacccgtttctgtagaaatagagattctgagaaaattcttacctattcaatttgtgaagaaaacagtataggatataaaataaaagttttcttaaaaatgtctttacagaccaatgaattttttatgtaatatagtgactataagagaagagaaagataatttattttgtctttatcattatttccgattttttaattttagtcctgctggcttagtatcgtgagaaaatgtgttctaaaccccacatagcaactagacagacagctggtcaggtggctgttcttagagtggtgattgtttattgttgtaatagtatgatcactaggagtttatatgtggcccagtgttttatttatttatttatttatttatttttacatttttgtcagttatttctttttatagtgtgatatcacacctggtagcaagtgtgtcttcctgagttcagtgttaaaagccaaggtgtgtaaagagaatgagaggtgataatgcttgcaagggtgggtctaaattcaaaatgacttcaataaacagaaagagtgaagtttaggtagcatagtacagtatacatacttagatgtggaatacagacattgattatgtgtgaatgtgtctgaaaaagactcatcagggaaagtcaaaggaatcatttgtgtctttttagtttaaaaaacaatgtggttgtgaggctgtatgaaataggattgtggactttaggactaatgtggtaattgccaaattttgtacttttaagatgtttaatagaggaattatagatcctaacactggatacagtgaagaacatggtaaacatgaaaa

SEQ ID NO: 33594 - DNA, 1089 bp, Homo sapiens
gtagttcccaaatcatttattgaatagtctgtcgttcctgagggatgtacgattgtcgtctctgtcatctattacatatctatgtgtatgaatctggttttgggctttctagatattcagttggttagctgtccctgtgctaataaattccataatatctttaattatgagttttatagtaaatctgatatctagtgcatcaaaatcaattgttgcttttacatatgtattttagactgaacttagcaagttccatgaaaaacttgagattttgattaataacatttgtatagtacttactacataatgctctttgaagcaatttatgttaatttatgtaatcctgacagttttaaagtaggtgtattgttactatctccattttatagatgaggaaatcaaaatattaatttccacatgtcacacagtaagtggcagagtcaggatttgaacctatgttgcctggcttcagagtccttgcttttatttactataccatattgcaattgcactgatgctctagatcagtctgtgtggaattcatacctttacagcattgagtttatcagtgatcaaggactttctctccatttgcagaggtgttgttttcaataaactgctatagttatctccatacacttcttgaatgtctttggttggatttagtccttaggtacctaatgtttttgttgctgttataagtgttatatacatttgaacagtgtgttctgtttatatttgcttgtattcagaaatagttgtttggttggttatttttatagccatttacctttctgaactctcactataatttgtaaagtctatttgggaaatactcttgcagataatgacagttttgctcctttttttttcagatccttgtttgtccctttttttgttttgtttatttgttctggcaagaacctccattataatattatataacagcaaattaaattataacaacattataatgtcgaagtactcaaagtggagttcttgtatgattccttttttctttataaaggaaatgcttctagatttttactgttaggtttttgatagaaccatcaggttaaggaaattctg

SEQ ID NO: 33595 - DNA, 1046 bp, Homo sapiens
actcctagcctcaagttatctgcccgccttggcttcccaaagcgttgggattacaggcgtaagccatcgcgcctggcctcctctcaacactttgaagatgtcccagtgtattctggtttccattttttatattgggaagtttgtggtcaacctaattctgattcctgttcaccttgtataatgaagggtctttatatgttaggtttttaagatttgtttctggatcttcccgatactgtgggtattcattcaccatgtgatatttctcttttctatttataaaatgaatttctattataatctcatgacacatttttggtgggcattttgtttttttaaagtaccataacgtttgtttttaatcgtgttttttctttagttgcctttccccatcttcctggttctgctccttcgtggcctagtcttgtggacaccagcaagcagtgggactattatgccagaagagagaaagaccgagatagagagagagacagagacagagagcgagaccgtgatcgggacagagaaagagaacgcaccagagagagagagagggagcgtgatcacagtcctacaccaagtgttttcaacaggtttgttgggtgtgcaggagtttatactatgtattttataagcacttacaaatttattttcgttatgaggaagtgaatttcagttcacttggaaaagagatgctcagggagtacataggaaagccatcttaaaatgataaaggattagaggcttcccattaccttgaacagtagtccttaaatttgtttgtttacttatctcttaaaagaattttctaccccttcatttatttttatcttgccatctaagtttttcatcttaagcttaaattagttgaccatatagatatttccagtgtattataaatattaatatttaaaaagaaaattatcaccacttctattattattctatttttagagacggtcttgctttgtcatccaggctggctggagttcagtggcatgatcatagctcactgcactcttacattggaagaagatgccatctaa

SEQ ID NO: 33596 - DNA, 1099 bp, Homo sapiens
gtctgaactgaagataatgactcacctggggccacatttgaacattgtaaacttgctgggagcctgcaccaagtcaggtgggctcactgacctggagtgaggattttcactggacacatgtggttgtgaaaactgttcaatcaggcttaaatcctccactctccatccccacacatggcagggaatagaagtcccttgaatggagctgactggtcccttgaattgatggaagctcattggtttttgagcaaaatctgttgccagtccagtcatagccattcatggctctttattaaaaaaaaaaaaaaaaaaaaaaaaaaaaaacttttttggtatcttatttttttctgtgccatatggtctgcaggacaattcatggcttttctgttcttcattttcatacccatctcctaacggcttttgtccccataggccccatttacatcatcacagagtattgcttctatggagatttggtcaactatttgcataagaatagggatagcttcctgagccaccacccagagaagccaaagaaagagctggatatctttggattgaaccctgctgatgaaagcacacggaggtgggtgcaaagagagatgttgctgtctatcattatcttacaggcatcacaaatggaaagacccatgtcctgatagatatcatgtctgcagattcagtgcccaaggtagcaagacttagagtcaaaccaccctgtccagtctttccatggtcatgcagagagatgcatgatgtctaaaggtgttttggactggggtgtcacatgggaaggccttgctgataggtttgaatgagagtgagttagaatgactctgggagctcttctgctatttacatgtgatccacttagacctataaaatgcagctctggccagggatgcttgagttctggaaccttgcaagaactgtctgtggatctccaagctcgaggtccttgctgaacctggacctataaatgacgtcaatgatagtgatccctactgcagaaatctacaagtggctataaagaactctgtaggtaagaaattctgtaagatcagaaagtacaatgaattcacttcataataaattactt

SEQ ID NO: 33597 - DNA, 1063 bp, Homo sapiens
tgggttctttgtagagttgtccatagaaaaaaatgtgacctcttataaacaaaagaaaaataaatatggtagttggagttctttgctttatttcctatgacaagttcagtgatttgtctgtgattttaatagccttttcaagagtaagcatgctgggcaggggtgtatcttgtagttgatgtaaaaactgatccactggcagcttaagggacatatccaagtgacgggaggagaaatagagttctattttctagttctgggtgcccctggactggggctgtctttgaaacaggcctgagaggccttatccatggtattgtgaatgaataatggatacttttattctagattggagatcttaggtacctcctgagttcagttcctcactacagtatttggataagatgatctgttctgtcttccttacgtaattgttagggagccaggatggtacaaattctaacatgctccatcaggagcgaataaagctgactctaaagtttgactgtgcctctccgctttatcagttgtcctttccgaagtaggtagctgcaaagagatataccctggtaagtcaccacttcgcctcagggcatgcttctgtgattgctgagctaatccatgtgctgttctttacattcaggaaggtattttgcaatttccaggtggcaatgaagtatcatgacaattgaataaatgaggaaaactgttgaattggttaaatcactctaacagggctcacaaacattcttcatagggaaagtcatcttctgtatcttggaactatccttaattataacaaatgtaagatgtttgaatacttaagtaatctctgttacagcaatgaaggaaggtggggcatcattgtaggagctagactcaagtgacctacaaagagtagataaaacagtaactagctatggcctgggaccatccatagttcaaccatcatgaggtcatttatttgcagaataaattagtaaggttgggagatgcataatttatcttggaaaacttttttttcaaaattgatcaaggataaaacacaaacctatttcaatga

SEQ ID NO: 33598 - DNA, 1035 bp, Homo sapiens
taataccattttttaaggaaacaatataaccacaaagcacagtttgaacaaaatctcctcttttagctgatgaacttattctgtagattctgtggaacaagcctatcagcttcagaatggcattgtactcaatggatttgatgctgtttgacaaagttactgattcactgcatggctcccacaggagtgggaaaacactgccatcttagtttggattcttatgtagcaggaaataaagtataggtttagcctccttcgcaggcatgtcctggacaccgggccagtatctatatatgtgtatgtacgtttgtatgtgtgtagacaaatatttggaggggtatttttgccctgagtccaagagggtcctttagtacctgaaaagtaacttggctttcattattagtactgctcttgtttcttttcacatagctgtctagagtagcttaccagaagcttccatagtggtgcagaggaagtggaaggcatcagtccctatgtatttgcagttcacctgcacttaaggcactctgttatttagactcatcttactgtacctgttccttagaccttccataatgctactgtctcactgaaacatttaaattttaccctttagactgtagcctggatattattcttgtagtttacctctttaaaaacaaaacaaaacaaaacaaaaaactccccttcctcactgcccaatataaaaggcaaatgtgtacatggcagagtttgtgtgttgtcttgaaagattcaggtatgttgcctttatggtttcccccttctacatttcttagactacatttagagaactgtggccgttatctggaagtaaccatttgcactggagttctatgctctcgcacctttccaaagttaacagattttggggttgtgttgtcacccaagagattgttgtttgccatactttgtctgaaaaattcctttgtgtttctattgacttcaatgatagtaagaaaagtggttgttagttatagatgtctaggtacttcaggggcacttcattgagagttt

SEQ ID NO: 33599 - DNA, 1062 bp, Homo sapiens
ttgaaagattggggaatgaatgtatgttcatagaattaatttacataaaaggtttaaggtattactgagtggttttttttttttttggcttttgtttttgttttcaatcggccagtgaattactagacccatataatttctattgtattattttcactaacagcacttttaagactcatgaaagaaatcgcatgaaacagaatgttttggcttaatggattttgtgaatcaaataatgtttttttctctttgtagttactcctagaaagcttggagccaaatgagtgatttaccccttgcaaatggagaccatttgatgatactcattttgtattaatcttgtgcctggctccttgtttcctccctcatttcatttccctttatttgttttaaagatttatgttattttatgtaactgtatgtatcattcaagatacagataccaaacctgcgacctttctatctcaagcagagagggatttagtgtagaattaggtgcttaatcaggggctggaatggtgggctctaggctggttctccaagaatatcttcttgaaaaacacagctaaactaaccataagggctgctgctgcctctggcatagccaggatatggaaattgggaggccaccactggaatcattgatctcaaaagctcacctcgtagctgtatcccaaaggtgaggaaactactgttgctaagattgctgcctctgccttctcatgcccataaaactaggagctagacaacgtaatacagaaaaacaccatttcctatgcccgtctttcccaacagcagcagctgaagcaggagggaaacgatcgtctccacttcacttcctcctgctacacctcagataagtactgctgacgggtggaatcgaattcacagcaagaatcctagcttcaagagagtccaggaaatatttctcatcaagtactctgcagcactgcaaccaaactagaagaaggctgcaatgaacgctaagagccaatccaactgtaagtatttttgtgagtcgccataaatcctttccggtctaaggtagggtgggcagggata

SEQ ID NO: 33600 - DNA, 1045 bp, Homo sapiens
caggtagaccggtggattttcatcagtcctttactatcattaacggattcctgcttcgaggtggccatgtggaattgcatgatccttggttctcttacttgaatcagctttttagggttcccccttggctccagagcctcaggctcttgcccattatcagtggatacatttgtttcttcagtcaagcctccgactaggctaactgcttcctgctgcgcagagggaagtccctgtttgcttttctgaagccagtggtttgctccgcaggtcctcagaaggtctgtgtttttcccttcttcctagcagccggagaagaaagtggaagatgatgctttgagtgtttccactcctgaaactcagtctctcgactgttctttctcatccagacctggatggcattgagttgttcatcttgcagtttactgtccctctcttttgagaaagccccctggtagcctttccactggtgatttctttcattgaccagagctagtcaagtcagcattctgctttcaggctctccctagcaggatggtagctcagagagagatttccttagaaagtgtttttcttcactgtaaaacataagaaagaagacttaaaactggacttagcaagggaaacacaaaggaatcttaccattcgaaagtagatcacagtaggggagctgaactttgtgcttgaactgtttagagaagaagcaagagaatgtgtctgtgtggaattctcttgccaggggaactgaagctgcccatagctgaggaacgtatctcctttgtccagagagacagggcttttccctctgtattgggaaattacatcaggaaattacatcgggatattgaggaacaggttcccctctttgtacttgggaaattatattaggatattgaggaacggaataagtggataattgtgtttctgctgactaaatgatttgtttaattccctgagcctgtgaaattgtttagtgttggctaacaattctcattcctatagcctacataacagggaaaaatctattgatgcaagcacggtggttcca

SEQ ID NO: 33601 - DNA, 1029 bp, Homo sapiens
agccaagagtggtggcacatgcctgtagtcccagatacttgggagtgggctgagatgggagaatcgcttgagcccaggaggtcaagggtacagtgagccgaggtcatgccactgcactccagcctggcctgggcaacagagcaagaccctgtctcaaaataataataatatataattttacaccaaaagtttcaggaaaaaacgagtttgttggagttagtttatactttcacatatcaccacaaagatctccagttaaataactatcaatatccatttccattcatctccccctcaaatcatagcctaacagaacactttgaaagctcttttatttaatatttttttacatcctttgaagggagtgcttcaaaaatgaaagcatcagaagataaaatatttttatatttatgcatagcaagccttcgtgaacggaagtgacacactctggattgaataatactgtagcctcattcatatgtagttattcaaattggattaatgtctgtgtgagtttatttgaactagcagaaagtatctgaagatattcaggaataaagtttatacttaaaatagcttatgttaaagaaaatacctgtgattaattcagagggaaataaatgcatggtataaaagaaaaccaaaaacttaaaaaataatactatagcctgagcaacacattaaaactgcacacttgtgcagcgtaagattctctggcttattggctgaggtgttaagtttattccttttatgaagatgtcctattacagtcagctaagcactaaagctttgcatttatatgtactttgctatgggggaaagaaccttatgattaataagacacatatcaaatgcatagtcaatcattcccacccccatccctggagctgtaacccaaaactgttaaactaagattcctttgttttttttgtttttttgagatggagtctcactctgtcgcccagactggagtgcagtggtgggatcctggctcactgcaacctccgccttctgggttccagcgattct

SEQ ID NO: 33602 - DNA, 1049 bp, Homo sapiens
tgaccctttcctttcctttcctttcctctcctttctcctttttcctttcctctcctttctcctttttcctttccattcctttcatttctcctttcctttcctttttcctttcctttctcccttcctttcctttttcctttttctttgttgagacagggtctcgctctgtcgcccaggctggagtgcagtggccccgtcttggctcactgcaacctctaattgatcctcccacctcagcctcctgagtggctgggactgcatgcgtgtgctgacacgcccggctaatttttgtttattttttttttttttgagagaggaggtctcactatgttgccgagtctagtctcaaactcctgggctcaagcgcttctccggccttggcctcccaagtgctggtgagctctcacaccggtgcattgttttcgtgtttcatgttttcgttacatgttactttcttaggcttttccaattttctgttgtttttctgtgtaagaccgtaggatagaactttctgagagactgatcttggtttcactaagcaagaacatttgtaagaatcagtgctgtcccagatgtagtaatcgctattgagaaataatgaagttccccttactggaagtactcaggaagaagttgaataactaactgcctatgaggagattctgatatgggagggaatctgggagataaagttactgggaagtgaagattctgggagccgatttaatcctcacaacagcacgttaaacaggtagaggaggtttgtaaggaatagtggtttaatatcacagagctagaagctagtttcagcagaaccagaattagaatctggacttctgtgccttactaagttttattagcattcattgtgtcttactcttttgacttatttaattcactaatggattttaatggtttattggattgtatgctggtgcagttctttgatcttgagcctagctttctctttctccttttttgggaactttattgtgtatgttgtggcatgtttacacacacatcttgctgccttgggttcttgcaagttg

SEQ ID NO: 33603 - DNA, 1049 bp, Homo sapiens
catagctgggactacaggcgcccgccaccatgcccgcctaattttttgtatttttagtagagacgaggttttaccgtgttagccaggaggtctccatctcctgacctggtgatccgcctgcctcggcctcccaaagtgctgggattacaggagtgagccaccacgcctggccttaattatatttttatgtaactttttgatactactcaagtattttttcctctacggtactcactatgctgaaagatttttctttcacatgttttctaaactatgtaatataagtgtcattggctatttttgtccacctgatggaggtaagaaatgatcaaagtacagtttaacagcagtattagcaagagttgagccttgctgaatatgtaagtttcaacggatttgctttgcaactacatgcagtagatgttttaagagggtaggtaggatatttaaatttaacctttttgtgccactgtgtgagagtgggcttctgaaaatggaggggggaagcatctctccttggttagtaggcattcaagtggaagatatgttataaaaacctagttgtatcttataggatgctaaaagcaaggtgactgaacttctaacagggcattctacattgagtatgtgcttttctctataattaggctaaaaaaaggttggtaagtaatatgaacttaaaatcaagattaacccccaatttacaaacccatgataaaaagtgttgttgattacttggatcctatcttttctgcagtttatgtttctagtgacttactcaatagttttttcttactctttccctggacagaatatgtaatataagaaacataagtcctttgagttgagggagatcagatagatttaataaaagtcatttagactttattgcatattctggaagtccaaagaagaatgactctggttgcatagcacttctaataaagccacaaaatcattacctgactcagtgcctgttcttgttatcatatttttactttatgttttggtatttcatttatttattacgtttcagctgtgagagtacc

SEQ ID NO: 33604 - DNA, 1124 bp, Homo sapiens
ggactacaggtgtgcgccaccacgcctggctattttttttttttgtacttttagtagagatggggtttcatcatgtttgccaggcagctcttgaattcctgacctcagatctgtccacctcggcctcccaaagtgctgggatgacaggcgtgagccaccatgcccagccatattagtttcttcagttttataaaccaaacttctaactaggggatttgctgctttttcactttactttagtatgttgttatctggcttcagtccttgccttttccttgaaattctttttttaattttaaagatagggtcttgctctgtcgccctggctggagttcagtggcacaatcatagcttactgcagcctggaactagtgggctcaagtgatcctcccacctcagcctcccaagtagctgggactacaggtgcatgccaccacacctggctaattttatttattttattttttttttttgtggagatgaggtctcactatgttgcccaggctggcctcgaactcttggcctcaagcagtcctcctgcatcggcctcccaaagtgctgggattataggcatgagccaccacaaattccattttttgaaagaatcttgtaagttagcaaattgctaaatccagggatctttttcagttctcatttgacactgttaattctctactgtttaagaatccatctcaggtgtatgaacttggcagaataatgaagcccgtttgacctcagttttcctgtattaaaacttaaaacagctcctaagtttttttgagtatcaaatgcaacaatgtgtctgaaaatatctcgcatctagttagtagcgcaccccaacctgacggtctgtgatgctttagttgctgcctggctcgaaatatctaagatagttttttttcctattttttttcctccctccaccttctttgaataaagacattctctaaggcgcattctttgaactttatctctttgccttatctgttggaaatctcatctacttgcagagctttagctgataaatttgggctgccagcaaccagatagagtacgtcctcacttaatgttattaatagattcttggaaatggtcactttaagtgaaatgacatcaatgatgtc

SEQ ID NO: 33605 - DNA, 2007 bp, Homo sapiens
aaacattttgtgtttgagcttagagctaagtgatcataaatggtgtatatttattcctaaaatttttctgggatttcagatcctgaaattttatacaaacctttaaaaagcattttcaggaggaaaatgtgtcagagccaagttgaaatttgaaatgcccttttttttttttttaatataaggattcttaatattggaagagaaaggaagttgttgttttgagaagggggcttgctccatcacccaggctggagtgcaatggtgccattacagctcactgcaggaagctcgtttttaaaggaccgtcaacgtaggtggaaccaaaataatggagagaaagcaagaagcccttaaaatgatacttgcttaattaattaaactcaattcattgagagccagctgtcaaggcaacaaatactttccattttgttaaatttctccagtatttagctcagaggtctagtcttaatggtaatgcctaaatttttctgatctttactgtggaattttataatctttatgttatgtgttaaggaatgacatgcacactaagaatttatgattttattcttacctgtgactagggcctttgtaataaatctgtttttacgctgtccaaaattactatgttcttgggtttctttttctttatctcttgggtttctagagattcataagcttaaaaaattaaaaataagttattaggattggaagagacctttggaagtggtttatctagcccagggcgtctcagtctgggaactgttgacattttggatatataattcttggttgtggaagggctgtcctgtgcattgtaggatgtttagcagcgtttctggcctctacccactagatgccagtagttcccctttgattgtaactaaaaatgtccgcaagcattgtcagatgtcccctgggagacaaaatcgccctggttgagaaccgcttgtctagcccatttcctgggagtggtggttcccttctctggaactcagacgttgagaagagaagggtatttaccacctcctctagcagtctgttccaactttgggtgcgtctttggagacagaaatctctcctctctgttaagctaaaacctgccatctctaactttttagttctgcctcttaggaccgtatggattggatagattcacttaaaaactttcccaattattggaacatgataccccgtccttcctggtccctcacgggattgttttagagccaagtcagcaaacttcttgtagttgccatgtatttgcaggctaccaatctctgatgcataatcttcctttccttccctccctcctccttgcctcccaccagccttccctccttttctctttcttcttatttcttgtaacttcttaaaaatgtaaaaaacctttttttgctcttataggctgggttttggttcagtaacttgccatccctggttttagagtctgacatctgctaatcttcagagggcagtgcagtgctttagaactgtatatagaactttggggaaggtctgagcagcatagaataacgttggacttgtcattaactccttcatgcgaagagcttactgcttttttgaagctttgtcacatttacagcgtaatgacagccaagacactggtttgtctttttcattaggccactttaccttctttttttttgagacagagtttcactcattgcccattgtgcaatgggcgcagtctcagctcactgcaacctccgcctcccaggttgaagcaattctcccgtctcagcctcccaagtaactgggattataggcttccgccaccatgccactttaccttctaagatatttttagacttcagcgtaggacgatctgtgttaacagctgtattaaacttgtcttagctggaaccaactctctataccctgctgaggtttgtgggtcttactctgtccttcagagtgttaatgaaatttttcttagcttcccgtcgttcaaatgttttttaaacatacctgggtctttcatgc

SEQ ID NO: 33606 - DNA, 1027 bp, Homo sapiens
ctcagcccctcaagtaggctgggaccaaggcgtgtgtcaccccgtcaggctaatttttgtattttttttgtagagacaggatttcgccatgttgaccagtggtctcaagctcctgggctcaagtaatccgcccgactcggtctcccaaagtgctgggattacaggcatgagccaccgtgcctggccagagtaattgtatttattatatgtatggtcgtgtcctctgttccttacatagttgtttttgtttgtttatgagacagggtgtcactatgtttcccaggctggttttgaacttctaggctcaagcaatccttccaccgtggcctcccagagtgctgggattatgccactttgcccagccaaatttttaagttttaattactgaatgagtattactgatatacttgtgtttcaccattaggatttgagttcttgatatagttccaagcatcattttttatataacttacacagatgtctttccttatcagtgggaaagagtggaactgaatgtttgagcctgttgtaacattattttaatataataagaaatttttagatttttttcataaaacgtacttattttaaatagttacaagggagcagagtttaaatcttgctatgtgagacttttgtcatgattcttcactagaagtttgtgatttaaagatttgtgatgaagaaattccactatgcaagtggcatggcttcccagttataaaatctcagctcttgagagggcctcagagctaacttctaccccaggtactgtgccttgcacaacataaggcaagccagcctctgactgaacatgcctggaaaggagttcaatatcttacttaacatctctcaggaagatgtgccatcttcaactggaccattggcttctgagtaagctgtgttaggcctgggctagacctaatggtttattattggtggagagaaagatctggaaatacttgaggttattacatactagattagcttctaatgtgaaccatttttcttttaacagtgataaatt

SEQ ID NO: 33607 - DNA, 1073 bp, Homo sapiens
gtgcctgccaccacacccggctaattttttgtatttttagtagagacagcatttcaccatgtttcagtctcctgacctcgtgatccaccctcctcggcctcccaaagtgctggcattacaggcgtgagccactgcacccagcctatttttctttttttaataagagatggagtcttgctttgtcacccaggatggaatttgtagcatagtagtgtgatcataactcactgtagcttcaaactcaggctcaagtgatcctctcacctcagcctcctgaatagctggaactacatgcatgaaccactgcaccattattttatttttaagagacgggatctcgctgtactgctcaggctagccttgaactcctggcctcaagtgatccttctgccttagcctcctgagtggctggctccactctgcttggctctgatatttttccataaagcctatcattcatttatcatggaggtatgttaattttgccttcttaatttctctcaaattcacctgctctttgcctacagtcatctgccccgatctggggcaacgcagtttcttcccagggctgttgccatagcatcgcagtggatcacccttccttcagtcttgttcccctctggttctttctctccactagactttaaaaaatttttgagatagggtcttgctctgttgcccaggatggagaacaatcatagctcactgcagccacgacctcctgggctcaaatgatcctcccacctcagcctcccgagtagctgggaccacttgtgcttgctaggatgcctggctaatttttaatttttttgtagagacaaggtctcactgtgttgcctaggctagtctcaaactgccaggctcaagcaatcctcttgcttcagcctcccaaagtgttgggattacaggcatgagccactgcacctggcctagcggatttctgaagcattaatctgttctgttactttccagctaaaaaccaacaagtgtctgaggacacagtttaaactccaagatgatagggtcctccctcacctggactcccacctaccctcatgacctccttttgtgaa

SEQ ID NO: 33608 - DNA, 1019 bp, Homo sapiens
ctgtgaagccacagttaggtctagagatggaagaatcgtctctttgctagtcagaagacctgaacattttcttttataactggattttaagatgagttatagttctactgttgcttgccagcactgtctggatttaatacaatcctgtcatttctcaaaacagtgctggagaaaacctgattcttagtgttcacagtcaagcatgttaagtattgttccttgttatgtaaaaggggttgaagtgattctaatttgttttcaaggttagtttaatagattggaagaataattggccgcctcatcggctcccttttcattttgtacagtatcaaggtataggaattttactgtatttgactttttttctctctcttccagtgacaatcataggaggcatcgtttttttggcgtttgcattttctgcactatttataagccctgattctggtttttaacaagctgtttgttcatctatatttagtttaaaataggtagtattatctttctgtacatagtgtacattacaactaaaagtgatggaaaaatactgtattttgtagcactgattttgtgagtttgacccattattatgtctgagatataatcattgattctatttgtaacaaggagttttaaaagaaacctgacttctaagtgtgggtttttcttctctccaacataattatgttaatatggtcctcatttttcttttggtgcagaaccgttgtgcagtggggtctaccatgcaattttctttcagcactgacccctttttaaggaatacaaattttctccttcatcacttaggtgttttaagatgtttaccttaaagtttttcttggggaaagaatgaattaatttctatttcttaaaacatttccctgagccagtaaacagtagtttaatcattggtcttttcaaaactaggtgtttaaaaaaagagacatatatgatattgctgttatatcaataacatggcacaacaagaactgtctgccaggtcattcttcctctttttt

SEQ ID NO: 33609 - DNA, 1037 bp, Homo sapiens
ccaaatcagagccagttccctaagaagaatatggtgcaaaacaaaacaaaccacacattaaatacatgacaccgaaatcactttgatgagaaaacagaacacacaggtattttaaaatataaataaatacatttagccatttttattcaagaaccccagagaactgctttaaaagcaattgcttctttgaacccctttctaaattctttcataaatacttactagtttgattgtcacttaatgcagcacctcagtgtttgctggtggtggtgatggaatttcacttagttgtctctccataaactatatcctattccactaaataatgtttccctgaggaaacccaggcagcttacaaaatactgttataaacactcacaacaaaacctgcagagtattttatttaagaaaaacaaggaatgtagtgttatgacatagggggaaaaaactatgcaaaacagtcacatggaaagaaagtattttaatttttaaaatccaagtttgcttaatttcttgtgaactgttcaacactgttttaaatatcctgaataactgtgccaacaaaattcatccccagtgtttccacaggagacattaaaattaaagaccaaattatactatttttttcctttaaccaaagtattctttttctcagtcctttttgtgcaaaaatattacaagagcaattcaaatggaaatgctgaaatgacatgccaacatttcagggcacatttaaaacactcagaataattcttgaaattattatattctaaaatgttactagcaatcacttttagattagttctgtacatctactcacacggatgcaattttcctagacctctgaaaaataaacaggctcattggtctcttttggtgtccacacaataggcaagataggtttacaatagtgtttaaatcaaactaggcatctacaatctcttgactccaccacattcaaaacaaaaatcaaagttcatttggctatcttgaaatcactcccataaaccaactacggttcactggacctaaacatt

SEQ ID NO: 33610 - DNA, 1072 bp, Homo sapiens
tcgggaggttggggcaggagaatcgcttcaacccaggaggcggaggttgcagtaatctaaggtcacgccattgcactccagcctgggcaacaggagcaaaactccgtctcaaaaaaaaaaaaagaaaaaaaaaagctgaaaatatttgatactaacatgatttgcacaaaatattttaataatcactctcaatactatactttctaaatactattaaattttgaaatgatattttatcattagagctttatttctgcttcagcaatagtgtgccttccaaccactgatcactccatagcccgctgtgctcagtaacattacctgagttgatgtactctgtaaagtctgttgttgtatcatgtgctgagttgtgccaatgtgtccagtattcattccactttgaatctggttagtaggaacaacttggccttgcatatttataggtgcaagttgctggatattagatgaatttccagaagaaagttgaacggaaccaaaattcaacccaggatttgattgttgcaaaaacatctttaaaaataaagattatgttaaaatgagctttgtagattgaaaagaagaatgagcattaaaaagaaggcaaaatcaagctacaaagtatgtttaaaaagcaagtaacaaggctaagtcactttgaagaattagcaataaataagtagtgaataaaatatgaaactttatattcaatctttcagttatcttgtttccaattgttagaaaaagtgtaactagtgttagtctgtggattgacagctctgtatcacttatcatttataatttataacatcacacagaagtagttttcactccaagtttccctttaccaaagtcatagtctcctagagtggtcctgctggttggtcatataagactaatttgaatcatacatactggtatcttaataaaaatattactgatgattgatttataaattctgtacccaagatgtacctaaaactttatgtaaaatataatttttatattatggattcaaacttactaaaatttggactggtaaaaaaagatgactggagaaacaaggatgttgaca

SEQ ID NO: 33611 - DNA, 1084 bp, Homo sapiens
atagaaacacccggcttcaggtcttcataaacatatctgtcatgttgactactgtaacctagaatagtgtctgccacctaataagcatgagtatttgctgaatgaatgaagagtcacatactgcttttcattatggctaactcctttatgaggtatgcccaatcctgtcttgttttgcctcttactgtacactcagttgcttttagccagagaaggagtatgtggtaaacgttggtccctattattcatttgaccagtttttactattcagttctaattaccttaatagatatttaagtatccactaaacacaaaactatgatgaacatccctcccttctttaagagaattcttgagatagagaagcttatgatttaatgagcccattagacggcaaatgcagtaagtgctgtagaaatttagaggagagatcactttggattaagatcttcattgaatcaacttcatgtaaaccatgaagtgtaattagggtttggatagggcggagatgatattccttacatggaaagtaccaaagtgaagatttgatgtccaaaatgaacagagtgtttggagtggaatgtttttgagaacattaggaaaacgttgagtaaaagcgtgatgtgatacaaactgtcttttaaaattatcttgttgttcagggttgtgggaccttgcaaagagaaccagattttgtagggttaagtaaagttgatatgaacctgggtcagtatatttgcagtgcgaaaagaaaggaataaattacatgtagatggggggaaatcgcagaatgtggtagcagatttcatgttgataagggaatagggaagcaaatatggtagattttgaacctggacatttgcttatagatgtgaaagttaggaaaggggaatcttggaggagctatagctgtcatgttagtgaatttaagcatttgttaaatgcctagtttgtcaagttctaggaatacaaagatgattaagacatggtcctacttttaataggggataaaatacagctagctagaaaatacaattcataaatgccgtatttatgaagtagaggggaagtgttagagaggtag

SEQ ID NO: 33612 - DNA, 1058 bp, Homo sapiens
gtttcgcttcttttttcaatatgctcagaattaggacaccaatgttaatggaagataaggaaactataccacctatcccttatagaagatttgtgcactaactaatatgagccctggaagatcaagccagtagaagatagaagatctatccctgctttatactttggatcatttatttgtgaagatcacaactttcaaagttttattatttcttaggtcttcatggaagttcggggaaattaactggatctacttctagtctaaataagctcagtgttcagagttcagggaatcgcagatctcagtcatcttccctgttggatatgggaaacatgtctgcctctgatctcgatgttgctgacaggaccaaatttgataaggtaaactaaaataacaagtacttcttaaacattaacattagttttctaacagcagtttgtggttgctctaagtgtgttcaaagatttgggttcttctggctctcttaagcattaaccatgtctttccaactgaatcgaatctgggaaaaaaaaaaaaaaaaactagtcaaaggacaagtaaaatgtgaattatcaatgaaatggcataaaagctttattaaaatttgttataaatcataaaatgcttatatctcaaatctaagttgtttgggcacctaaaaagtaagaggaaataaaagcttttgtgatgctggcctttctctgtactaaattaaataagtttttttgtttgtttgtttttgaaatggagtcttgctctgtcacccaggctggaatgcagtggcacagtctcagctcactgcaacctccaccttctgggttcaagcagttcttctgcctccctcccaggtagctgggattacaggtgcctgccaccacacccagctaatttttgtatttttagtggagatggggtttcaccatgctggccaggctggtttcgaactcctgagctcaagtgatctgcccgctttggcctcccaaagtgctgggattacaggcatgagacatcatgcctggccataaataagttttaaaagttgatctttgtgctcctct

SEQ ID NO: 33613 - DNA, 1990 bp, Homo sapiens
ggctacaaacctgtatagcatgttactatactgaatactgtaggtaattgttaacacagtggtgcctatttgtatatctgaacatatctaaacatagaaaaggtattgtgttgtgctacagtgttacaatggccagatctcatgaggcaataggaatttttcagctgcccccattataaatcttacaggactactctccttcctatatgtggtctgtcgttgaccaaaatgtcatcatgtggtgcatgactgtattttaagcctctttagaaatatgtttttagttattagaaagttaatgaaatatttcctggtatttaaattttctgttcttttagcgacttagttcatacaactgagagccttcggcaatcaaaattatctgctgtgaaagctgaaaaagaaagtgccaattttgattttgttttggaaccctataaacttgaaaatgcaagattgagtagagaaaataatgaattatacctagagttaatgaaactgagagaacattcagaccaacacgttaaaggtaagtgaaaatttgataatttttaaaatgcaatgtctttgtcctttttattttagaaggaaaagctaacgtctaattttaaaactattgattagaaaatatagtagtcctacagctggatggtgtgtgcctatagtcccagctactcgggagtttaaggtgggaggattgcttgagcccaggagtttgagaccagcctaggcaacatagtgagaacttgtttcaaaaaaaaagaaaagaaaagaaaatatggtactccttctgctaatagcccctgaaatactatagggtatgttgaagagttcctgagaaggaaaataaatgtgcattatatagctatgataatcactatatgtggattaaatttttagaattaaaaatttaattaaaattttagaattaaaattgccatagggaatattaaatgctggatttgaagaaatgttcttgaaacaacttttgtttttcccttactgaaaataaaagtagtaaataaggtgaaaaccatgtatcatgctgactgttttatagtcagtctttgagctgtcaagtagaataggatgatttcaaaggtactagggaaaagataattatatggttatctttgtatgaattattcttatattcagtagaaaactttatctaatccatggtatgaattcataatcctttagcttcagacccaatttactggatcaaaagctatgatgtacgttaggctaatacagtagctgaaaaatgaagattctcttttgtgcttagtgagttatttgcagttttgttaataatagtagaagaaggaataagtgtcaactaaagcatgcataagaagcaggtggagacttttaaattgatatgactttttgtattttgtgaaatggaaaaacttcattggatttcttgatctttaaaacggtctttgaatctttttcattttaagagttgaaaacttcattgaagaaatgtgcacgtgaaacagctgatctgaaatttctgaataaccaatatgctcataaactcaaactgttggagaaagagagcaaagctaagaatgaaagaattcaacaacttcaagaaaagaatttgcatgctgtagtacaaactccaggtaaatcgattccttctcgagacaaattatacacatttaatcttttaacgatattaacaccattgactaaaataggactttggattggattttcatgcttagactttagtgtttgaaaatatatattgaatagaccgtaaacttcttgatttatttctaatgatccgggtagtaatttatacgtgtgcttagaaatgtatgtagtattagttacttagatactagtctaactttaatgcccagagctttctctaatcaatattttaaattcttttttctattattattatcattattattttagttgtaaaagtaatccatactcattaaagaatttggaaattatgtacttt

SEQ ID NO: 33614 - DNA, 1089 bp, Homo sapiens
attaattgctagatccaaaaggatacttacagtctttgttttcttgacctactctgtggtatttgatattattgataattgctctttgaaacttcttccatgacttcatttttttccagttttcttttttttaagcctcttttttttttttttgctttttttcaactgtccactccctgaaatattactgttttcttggattctgtctttgaccccttctcgtcttatgtatctttttcaagtgtcctcatctgctctcttggtttaaaatactgcctgtatattgatgactccttcatctctctgtggctcaaacttctctgctgaactccagacccatatacccacctttacattgggcatttccacttgggtggagtctttttgtactcatatgccttgtactgaactttttctcttctggtttcgactcctttattctctactttggttggtagcatcaatgtttgcccaagtgcacattctgtattctttctagatctctttctcttgccttcgcataccactcaccaagttctgtcatttctcctggctaagtgcttcttaaacttatttcttctgttctatcctctaccactgttttattttagttattaattgtttcttatgcatttctgcattaggtctccctgcccctgcctctgtttttattcctgtcaatttcatcctttagtccagcataatcgtaattagttttgtcctagttcttcagacatctccaactactagatcccatgcacattacatccagtcataccaagctatttctgctgtctcaaacattccatgtttttgttgctttttggtatgtttggaatgtttggttatttatttaagaaaaccaaagcttgggccaggagtggtggctcacgcctataatcccagcactttgggaggccgaggcaggcggatcacctgaggtcaggagttcaagaccagcctggccaacatggtaaaaccccatctctactaaaaatacaaaaattagccaggcgtggtggcacatacctgtagtcccagctactcaggaggctgaggcaggagaattgctcaaacccgggaggcaga

SEQ ID NO: 33615 - DNA, 1047 bp, Homo sapiens
gagtttctgcttagggaagtcagtcagtaaatgttcagggaactcatgttttactgggtaaactcatgttttactgggtaccatactagacactgaagatgtaatgaaaaagaccaggttcctactgtggccctcatggagcttaaattttagtagtacagatacacattaaatgcacaatcatgtacataaccttataacctcatttataatgtgtttatgaagaaagtacagaaaatattcaaaatactataagagtatatagaaggagatctaaattagattgaaaaatctgaaagaattccttggagaaagtgacatttaagctgacacctaaacagtaataaaaatagattgtcaaatctttgtttattgagccctccttttctagaatctgtacagactgcctctttctggaagattattttgtttttctttgggagaaagtctcactctgtccctcaggctggagtgcagtagtgcgatcatagctcactgtaaccttgaactcctgggctgaagtaatcctcttccctcagcctcccaagtagctaggactacaagtgtgcaccactatgcctggctaattttttaattttttgcagaggcaggtcttgctcttttgcccgggctggtcatgaattcctggcctcaagcagtcctcctgccttggcctcccagagtgctaggattacaaacatgaaccaccacacctggcccagactttttaaatttagatatggttagattacatagcttcttttatagttacattggttaagtcccaaaacactaatctgcttttgtactataaaatatcttgtcctttaaagagttcggataactaatcccatccatcatgcctcggttttgcttatttaaccaagagattaattatttccaagtgcaggtgagaggtacctcacagatatctatcatttaccaaatctacattgtatgtggtattggcataacagatgttacatagtataggccaggtctcttttcagtgtatcatattatcaaattatcccttcttggcacttc

SEQ ID NO: 33616 - DNA, 1029 bp, Homo sapiens
tcttaaatataactggatgtggggcacagagttttattagattctataatttcatttataacattattgaatttcagttttttatgaatatgttgaataactttatcatttttctcttaacccacctttcaatttcctccctttcagaataatggctttcaatgagttcctatgtggatttttaaaagaacagaacagtaatgaaatatttgaagtacttgttgctgaaaatcatgaacatggacacaaattctacctctgtcaacttttatttaaatcagtgaatatgttaaaaagtttggtttaaaagaactatatctatatgtatattttcatatatatgacagaacaagaatatgtattaatagtgcctaatgtatctatatttttattattcatgaattaaattactaaaagtatgtttatactgtgaattaatataatgtattcacattattctttaataatctgtttattaataagccatgatatgtgtatgtaaatattcttacagtacttgtttttagttgtcatgcctatgtttagaccatatcttaatgtattcacaaagaattatcaactttgatgctatgctgtcatgcttaactttttcttcttaaaattattcatagatctactgtctgttgtcaaggggaatatattcaggtctagtcttcttataatagcagaggtcttggtaaaataactaccatatataacgtgttattgccatctagaagaactatgatgagaaagatacatttatatattatgtaaaatgttaactatcatcatatggactctatgtaacacaaattcaaaagcaaactaaaagctatatgcagagttttgtataaaacaatagaacagaaatttgggacatttttctaggaaataaaattcctcggtgtattaatctaaggtttcaaagtataaaagtatatggggtaggccgggtgcagtggctcacgcctgtaatcccagcactttgggaggccgaggcgagtggatttcctaaggtcaggagtt

SEQ ID NO: 33617 - DNA, 1109 bp, Homo sapiens
attccctcaggcatctgtcttcctcagaatgtttagttatttcatatagaacttaagcaaggaaggaagaaaggaaaggaaggaagagaagaaggaaagaagaaaagaagttctgtttggatactgtgctaacaggtcatattgggcttgcttattagatctgcatttctagtattcttgttttttcccttcaaataataattttttttttttgagacagggccatgctctgttgcccaggctggcatgcagtggtgcgatcatggcttaccacagcctcgacctcttgggctcaagtgaccttctgcctcagccgctcaagtagctgggatcataggtgtgaaccactgtgcccagccaaaaaaattttttattgtggtaaaatatatataacaaaaattaccatcgtaaacatttttaagtggacagttcattggcattaagtacattcacagtgtcaagcaggcatcaccactgtccattttcagaactttttcatcatctcaactagaaattctgaacccattaaacagtaactcctcattgtttaccaggggcagcccctggtaacttctgttctattttcagtctctgtgaatttgcctattgtataactgggatctcatgtaagtgggatcgtagaatgtttggccttttgcgtctcatttcaggtcacatgcttttaaggttcatccatgttgtagcatcagattccattgtatgactttttaaaaaaaaatgaaattttctgttgatggatatttgggttgtttctgcctttgggctactctgagtaatgctgctatgaacattggtgtacaggtatctgagttctgctttctatccttttggatatatatgaaggaatggaattgctggatcaaattgtaattttatgcttaacattttgaggacctgctaaagtgttttctgcagcaactgcaccattttaccttcccaacagcaatgcacacacagcatttcaatttctctatatcctcaccaattcttgttgtttcctgccttttgataatagccatcctaatggatgtgaagtggtgtctcagtttggttttgatttgcagttccctgatgactaatgatgttgg

SEQ ID NO: 33618 - DNA, 1027 bp, Homo sapiens
atcatcctggatttatagtgagccctaaatccagtgactagtgtccctgtgaaaggagaagaggacacggagacatagaagggagaaggctgtgtggagacagaggcagggattggagtgatgctgccataagccaaggaatgccaggagccgcgggatgtggaagaggcaaggaagggtcctcccttagagcctttggaggaactgtggccccactgacacctcgatttcggacttttggcctccagaactgtgagagaataagcttgtgttgtttaagccacccagtttgtggtcacgtggcattgcagccctaggacactaatacagatacctgttagacattggcgtgtccatgttgaaatgacaagtgagcttggatttcatggaaaagattgctgttggggttacaaagttgagagtctttagtttagagatggtgtttaaagtagtgagaatggctgaaatcctcagggacagcgtctggagaagagaataagtttatggacccagtcccgggactctcctgtctgcagagattgggccagtgagaaggaagaccagctcatgagctcatcctggcagttatctggtggaaagcactgaatcgttctcccttcctaagtatcaaggagaaaaattaggtatgggtttagagagctcctacttttaaggcactcagttacttttgttctaaactagcctcagatgacttccccccagggaacattatatatcagggaaagaagaaaggatagggaggaccctttgtcctgttaaagaatgagcaatagaagaaggctgccagaatagtcctggagcagcaaagaagctgtctcagtctttctccttccctgctcgaaaaaagagactataccagatcaaaggaggaatgagaatcaattagagagatggactctttcaaatagtcatagcaggccggaactagaaggggcttaattaaatgtgataatgtttctacaagcttaacctacagctctgcatataatgggtgagcaacttctgt

SEQ ID NO: 33619 - DNA, 1049 bp, Homo sapiens
gtctttatagtagaatgatttataattctttgggtatatacccaacaatgggatggctgggtcaaatggtatttctggttctagatccttgaggaatcaccacactgtcttccacaatgattgaactagtttacactcccaccaacagtgtaaaagctttcctatttctccacatcctctccagcatctgttgtttcctgtctttttaatggtcaccattctaactggcgtgaaatagtatctcattgtggtttttgatttgcatttctctaatgaccagtgatgatgagtttttgtcgtgtgtttgttggctgcataaatgtcttcttttgaaaagtgtctattcatataatgggttagcaacttctgtaattattattggttaatagctattttctaatcctaaattttcattgtgcagataaggaaacggagagtccttattcatatcctttgcccactttttgatggggttgtttttttcttgtaaatttgttctaagttccttgtagattctgcgtattagccttttgtcagatggatagattgcaaaaattttctcccattctgtaggttgcttgttcactctgatgatagtttcttttactgtacagaagctctttagttgaattagatcccatttgtcaattttggcttttgttgccattgcttttggtattttagtcatgaagcctttgcccatgcctatgtcctgaatggtattgcccaggttccttctagggtttttatggttttaggtcttaatgtttaaatctttaatccatcttgagttaatttttgtataaggtgtaaggaggggtccagtttcagttttctgcatatggctagccagttttcccaacaccatttattaaatagggaatcctttccccatttcttgtttttgtcaggtttgtcaaagatcaggtggttgtagatgtgtgttgttatttctgagggctctgttctgttccattggtctatatatctgttttggtatatactgtagtcttgtagtatagtttgaagtcaggtagcatgatgcctct

SEQ ID NO: 33620 - DNA, 1116 bp, Homo sapiens
gtggtatgatagagttgcctctagagactactttagattgtaagtcaacataggctgctgtgaagaggtgatatttaagtagaggcctgaatgataataaggaaccaaccatgcagcaatctgggcattccagacagaggggtggaccatgcccagggccaaaagcaggaaggagcttgacatgtttgtggaacaaaaagatgaaatccaaaagatgagtgaggaccagattgtataggagtttggattaggtgctaattgcagtggtaagccacgggaggcctttaagcaaaggagggccataagtttatgttttcaaatttcattctggccactgtggaaggaaggcaagagtagaagcagtgatactaaggtgactgcagaagagattctggtgccttttatgagggggatggtagggtagatggagtgaagtagatagatttgtgtatgttttgggttgatagcctataggcctgccagtggatttgaaatggacgtaaggaaacagaactcaaagatgacttctaggtttctggctcaagcagctgggtaaatgatggtgaactttgaagaaaggatgggatttagagaaaaggagccaagaatttcagttatagagctgggactagatgtggcttatggagaaagtgtttaagatttggcaaaaacaaaaagcttttactcagtgcccccaagaacagaggacatcaaattctgtttagtaaattaaaaaaaaaagtattataaatgtatagttgtttccataagaagggcccatcaggagaaaaagtgcattagaaaggttgggaattgaaggagtagaaaatagaaacaggataaataagtcagagaaagatacacagataaagagctaaaaagaggaaatgcagacaaaagagacagatgtgcagaattagagagagaaggggcaagcacactcacacagactcttcactctcttccattctaacctggagccagagagacactagaggcagttgtgagatcaaaacttttttctttattataattaactatggagtgataacaagacacagaccaaaagcaaataggaccaaatctttatctgaaacaggaaagttgtctttattc

SEQ ID NO: 33621 - DNA, 1059 bp, Homo sapiens
gggcatcttgccctttgttaggctgtaaacacgatgctgtcctcttccctcctactcctttgctgcttttattacttgagggttcactttgcggatttgtttttctgagccctatcacttttcttgatagagtgtctactgttaagttgccgcctacggcattgcttcctgtggggaacctagctagtgtgtgtgcaggaactatttagacaaagtagttttggtcaaggtattataggatttttttttttttttttttttgagacggagtttcggtcttgttgcccaggctggagtgcaatggcacgacctcagctcaccgcaacctccgcctcccgggttcaagcgattctcctgcctcagcctgctgagtagctgggattacaggcatgggccaccacacacagctaattttgtattttttagtagaggcgggatttctctggttggtcaggctggtcttgaactcccaacctcaggtgacccacctgccttgttctcccaaagtgctgcgattacaggcatgagccaccgtgcctggctataggattttatggtctgtgacactaggttcccgactgaattgttccaggtgcttacctgtgaatgggaggaggttttatcaaccattaagagttttaatccatcattagtctgtataaaaagttcttaatgaggagtattacattgactgtatagtttcaccttaaaatttcattttaaaatagtttcatttgcttaaccaaaatattctgaggggcatctaggggccaaaaactactcctcatgaggggataacagtggagagcaagagaaatacatattctgccttccttaatcagatgccttaatatgaaaggtaaactttattttccttttttttaaaaaaaaaaaaaaactggcaggatcaactagttaagaaaggtaaactttacacaggtagtttcacaagtgatgaagataatgaacgtgaagtacagtatttaaggggagctggaaaggactgcactggggtcgtctgcctggcaccccttttctaggaatctcctcttataccca

SEQ ID NO: 33622 - DNA, 1047 bp, Homo sapiens
cctgccaccatgcccagctaatgtttgtatttttagtagagacggggtttcaccatgttatccaggctggtctcgaactcctgacctcaggtgatccacccgcctctgcctcctaaagtgctgggattacaggcatgagccactgcgcccggctgctttatgaatattaaaactgctaaaacaaagcctgtcctctgtatcatttgtttctactcaactgatggacttttatcactaatgacagaggagacgaatgtaatgggttaagataatacacatcagccctaggctaatcacttacgaaccagaagggacctcagagatcacatggcccactctcctcattttgtatatccaaaggctccgtttccccacctacatgcttctgagcgctttcatttgtttgttcagtcacttaggaacacttactggtactatacttactgcatgctaagtgctgggttggatcctgaggacacattctttgatttcaataatcctacaaatctatgagaaggaacagactgacatactgcgaactacatacaagtgagtaagtggggcagtcgagccacaaactacaggagctttgaggacacattgttaattctgcctaaacattttcatctttcattgcaatggatgattaggaagcgcagagtttcactttggttttgttcatggatgtttagaatgtttaagtaggaaaagaagccaggtgcagtggtttctacctatagtcccagctactagggaggctaaggtggagggattgcttgagcccaggagtttactcagcctggacaacacagtaagaccctttgtctaaaatatatataaaataaaataaaaataaagtaggaaaagtatcagaggcagcagttttcttaatgggggaagaatacaagagtatagttttccttctgtgcagtaatttctccatcaagttcttttatacagtggcaattctatgtacatataatcagagaaagtgttccatctatattttacagtggataattttttacttacatcaacaaaatactc

SEQ ID NO: 33623 - DNA, 1040 bp, Homo sapiens
gcttttattttcatatattattttttcttttcatttttttctttgaaacagggtcttactttgtcacccaggctggagtgcggtgttgtgatctcagctcactgcaacctccatctcccaggttcaggcgatcctcctgcctcactcagccccccaaagtagctgggactagaagtgtgtgactccacacccagctaatttttttttgtattttttgtatttgagatggaattttgccatgttgcctaggctggtcttgaactcctgagctcaagtgatctgcccgccttggcctcccaaagtgctaggattctaggcgtgagtcactgcacccggcctattttttcttacttttttttggtttattttgttgtcctttttctagtttccgagagttaaatacatagtttattcatcagcagcttcaaggttgttttaaggaatgttttaaagctattaatattcctctgcatataccgttgacttcatcctatacattttattattatggactatttgttgttaatttctgaacaagctgtcatttcagttttgatttctattttgatccaagaattattcaaaagagtatcttttaatatccagcaattcattagactttgcttaacattttcatttacagttgattagatataaaggcattcgttttattattcttttgttataaacatgatcagctatttaatttattagtaatattgacagtctttttaacttttctttcttgtatttgtctgatatgtatttttgcccggtattttgttttcaagttttctttgccatgtatctcttttttattttattttattttattttatttttattattatactttaagttttagggtacatgtgcacaatgtgcaggttagttacatatgtatacatgtgccatgctggtgtgctgcacccattaactcgtcatttagcattaggtatatctcctaatgctatccctcccccctccccccaccgccatgtatctctttaattaatatataagatttttaaaaatctcac

SEQ ID NO: 33624 - DNA, 1032 bp, Homo sapiens
attgaacctttgaatctagcattgccctagcaaatacttagggcattgcaatgggaattgaattttatcaaattgaattcagatatgtaaacagataaccgggtgaagtgtgattagtgatatttgagagagttttgcacagagtgctggggaacacaaagggcagcataaacaactgccacagggagcctgcgggcctcccagaggtgtcattcgagctgtcttgaaagatgagaaggtgcttgccagacactcgaggggggcacacaatctccgcaggtcacatttatgtcaacgtgtttcttaagagaggcccttggatcctctaaatcctgtcgtttctttcatttatgtaactttagaaaaatgaatgcttgatttaccagcagctttggatcaagcctatagactgtacaggcttctcttccagcaaacgatcatcttagtacttctaggggataaagccaaaaaataccccaaaccaaccaaacaaacaaacaacaacaaaaaagctattgaatttattacccctacaatgtccattttaatcttctttttccttattaaaataaataaatttttttttcttctaaattggcccaagtgaagccaagatttcgttcccatgatcctttcatcatttcaacagacgcacactgaatgcctcccacggataaggcactgctccggactctaggctgacaaagaacaaacagcaagacagtttctgctcccacggagaccaaaaattgacaccaaacagaaagctaaagtcagcatggaaaatgtcctccactactgtttactgttaaagcataatctattgtttacatacatgcacacagattaagtgttaagcttcttgaaataaatgactaattctgaactgcagttcagaggtccaaggaacgatgaagaaggctatcctatgactggaagatttaccaggaaaaggaaaaagcatccttagtctaaacttcactgggcacatattttaagaagcctcagaaagttcattccatgcagaaaaac

SEQ ID NO: 33625 - DNA, 1384 bp, Homo sapiens
caccttatttggtttgggattattagtatcattgaattaaaaggaatcttaacaagtttgctgtaatctttatctggcacatgcactctctgtgcagcttacctctccaaggccatcttcactttaaggaatttaactatgaaggaaacccattttaatgttaagcagttctaacatgaagaactgaaatttactccctgtaattctatacaaatggtctttgttctgcctctgggagataatacagaatttcaaattcctcttccacttgaaagccctgaaaagtagttgaagacagcaaccaaaccttctcctcctgccattccccaagtgagatatttgaactaaaaccccagagcgccctcctgttcaaaaactgaatgaaggctctattttcaatagagaaatagattcaaaagaccaaatgaagatcagaacattgtgtggtgggtatttgaagcaaagggaaggaaattaggataaaggggttttctgcagggattcagtcagttgctggttggtctgtagtatatgaaatttcagctaggaaaagatttgaactcttgccacacagtgtaaatagcctcattgctttggatcattcaacctacgaaaccttacctatgaaataaaagctttttctttatcattcttgccaattctaattttataatttaataactttccttacttttaattccaatattcccagttgccctttcatttcttagagtttctggtagcactaatctttcttaaattcaacaggggatttaatgcttttgttttcagttaagttagatgtacgtgccttccacaaaataacaaggtaatgtaatttaaatacattgtcagtgcattcttggcgtagttttgtctcttccaaagtatcctatttcacaattttgattaatgtgaaaaagatttaattgcaaacctggattgtcatctacatcataaattcctctatgctgtgaaagtgagtgtattgctgtaaatttaaaggatcttccagagttcctaagtcacagaatctaagatttttatttcaaggtttcttgattggtagcttcccaatgactgaggtaatttctaaagagagcatcaaattaattttgggttccttttgcaataccgataagtgttccatctatttatttattttatttttttatttattttaagtcagaatcttgctttgttgcccaggctggagtgcagtggcacaatctcggattactgcaacctccatctcctgggttcaagcgattctcatgcctcagcctccccagtagctgggattacagttataggtgcacgccaccatacccggctaatttttgtatttttagtagagacgaggttttgccatattggccaggct

SEQ ID NO: 33626 - DNA, 1025 bp, Homo sapiens
ttagcagtattagaagccatcattatgtcatctaaactgagtctgttttagaaacttttagggattttttgtgcagagatgattactgtagcttcattatgtgcttttggttctccttgggattggcggggggatctctctaagacgaagttatctttatattaaaaacaataaaattggatactactgtgtccagcttggtagacaaatgagcaaatatgtgactaatgattaacagatctaagagagaagagctcttgaaaccaaggatgtagttaccaccccaagttgagaattgattgaagtcacctgtctatccatgagcctgatcattcattaaaagttaaacaacagattgcatctaatttttttttaaaggttaaaatgacagttttacttcccctcttttcattttttccttagggtttctgttcatgcaacataccacaattctttctttttttcatttgagtcttacgagtcagattcaaagagagggcagaggaaatagtgtagggtttggacagtgcgtttcaagtccaggctccattaccaaatggctacatgacctagtgtgtgaaattacttctttgagcctctgtttttttcactgtaaaatgtataaataataatacctacttcaaggccaggcgcggtggctcacacctgtaatcccagcaccttgggagactaaggtgggcagatcacgagatcaggagttcctgaccaacatgatgaaaccctgtctctactaaaaatacaaaaattagccaggcgtggtggtgcacacctgtaatcccagctactcaggaggctgaggcaggagaatctcttgaacccaggcggcggaggttgcagtgagccaagatcacgccactgcactccagcctgtgtgacactttgtctcaaaaaaaaaccaaaaaaacaaaaaaacctacctcaaaattttatgcacagttaaatgagacaacatatataagacacttagcacagtggaggatttccataaatagaagctcccttca

SEQ ID NO: 33627 - DNA, 1033 bp, Homo sapiens
ctaacaataaactctcttttgcaccacagacttctttgaaaatatacatgctgttgaccctctctgtagaaaaccgcacacataaaacttaccaacagatttcattggttcttgggttctcccgaagcctatccatggtttatagattaagaattgatgaggtagctgggcacagtggctcacacctacgatcacagcacttcgggaggctgaagcaagcagatcacttgaggtcaggagtttgagaccagcctggccaacatggtgaaaccctgtctctactaaaaatacaaaaagtagccagccgtgatgacaggcacctgtaatcccagctactcgggaggctgaggcatgagaattgcttgaacccgggaggcggaggttgcagtgagcctagatcatgccactgcactccaacctgggcagcagagcaagactctgtctcaaaaggggaaaaaaaaaattgctgatgtgacccatgaagggaactcattttcctcgtaattttggactgccacacattggtacctttagttctctgaaggcccacgtttttatcattaagacctatttgttagctagtagagctttatgttcgctgtccatgaaaccttctgtaaccacagtgactacaagtagttctttctctattgaattattaggtccagaatagaagatgtcattgtacactttatttccctcacactgtgttatgctctgatgtgctatgcttagctatctgtcagagattagtaaattataaaactcatgtgtactacttaagtttatatcttatgctagtttataagaacaattaaaaggacttagaagattaactttggtttcatggtctctgaagtcactgactgctatttcagcttgtttacccttacctagcattaagactccatctacttctgtgcagtatatgaaaatttttaaactttcatttagactggtggataggactgaccattacaaattgtcgttatcaattttttttcctttttttttttaagagccaagttctcac

SEQ ID NO: 33628 - DNA, 1049 bp, Homo sapiens
tataattactttaccttagagtcaaatacagtatatgactgaaaataaaatgtttctaatatttaatatatgaccaccttttacctttcaaggaatgtatccatttcatttaggttgctgactttattggcataaaagttcttcattttatttctttattgtccttttaatatctatagaacctctctcattcctgatattggttattcatgtatttttttctttttccctctgattagcctgtccagaggtttatcagttttactgattgttcttaaagatccagctttttgtttgtttcctttctatcctcatctcctactgctcagcatccccctccccctccactccagctatgtaggcctccttcctgtccctcagccacaccaggcaccctttttactggcttcaaacagctcatgccacatgggattcatcatgagagttcagccgctctatgtatgcctcactgatcatacacttaaatgtccagcagtgtcttattgtagaaacatttctaagggcttattctcaacttctgtacttaccaaaccatttgtgaactggcactgctttaaaggaaagttttattttacagatatctaccttcatatttggaaaacacggttgttcatggtatttctagaagtaaagttaactatgttctctaaagggagtagcttttatgataaatcaggtattagcggagagcctttatttgctatttcttcagcgttttttattttcaaaagcggtattctgggagtgaagggggagttcactaatttatacctttggctgtgtaggtatctgcattagttaccatgtatagccatgaagaagatattgatagtgccattgaggtcttcacacaagctatccagtggtatcaaaaccatcaggtaaataaatggagtaaaatgttatgagagcatgtttttacataaaaataaagatggagtagtgaaaaaattcaggcaaacaagtattacacgtcactattttaaaagtggaatactatttagattatcaaatgcatttttttagta

SEQ ID NO: 33629 - DNA, 1050 bp, Homo sapiens
taagcgaatttggtgcccttattgagcttggatcatatgtgctactctaaatcagagtgtgttcccaaaactgaggtgggttggtggatgctaagcagtcacaagtcataaacttgatagttgttttggaatagagtttgtattaagccaccaccttgctccacatcactgtgttaaggaatagagaattagattatgactcctcatgttctcctttcagaatactgtatgtactatataattgatatgacttgttattgtatagaagatttaggaacattttttgcttttgttgaaggtcatcaagaaaagacagtcttccagtgtcaatagatacattggcaaacatatatatctatataaatgtgtgtgtttgtgtatattatgttcctgaactcctgttctatcacagtcttagtaaacacttgccatcgtcagatagtatgtctctaaaagtagatgttgaggctcttgaaaattctgctggtgctacatacattcggaagaagggtggaaaagttactggagatagtcaaccaaaggaacaagggtaatatttttcattgtaacgttctctaatgctgattttaaattagacaaggaataaaaaatacattctcatagaaatttcatgtgaataaagttctagttctctttgttccttttccatttctctcactgtgcccagctctttgtccttatttccttcccttttccctcagcccaaaattaacctctggtattaatttaatctattattccagaagtttttctttgtgtttacacacacagatggtttacaaatattttctttaaattggtttatttattactattttttttttatttgtttgtttgttgagacagagtcttgctctgtctcccaggctggagtacagtggcacagtcttggctcagtgcagcctccgcctcccgggttcaagcaattctgcctcagcctcccgagtagctgggactacaggctaatttttgtgcatttagtagagacagggtttcacccttttgaccaggttcgtcttgaactcctga

SEQ ID NO: 33630 - DNA, 1023 bp, Homo sapiens
tgcaggggctccagcaacaaaaaagaaacagcaacagaaaaagaagaaaggtggaaaaggtggctggtgatgagaatattcttgttgcaggctgtttttaaactagtgtcagtgacactaggaatataataaaggtaacacagcaagaagcacagaactactccctcttcatctccatattttcataatttcttgtgtttcaaatagggaaacatcttcctcaaagtctgcctagtgagatatggcctactggttgcctcatagctttgtacagattatgaggactgaaaataattgggcatttacccatcttggtatctgttgtatcctttatctgtgtgtgctgatttgatcttttttcagtttcacataccttatctaaggtttcccaggatttaaacagaaactacttctatgatttcagctggagtctgaagatacttgtttctgttcaagtcccactttaaattatgtcttaggagactgaaagtggaatcttctgagcattcctaaatatctgcttagaaatatcatgtgataaagagggaccttcttaatacactgatgttcttcactaaatggatggccacaagaaaaataaagtaaatgtcttaaataatttaaccataaattttctgtcatgtgatactggaatatgggatacttttcatgtttatatatatatatatatgtatatatatatacatatatatatatatataaacatgaaatatatatatatggctcctttgtgccccatgtcattttcagattatggtagcatgctgatacagcaccatgaaagaactcaaggaaaatatatcaatgtaagaagttcactcttagacccagtgttctgaggtcacatgggtttggactgtctcaatcagaaagattaatgactgttatcaagaacatgaacattggcttcctccatagagaagaaatcagtatctgagttgcataccaggcagtattaaaatctaacaggtctgtttggcccattgatagatactcaaatgg

SEQ ID NO: 33631 - DNA, 1020 bp, Homo sapiens
atgttccccagtaactgatcctacctcagtcccttctccagtaagtcctgggaaatgaaatcattctttgtgttatttcagcatccccttattacttagaaaaaacactgaaaaagtgaagctcttttggaaaaattgaaatactttttatagtctataaatacaatttataattgaaatttagggaacaggttaccttaatgatgatgtcaccaatctctgttcctttactcatgccagagtcacttaccatgaatgagagaaaaagctgtttggtaagcattaaaattctctgtaaaattgcatctgcccagaattttattctctctatagatcagtattttacaaattaaactaacttttatggggcatatctagatttgcatgaaaatgaacttacttgaaagccaattttacagatgaatgagttctacctttaacgtctttgtgttacagaggggtaataccacatagcagttttgaacttgagttttggaatcagatagaacctgaagttgtctctgtcatggattatttaccaggtatgtgatcttaaacaaatttcctaactccctgtgctgcagtttctttatgtagaaaatgggttcctgcagcattcttgtaaagattagatgataaaatgtatataataaagtatatatttgaaacaaaaatttttatttagaaatttagctgtggctaggcacagtggctcatgcctgtaatcctagcactttgggaggccgaggcagatggatcacgaggtcaggggttcaagaccagcctgaccaacatggtgaaaccccgtctctactaaaaatacaaaaattagcctggtgtggtggtacacacctgtaatcccagctactcaggaggctgaggcaggagaatcacatgaacccaggaggcagaggttgccatgagccgagattgcaccactgcactccagcctggggtgatacagcaagactccatctcaaaaaaaaaaagaaaagaaaagaaaagaaatttagctgtgtt

SEQ ID NO: 33632 - DNA, 1088 bp, Homo sapiens
gaaccttggaaattacctcttccagtcttcttctgtaacagcccaggaaaatgagcataggaagactaactttctgaatgttgcccagctggtgacctgtgctccgctagacccttctcagtggggcagtctgtcattagtctggtaggaaaaatcaggagggcagtagtcataatgcaggcaggagctcattgccattttgaatgggcatagactgtcctagtaggacaccaattctagccaaagttgcccacgggaaccacccaccactgcttgcttcgcttgaaagaaaacaagggctgggagacagctgcctctgattttacttcttgccttaggaaggttccagctaattttgtgtaacatagttgtgccggctcttccatgaaaattttgtctttttctttgtagaatcctcagtccttcagaaatattaatttctaaactgactgttctgcttatactttcccctcttttttggttatttaattcctgttataacactcaagggctgctactggtcttacatttaatttactgcattttattttatgagatttctgtggcttcttgttacaggactttgtatgagattttgtggagaggtcctggttaactttaaagaactccttgggttagttggctgagaatcattggctttggttggctgctgagacttgtgggaggaccatttgaaagcgcctacttctccaaggtacaccaagcaaacctgatttctagaaacgaaggtggaagatctctatagtcaaatgtatctgttatttctctgcaaagctctcagccctttgcttgacaaatgtttgctgttacttcgtttcttctctcgctctgtctctcttaaagaagatataaatcaaactgcctgggtaaccttggccttataaagcttttcaactatttccagtaagaaaacagttgagaagtttctctgaagatagtctaaacaatttcagattaaaagaactaaaaatactttaaagctactcagacgttaatcttagcacaagttttattgttgtggctattcatatctcatcagacattcaaggagtaatttgtcctgtggt

SEQ ID NO: 33633 - DNA, 1062 bp, Homo sapiens
gcatcaggtgctccagatatttacagttcaaataaagatcttccccctgaaacacctggagcggaggacaaaggcaagagctcgaagaccaaaccctttcgctgtaagccatgccaatatgaagcagaatctgaagaacagtttgtgcatcacatcagagttcacagtgctaagaaattttttgtggaagagagtgcagagaagcaggcaaaagccagggaatctggctcttccactgcagaagagggagatttctccaagggccccattcgctgtgaccgctgcggctacaatactaatcgatatgatcactatacagcacacctgaaacaccacaccagagctggggataatgagcgagtctacaagtgtatcatttgcacatacacaacagtgagcgagtatcactggaggaaacatttaagaaaccattttccaaggaaagtatacacatgtggaaaatgcaactatttttcagacagaaaaaacaattatgttcagcatgttagaactcatacaggtaagagaagctttctagtccataagttcagttctcttttctgattgttacttgagtggttagttaagtagtgcttgagaaaaaggactctggttcaaatccaggttccattttgctatctttgtgaccttgcacaagttgtttaacctctttgttcagaaatttctccatggagtaacaatatctaggttgggaggattatgtgaagttacatgtaaagcacagaggaacagccaagagatcttaccgtggtcttactaaagtacatatcctaacttggggtttaccttcagcaagttagactggccgtgcatggtggctcacgcctgtaatcccagcacctcgggaggccgaggcgtaaggactgcctgagcccagaagttctagaccagtctgggaaacgtggaaagacccccgtctcaaaaagaaaacagaaaaaaaaaagtttgtgtatttatttctgtgacagtgaacacatttaagatgcagtgtagtttctgaaagaaattgagggcttatataaaaaggaaaactcagtgatt

SEQ ID NO: 33634 - DNA, 1052 bp, Homo sapiens
ttggacttcattttattgctggtaatgtattgtatgccgccattactttttacttaaaaattttctttgccggctatgcacggttgttcacacctgtaatcctagcgctttgggaaaccatggtgagcggatcatcggaggtcagaagttcaagaccaggctggccaacatggtggtaccccatctctgctaaaatacaaaaattagcctggcatgatggcgggtgcctgtaatcccagctactccggaggctgagacaggagaatcacttgaacccgggagacggtggttgcagtgagccgagattgcgccattgcactccagcctgggcagctgagcgagactcagtctcaaaaaaaaaaaaaaaaaaaatttctttgccattctctcttggtttttgttttgttttgtttttatttttaagggaattaatttaaaaacttaaattgagaggcttgtatttgtgtatttttcactgcggctttaacctcctaggctcaaacgatcctcccacctcagcctctggagtaggtggcactgtaggcttgtgctataacatgtggctaatttaaaaatttttttgtacacagggtctcactaggttgcccagactggtctcaacctccttagctcaagcaatcttcctcacctcatcctcccaaaagtgctaggattacgggtgtgaaccactatgcctggccattcttctaagaatatttttgatacgtatgtgtaaagcttgcagaactctttccccttttgtcttggcttacacctataaattcatttcggaggcataaaacagacaattggtagatttataaagaagagaacctgttactagaattgggaaaaagaatttaaaattgtttgtacagggcaaaagttaatattcaggtaggtactaattagaaaatcttgatgaatatattttaatataagcaagacttcatggcaataaagtaaaaattacgggagaaaaagaacggagcaaataaatcatgccatcaaattttaaacagaaaatttctacatcctccctttccgttcac

SEQ ID NO: 33635 - DNA, 1051 bp, Homo sapiens
aaaagttgtttgaacatggcattgactgggaggccaaagatttaaagaagcggaagattcttctcttaagacatgaggagtaagttgtgtgataatggtatgtgttttgtgtgcatgaatggacattgtaaatgttgaattctaggctccgacaatcattgtcaacagaagatcaagctgcaaatatttatgttttaaaacttaaattataaagctagttaagtctttctaatgactagttttaatgttcatgggtacattttacctaagttaccgtttacattgtatagaaaaagatacatcttaagcacagattggttattaggaattagtttggggaagaggtttttttgtggattctttcatactgcaaagaaaaaccatttgccttttggggaattgagctaacttctaatctagtcttaagactagaatgctaaaaacaaaaacatgaaggaaattaaaaccccttattattaaattgatttgtaaaaacattgttactggaaatttattggacttgaggccttcctccagaaaataaggacttgattgtcaggcctatattaggttctgaaccttaatgccatgtatttgtacttactaaaaattgtttcaatgaaaagtacattagcagtatgaacttctggtccagttggaagtttttccatttgaaaaatgtgatgtttgcatggaactgtttgaaacttttttattttctagtccccctcccccacactggatagaatttagcctagaattttccctttggataaaagaacaaaaattgaacatgttatttgtaaattgatgtttagtaattagtgataaacttgaaatactagcatatattataagccttaatcttaggtagtcttatgaaaatgaatctcttaactatcttttgaacctgtattcacattggttttcaagatattttaagttatattttttcctcttttcagagctgcttcttattctggggctacttttttttttagttgtgtaattcacaaagggctgcatttttttttttttttaataaggctta

SEQ ID NO: 33636 - DNA, 1023 bp, Homo sapiens
gtgagccgagatcgtgccattgcacttcagcccaggcgagagtgtgagactctgtctttaaaaaaaaaaaaaaaaaaagtatcacaggtagaaaagtcacagcatgttgtctgaggtaacagtccagtatgggtagtaacccaaagcatacactgcttgatgggaggtgcgggagaaattggacaattcacacaagattttaaatagtaattacttcccaaccacaagtccccttaatagttttcatatgcatatcccttttcagtagcaggcctggaattagtgaattttgattcatgaagatgttttattttatgtatttatttttttttgaaacagtctctgtcgcccaggctggagtgcagtgtcatgatcctagctcactgcaacctctgctgcccgggttcaagcaactctcctgccccagcctcgcaagtagctgggatcacaggcgcccaccaccgcgcctggccaatttttgtatttctagtagagacggggtttcaccacgttggccaggatggtatcgatctcctgacctcctgatccacccgcctcagcctcccaaagtgctgggattacaggcatgagctaccgtgcccggctgttttttataaaatgagacggagttctgtgttgcccagggtggactcagatgatcctcccacctcagtctccctaaatgctgggattacagatgtgagccaccatgcctggcctgtgtgtttttttttttttcttctcccagacggagtcttgctctgtcgcccagactggagtgccatgtcatgatctcctttcactgcaacctcggcctccaggttcaagcgattctcctgcctcagcctcctgagtaactgggattacaggtgtccgccacaacacccagctaatttttgtattttagtagagatggggtttcaccatgtggcccaggctggtctcgaactcctgagctgaagtattcctccgactttggcctcccaaagtgctgggattacaggtgtgagccaccacgcccag

SEQ ID NO: 33637 - DNA, 1123 bp, Homo sapiens
ttacaaaataaattatttgatttttaagtttaaattgactgtagatactttggctattgagaaatgaattttgatttttttttactttttaatatcaagtgatcttgtgaatgtgatattagttaatatcacaagtaacttcataagatgacttcaggtaaaataaacagagtagagatcataaatatgaaatatttatatagtttaggtgtttaagcaccattctaatgattttgggtaaagtagctatagttcagcttcctggggtaatgaaacttatctatagtttagaagctattcatcttaaattgcctataaaaaaccatggctatgtatattacaggcaatgccatgtttttcttacaatatcaatggctaatccacatggttgtgagaaatttctttcccattatgtgacagtctctactgaaataaattgccccaactgttatttaggtcataccttacacatgtgtgattgtctgctgtgttttctaccataggacctaacttctaattttggtggccatacttgactggatcagggtggggccaatttgttggcctgtcactgatgtgcgaggtgacctgatgaagccaaaatgggaggctgatgattagttggactctgcatattgtcttagaaaattgatgtgaagatgggggagtcagtagttggggagtagaagctaagaaggtctcacagatataagatgacagaggtcacaagatataggagtggagacgtggaggtgtggtggggcacttcctactgctgaagggtgatgggataatcttgagggttgtgctacatcctccagcctctgtgatgcccagctttgcagctgtccctggatggtaatagggagtgatctgttgagatcctcttgcacgtgtatctacttgtctctgtatgtctttccccacccctcacctgaaaagtatctgttccttataaatatgatgtctgctttttagattgcagctctctcagccatgctgcatttttatcaccagtcttttgctgagtatttttatgtaaagacttattcttcttatcctacctttaagaattcaaaatagaactaatgatctataacctaaagttggcattctcatgcat

SEQ ID NO: 33638 - DNA, 1064 bp, Homo sapiens
gtgccatctcggctcactgcaacctctgcctccagggttcaagcggttctcctatctcagcctcccaagtagctgggactacaggcgtgtgccatcacacccagctaatttttctgtttttagtagagacggtgtttctccatattggccaggctggtctcaaactcctgacctcaggtgatctgcccacatcagcttcccaaagtgctgggattacagatgtgagccaccatgccccacctctttgacatttttgtgtagttgctcccctgccatgtatgttcacgtactatacatatatctgtgctttagacataaaagagcaacaactttcactctgcccaaacaatttttgctcaccttccccacgcttttttttgcaatattcctcctgttgagaatatatgttgtagacctctacatgtttaaaataataccattttattcggcagtatgtttaagaatttgcttaaagaagtgcggatctatgcacagaaatttattgatcgaggaaaggattttaacttggagttggcaattaaaacacggatcatatctgatggcctaaaatactctttagctactggaaactggggtgatcaaaagaaagctcatcaagccagagctggagtatctcaggtaagtgtgccaactatgactacaggctcaataggaaacatgtttataggactagtagattcttttgtttgttgaatataaattattttgcttttctttcttggtcaaaggtaaaactactgggtgccgggtgtggtggctcacacctgtaatcccagcactttgggaggccgaggtgggctggatcacctgaggtcaggagtttgagaccaacctggccaacatggcgaaaccccatctctattaaagatacaaaaattagctgggcatggtggtgggtgtctgtaatcccagctactctacttgggaggctgaggcaggagaatcgcttgtacctgggaggtggaggttgcagtgagctgagatcatgccactgcactccagcctgggcaaaaagagtgagactccgtctcaaaaaacaaaaa

SEQ ID NO: 33639 - DNA, 1028 bp, Homo sapiens
tcatttttacgtttagtcccctagaaacacataccagtctgctatgggtaagcaggctatgggagtttacatcaccaacttccatgttcgcatggacacattggcccatgttctctattatcctcaaaagccacttgtgactacacggtctatggaatatctacgatttagagagctgccagcaggtatggtcagttttgctctacgttatttaagatccttctgtgcttaaggcacttttctgggtgcttgggaggattaaaaaataaatatgacatagtgcctgttctcacggaatttataatatggtgggaaacatgaacataataaaaaggtaggtatgtggaaagtgttttggtggaggtacaaagtcctttggaagcacagactgatggaagcaattaattcctgttggaagtctagatccagtttcatggagaaggtggcattttagattggagcaaaattgatgaaggggtatttgcatttgagaggtggtttaagcaagggcccagatggacgaagacatgcaaaatgtacggtacagttagtcatgtcagcttagtgggagtggagtgtaaatatatggaagtgaaagcttggtctcagtgtggagagagcttgaacaggttgaattttattttgaaaatggagacccatccaaccttttggatcagggaagtaatacaattagaaatttgttttaggaataccattctgacagcggcataaagagtagattacaatcaggtactgtattaacagggagctaatttaggggtttttgcagtagtataaatgtgaaatggcaaggtcctaaagaaatgaaaaagaatgatgggtaagataccttttgaaatacacttgataggacttgatgactggttgagtgtggagcaatgaagagaggaattggaaatactgttggtgtttgtggcttgggtgattaaagagaggtgctttgaataggttgggggaaaaataagattgggaacatgttagaaggggaaagaggttttagaggtaag

SEQ ID NO: 33640 - DNA, 1035 bp, Homo sapiens
ttctcttgtaatatagaaatcagaagatgacaaaaaacatatccaaagtcactcgataaatgtctgtcatggaagaatctgctttcccagtgctgattccaatgttcttttccttcatagacttttttttttgttttctgtgtgggctgtagtattagagttcagaatagtttgtaatatttggaataagggtgtgattcatggtatagagactcctgtggccttctctctgacttggaactgattcatgtatgtggtttttaatctttgttggggattatgtgacattccgtgtctatttcctcacaggcatgaggcatgccatttacgacaagctggatgatgatggtttgatagctccaggggttcgtgtatcaggagatgatgttattataggcaaaacagtcaccttgcctgaaaatgaagatgaattggagagcaccaatagacgctataccaagagagactgtagcacttttctcagaactagcgagacgggcattgtggatcaggttatggtaactctcaatcaggaaggatataaattttgtaaaataagggtgagtacaactttgttcatgtagctagttttagaaagtaaaccaaatccacttaactaacttatttttatatgaatttaggtacgctctgttaggattccacagattggagacaaatttgctagtcgacatggtcaaaagggtacttgtggtattcagtatagacaagaggtaggtatctttgatctccctcatgcccaaaccagttttgttaaatattttttttttaatcaaaatttgctttaacttaagagctcaaagatgatacaggttgaactttttgattttattgttgaataagtatatgaacataccatgtttaaacagaatttgggacatacagtaattcagttgggagaactgaaatgtcagttctagtttagtatatgtatctttgagtcccttttaaaatttttctttgtaggatatgcctttcacctgtgaaggtatcacccctgatatcatcatcaatccc

SEQ ID NO: 33641 - DNA, 1047 bp, Homo sapiens
tgagggactcatagtatcaatgtcagaggacactgtgttagtccatatgttttattttagcagtccttctatgttaattccttgccggctactctcttttggctcagtagaagttactctggaatgaatttttcctccacatacatcatttgtgcgtgctttttccattctacttgggtgctggtaatggctgaattttgattcccaatctttcttcctagtatagctaattgtacattctgaagatcatatttaaattttttttctgattatagtacatgcttacgttgaacacttttaaaatacagagatacgtaaagttaaaagtgaaatcactcaacataacataacatactggcataccactgtgttcacagagattatgtcatacttaatttttgctttgattatctgcatctgtattgtgtgtgtttaatggaaatgagattaaaccatatatagtttgtatagttatctccaatttctcaatgccattatttttttgaaagcattaagtatcataaaatatttcgtaatgtagacatactatgatttatttaaacatttacttattcatgtgggttgtcatttgttgctagaataagtggtgtcatcatgaatatccgagtgctgaaagcttggcctgttctctaatttttttctctagtacagattccttgaagtataattactagatcaaagagtaaataatcatttgactttttctacttggttacagatccagatgcatcattgccttctgtataactggtcctctgaaagttttggaaactctttcttaagaattgttaactctcagttgtgtattgttcatagctactaattcttggttatgtatagttctactatgtatatatgtatagtaacttttactaactctttggttattcttaagaattactaatgctcagctgcacatacaccaatatataaaagcagaggtcagtaaaataatcaaaaatgcaaatttactggttattaatatttaagtaaagctatgcctcatgtctttgaatttaacatatt

SEQ ID NO: 33642 - DNA, 1963 bp, Homo sapiens
aaatgtatggaacgtttgtagggaaaattgttaagatagtagaaaaccactatgagctgtagtaattaccagagttaactgttccagttcatgttgatgtttgtctaggctatttattgaggaaatttagaagatgaagattgaaggcataactttatttgcacctctaagaataattcttaaggatgactgtcagatttttttttgaaagtcagattatctctctcatctcagttttattgataacttcttcagaaagcaagttttgaagggttcttcttaattactggatagaaaagtggttagaagcacttcacaaaattctctttggagagatgttagagtgccaaagaaaagggtgaaatgatacgtatagttttattatcttctcttgcttttattatggcattttgatgaaagagtagaaagtgcatttaatgggctctctgcagttacggatacaacttacaatataagcagagagtgatgcaaaattgttttttatggatttctcattggcctcttgtttcagtgacctgaggaatgagaagtgaaacaatactctcagcttctgaagcacagtggttttgaaagtaggtgtagaaccagattggtgagtggtggtgtgtgtcggtcaaatgcctccacttgtgtgtaagatttataagtcaacatcgtgggcgttttgcccacacactatggggtaacaacctatatttgatttttatttgttttctctaatgttgagggtgtgtgtctgagtgtttgtgactcagtgattgtttgggcattttgggttaccttgtcattcttacattggccagtttctgtctgcttccctatgccttgtgaaacacaatagaaacgacaatatagaagcaagccatcagcttctaagagcaaaattctaacagatcccagacttcaagtgaaggaatgatttgtgggcgtttccaaatataacactctgaattatgagtttataaaatgctaggtaagtgtctttatatttgttaactgcttattttaaatttttcatgcattgcttaattaatcaacactttctattcataaaatttctgtattggtaaattagaaattttttgaaataatttttaaaaattattaaattttaaaaaattgttaaattttcattttcaaaaataatacttaaatttttattttcaaaaataatcttcgtgtatactgtgtggggccgcaaaatcagatttgatgaaaatttcatgtctaataactacaataactacttttatctttactctttcagcttccagacaactttaaatatgtttatttatccatagctaaaatttgttgggtgaactcataaatatttaacatgtgtttatgtatcttaatttgggtctttattgccgttaaatatatgttgtttcaatgtgggagccaccctttaattttacagtttgatataatagtgaccagaaacattttaaatgcacaggtttattttgttctttcatttttaatagtttcctgattaaaaatttattgcttcttactaaagcattatgtatctttatgtttttaaactgaaactgggtcttccagattttctctggaggaaatacagaaaagttggtcttatatttcttaaggccagaaaaagaagtgtgtgtgtaggggatggtgttgtttaacgtatgtcagtagaggattcgcaattcatagtggtcacttagaggtgcagacatgaacacacaactgcttgcttgaggccacctccttgaattctctgtgaacttggtccagactcagcggcctggctaactacatgctactctaggctcttagccattcagaaatccttggcaggacccgagggaaggaatggtggactccaagtgtcggcagacaccttctcactgacttatctgagtggatggcgacacacaaccatttctgatgtcttctgtaggggcga

SEQ ID NO: 33643 - DNA, 1022 bp, Homo sapiens
atccttgcatggcagaagggtgaatactgtatcctcactggtggaaagtggaagggcaaaaaggggcccagctatttccctagagatcatttataagggttctgatcccatgtgtgagggcagtgccctcatgacttaatcacctattaaagtccccttctcgtaatactgtcacattgggtcttaggttccaacatatgaattttggggtacaaatacatacaacccataccatagcaggagtattttccaaaaggatcttgcaagatttcattgtctgcccatctctaaggaagactttctgcatcacaaatttcgtataagaaaactttatttttctttcaaataaagtagagcctaaacatctatgaaacagatgtagatgtctttatctgtaatttttaactcttttaatgctgaaataaaatttagttgaataggtgtcagttttctatacattaactcgatttttttaaacaaattttaagaaagttcaatgggtatgtagagctatttacagatgtttgctagggatatactcatgtgttgccagcagagtttccataaatgtttatttcttttttaatacttgctacaagatgtaattttttgtttatgcatttacttgtttaatgtttcatgagggatgaacctaatttatcttgttgattacaatcttatgcatagggctagggacataggacatgcttgataaatatttgttgaatgaaataatgaaagattttgttgaaactgatgtataggtatgattttagtggctatgatatctagttgtaatgtgtaatactcattgagcacttactgtttaatcttatgcattagttcatttaaaatcctaaaaattatgttgttatattcatttttagatgaaaaaactgtgtgtatatatatgtatcttttacacacacatacatataaaacattgtgcagatttatagcgaaggtataaatcttttataattcctaggaagcatcagaacaatataataaatggctgaata

SEQ ID NO: 33644 - DNA, 1031 bp, Homo sapiens
tttcactgcctcagtcaatttattgtttatttaaggtgttttaaagaacaaatttcactgctattttataatcagctcagctaaacagcaaatactaggttaatattataatattgaatgtcttttggtataatctgacatgatttatttgtaggttgctgacaaaagggatgaaatggttaatggctagaacatgtaggcaaaatcttaaatggatttaaaattagctatcttatatttgtctaaaatactctttattccttgagacaccaagttttcttttaaaagcacatctaatcaatttcaaagtgaagaaaaatagagtccgagccagttttgaaaattatttctccttgaaatgttcagagtgctggaatttattttacagttccacctaaccaggcttctggactgaaaggaagggaatgaatagtgtctaaatctgctttaggagagagcttgtttatcgagctacacctcgttttcctttatctgtcactacgtaaataataggtcgaatttcttggatggttgtattctacgtgcacagcataaagcttgagtcaactaactgtagcaattttgattcttccgtaagctttccttttcttgctaagcttgcttctccatctaaccttcctgtttccaacaggatgcaaacagaattatgaagtttagacaattagagtcttcgtgtctatctttaaattcatgcattcagtctggaaatgaagtacgggtttttttgcaggatgaaatagaaattacagtgaagtggactgttaggaataaatggatttctttttcttttttgaagctttcaacattgtgttcggcaaaatctttcagtaaaggtaacacattcataaggattaactgtgtccaacagtgtttatcagaaaacccaacatattaggggcctagacagtacagaaatacatttctctgtcttggaaaaagaagtttagcagtaagtgatgcatggctctatgttgtcttcatgatctggagagaccaaagctcctgcctca

SEQ ID NO: 33645 - DNA, 1046 bp, Homo sapiens
atcttcttaatcttggatcttcacactctcaactctaggatttttttttttttttcagtttaaaagtcattgtgatcctcaagcagtgatactttatttttcttgcagaagtttcttatcctaagattctttttttttttaatttttttatttttttttttagagatggagtttcacttttgttgcccaggctggagtgcaatggcctgatctcagctcactgcaacctccgcctcccaggttcaggctattcttctgcctcagcctcccgagtggctgggattacaggcacctgccaccatgcccagataatttttgtatttttagtagagaaaggttttgccatgttggccaggctggtcttgaactcctgacctcaggtgatccacccacctcagcctcccaaagtgttgggattacaggcatgagccaccgcgcccagcccctatgattcttatgaggacaaattgcctattttaaaaatgtctagatcagtatcatgcatataagttcattgtgtgtacattaaattaaataaaaacatgtctgtaaaccccttttaaaagctataaggaacaacaggaggtaaatttttcttaactcagtatgttatttactaatattgtatcattaacatcatcattacactattttgtcaaaagatttgaaaaaaagtgagtttgataaatgttttaaagttagaattcattacagacaaataagtgattcaaatttttgaatgacagtgaatgaatatttttaaaactttgttctaggggctgtagttgtaattgtgtttcagttgtaaatgtctcattaactttataaattgattcctgttatttgtttggaagtgaaagcacaataatatcaaattcagctaatagctcgctttgtcagatcactgtattttagatcgtttctgatttcgtttgtctcaaattagatgaacttttttttttttttaagtcccggtagcttgattcaaaatgtgacattttggcactcagtagttaatgatactattctaaactttaaaatcaaaa

SEQ ID NO: 33646 - DNA, 1050 bp, Homo sapiens
gtgcatttgactaactgtagtctcatatcctacttttattagtggaaaaagaatctgtgcctttgaaaaactaaattcaatatttcctacaaaaatgccaacagtttttttgattctctttcttatttcttatacttgaggtcttttatgcacatacttaacacacacacataaaatcaaattttagcatgaattgaaacatgaaaattataacacagtatttcccagctgaacacaaaagtatgctgaaaaatcttaatgtacattccacaaagccaatgataaatcttgcccatagttcttagaggcagtttcattgtaaaatattttccatgattttatttcaccttccaatattttgaattcttcaggatcaaaatgtggtatttctattaaatccatattcccaagtctatcactgacacatttgccctcctatgaataatatcactgtagtctgtgatagatcacaatgtcaagaaactgatcttgtttcaatttttaactctgttgaaagaaataaaaaattccatttgcttccaagttgtggagagaagaaagaagacaattattcaaaacaatagctttaacataatatttatttatggtttctaattagttctgttgattattattcttaaaaccacaataatcctttggtagcaagtatatgttgtgtgggccagtgaacctatttgtttaagtccatagacaagatgtgtatttaagaagattagggttctttgaacatagtattagacatactaaataggtagctcaggaagacattaaatgtattttattagtgcagtttttaaagacaaagataaatattaaaattcaactccccccaaaacccaatatggatgtgttttggtagatatgatgagtaacagttgaaagtaaaaatcaaataagatatgataattaatgttaatatggtatcagtgatcatctgtagtcagtttatacaaacttattaaagattatttcacttcataccatttttcaatttatttcgcttaattgaattagaggtgtgtgtgtgtg

SEQ ID NO: 33647 - DNA, 1035 bp, Homo sapiens
agagtgtaatggtaagaacaaaggctttggtgttagacaatgcggtattgtatgttatttttgacatttactgcctttctaatgttggaaaagttacttaatgtcactgagtctcattttctcttttagggtggttctaagagttaagtaagataataaatgaaaagtgcctagcagaatgcatggcatagaatatgcatcaatacatagaaatttgaccgtcacttgaattaagagactggtttaggagcattgtaatcttatgcaataaaatcttagtggcctttaaaaaattttttttatttttttgagacagggactcactctgtcacccaggctggagtgcaatgatgtgatctcagcccgctgcaatctctgcctcccaggctcaagtgatcctcccacctcagcctcccaagtagttgggactatgggcgtgtaccaccatgcctaactaatttttgtattttttgtagagacaagctcccactatattgcccaggctgggctcgaactcttcagctaaagagatcctcccctcttggcatcccaaaatactgggattacaggcatgagccaacacactcgccattctcatttgttatttgtattaagagaaaaatatccgtttaccaaggtgtaacctcaatctccagggctgaagcttgatcctcccacttcagcctcttgagtagctgggactacaagcatccaataccactcccagctattttttgttctttttcatcttcttcttttttttttttttttttttttaaaggagacaaggtcttgttatgttccccaggctggtttcaaactcctaggctcaagagatcctcctgcttcagccacccaaagttctgggagtacaggcatgaaccattgcaccttgccctcctgtatactttaaatcatttctagatgacttatgctacctaatacaaggcctacacatttttttcatttgagtgggttcgatgtagcacttggcacacatgaaattcaagtttggtatctgggactttttggaat

SEQ ID NO: 33648 - DNA, 1031 bp, Homo sapiens
agccagggaggtcaaggagagcatctcctttcaaaagcagtaacatctaaattgacctctgaaaaatgctaggatttgccatgaaaagagtgaggataaaaatatttgaggcagaaagaaacaatgtgtgtgaagttccaaaactaagacaggattgttctttagtcaactgagttcagtagggttagagcttagacttcaaggggagttagagatgtttgggaacgacgagattgaaatattaagagagaccaaggaagggcttagtaaactatgtttcaaaggtttatttttgagcacaattccatgttgaaggtgctcatcatggaatcaagacttatctctgagcgtcatctttgctatgctcacgttataataatgatttttacattttggcagtgccacagcagtgtcctggcatgtggtatgatcattcagccatctatgacaatgtaattataatacattctttttattatgtatcatatgtgttattttgtagtaaaggtctttgtgaaattcagtatgctgagtgtctgatcatagtaaccctttcaaaattagaaaataaaatcagtttggcatgatttcactaaaagtcaccccttttctctctaagtgctaattctgtgttatatcagttatggttttaccagaaaaaaattaaggtcgccattgtgttgtttctagatttcactcttttttaaaaaaattgggcaacatttgctttcagattctccagacactgtattagcattcgtcattctcgtatcttttactcacccgggctgcttcttacctgggccagtaaccggaacttctctggtctcttattatcattttctctcttttgggccctccttttatcttaatcgtatttattctatcatagtcattgttaagagcgtttatcttaacagaaaaaagaaaaagaaaacaggagctgaggacttatgctctctctctctaattttgttctactttatacaattctaccaacttaccacggaatcacagactccttatccttt

SEQ ID NO: 33649 - DNA, 1034 bp, Homo sapiens
taagcaacctccaatttctgtgagctaaaagtgctatgtaatgtgataaagaatataacatcaggagttttgtttcaggagaaaaaagtgagataattggctgaaatggacaagttttgaaatttactagccttgagcaatgatgaataactgaaagtgctgaatcaaactggcctttgaattaaagcaatataacatactgtagaggttcgtcatttccagcagataggaggtcctggcacacacagtaagataatgtgaagaattagcttcaatctatgatttttgaccttcagtacaagtctaacttaaaatataatcttcgaaatttgcattttggaatttgtcttttccctgttccttgcaaaaccacatacatcaatatacattgatatgtggggaaaatgatctacagtggtgtaaatttaacatgcaattctggaatactaacttttgaatttcgcatatttaagtctttttatatttctagaattttcatacaggatgtgataacttgataacaaactcaacagtaatttgcaccatttcaggtaacctactgattaaatttttttatactttatagttattctaacaatgattccattttcagagaggttctctgggctttctgcttcatgcctcctctagccaccctgaacgattatatcctaagggtccgtattctaaaggttttctgacactggccttggttctccatttcatgatctttctgactttagacagagatgttttctaggctttttctatgccttacttctcttacatctttaaatgcatttgtagatacttttagattaaattgtgctcaaacatattcataaagcagaacaaacagctgacttatatttgggaggacttttacatagtgggagttctagactctaagaacatgccattcaattttaacatcacttctattgaaaaaagagatttatcatgtattgctttgatttaccacatccttactggatgtttgtggacagaatttgtagataggaaatgttctgcag

SEQ ID NO: 33650 - DNA, 1063 bp, Homo sapiens
tatatatgaatttagtgaattgtcactagtgacgattttacagattttgatcacatttattctttgttttggcttttggggctagaaattcctgtactaaattgtttagtgggatttccgcagatgtgtttaaggaatcattttgtgttatagatttttgaatcctttctgtacatttctaattcatttttgtcaattagtaaaatataactgatcttcattttagtcaggtttatttttcttgtttagacagtcttcccattttgttttttgcaagctgggactttagtaagaagacaactgaaatttagaaagaaagcctgcattttaattctttttattttttataaaaaaaatttaaccatgaattcctaggcatactgcttaacactcatattgtgctcatctgaaaaatagggataatacccaatattatcagagtagacatcataatacccaatattaaacagaacagatactgttgtgagaatacaaaaattaatgattaaaagaaattggaaacttcaagtcctgtacaagcttaaatttttattttctactgtaactattagaatgaaactaccccctatttcatttgtttatttaaaagataagtctgaattttagcaagtgtttttttgatggtttctgactacctatggatggagtttataagacctacataatattccctgaaactttactagggccaggcatctaagttcagtttctgacattgccacatagtggatgtataatttgggaccaataaatcatttattctcttgagcctcaagttctacattttctgaatgataatataagcctgaccgagttataaggactagagctatgaatgcgatttttagaacggtgcatagattagttcagtaaatgtttcatactgctttgtcttgatgaatgcagataacataaaaagtacgtattatacggcatgacccaggtagaaacacacatattagttccattctccccttctcattaaacctatttattttatttaatttatttatgtcatatttacttatttaaatactctttt

SEQ ID NO: 33651 - DNA, 1038 bp, Homo sapiens
taaaaatgcattactatgatatatttgacatacatcatattgatactatttgaaaacggtcactatttcaaaagagaaagatcacttttagagcagttgacacttcccctactccaaagataccataaacaacaaaaaatagtagatcaatgtgtagcacattattataaatacaacattattccagtcattatatgtttcttaataagagcaatgagcctatttctgtgtttgatgttgtctgttgcactttttgattgcatgggtaacaagtttattttacaactggtctgtttttaaaatagataattctgatctcggctacatttaaaaacattactaaatagatcccagaaatgttttttgaaaagaaaacctttttgggggtgtctgtgtgtctctttcattgcattgaataggcagctacctaatcagtttattagtttgcatgtgcctcatataatatatgctaaattgccgatttcagtctttatcagtggaatggggacgtgtctatactttgaggaactatgggaaaaataaagatgttgaaaataaatttttaatttattgatgattataaaaatgtgcattatttttagtttttgccttgaatttccgtaaagttttaaggaacagtacttatttttaacaaaacattttttttccttgttttttacttgagtcatatgactttaattgaaggcacaaggtatcctggagatgaggagggattttgaattggcagaacttactaaattcccacctttttttttttaaccctaaattattctcttatttttgatgcagggtttgttttaattatctcaagagattcttgtgttaaatgaaataccctctggaatgttacttagtacctaccactacaactgttaccaccgccaccgtcactaccgtcgccaccaccaccaccaccatcatcaccatcaccactgccactgctactactactgaccactattacagtatcatttgcgagacttcctgctgtgtgttttaccttaagaagcttatata

SEQ ID NO: 33652 - DNA, 1054 bp, Homo sapiens
aaggagagaggtgggggaacaataagacgagaccagtgtgttaataagagaccatgagtttgtttggagagtgagaattcacagagaccaaagaaggtgaagtgaaaggctactactagtggagcctttgaagcaaatggtttataattggttctgtctttatgcttttatctaaaaaactaggtattggattttttttttaattaaaagttgaacagtgtgtggaactgagcattatttactttaatctttcattttctcttttttccttgtctttctatttagactaaaattcttttgtcatagatgtttttaaagatttaacttcactcctaaagttttgtgatattttgattattcaggttcaaaattgctaacatttttcattatgcatattaatattttaaaatacccagaaaacaaaattctaactcattattcattttagattgagatataactataaagtagtgtaatttttaaaaaccaagtacccgagttagagtaattaatgcaaataaggcacattttacaagtagtcatcctggaaaactatatacttattccagtgatgaagatattaatgaatcatttttgaaacatttcagttgtattgtctttataatcaggaatggataagaaaataaatttcattgctttgctgaaaactacatggactatttctttctgtcacttcacctcatcgggcttggcttcaaatatattaggactttccaaaaaaatgaaatccattcacaaaagacgacagtatactattaaatataatatagacatcattgacacctccaaaacgttagtgaattaatgagtagaaatatcaactcatgtgactatccaaatttagaaccattgttgatagaattaacacaccaaacatttgctttttggaagagtggtttggataactaattgcaaagtagttttactttcaaagactgggagatacaatgcctactttgaaagcccagttttagccattaccagctgtgtggttttcagtgggcaaatcacttcatcttcctgtatcacagtt

SEQ ID NO: 33653 - DNA, 1045 bp, Homo sapiens
agtgacaaataaggtattaacaccataaagtttggtttcttgtattcagtgcatgacagatcattttcttgggtatctcttctccaaatggtgatctgtagaccaagattgtttccattttgttgttattccttctggaatatatggcttctacagttgctgtggacgtattagagacccaaaatactgggagctgtatttggaaggccaggtctgctcacattttataagccaaaactcagtcatgtcatttgcaaccttactgcaagggatctgggaagagtaatcttttctgtgtattcaggaagaagaaacaatgtgatgaacgggctacactgtctctgccatagttagtgctcctatgaactcacataatacaacccatgcttttgccctcagtggcactgtcaaataatgttactcacacctaactaccttatgtgtcttagtgttcataacacatcatttaaaattgagaagctgaagaatgaagtaggaggactgacaatacctgacttcaaaaattactgtaaaagcacagtaatcaagactgtggtattggtgaaagaatagtcagattcttattgtcaaaaaagccatgcttagggtaattaaaatactctggatgatactacagtggtagattcacattattatacatttgtccagacccatatatatttgtacacaaccaagagaaaactgtgatagaaaccatgggcttcaggtgataaggatgtgtcaatgcaggtatattaattgaacaaatgtaccactctcatgtgggatgttaataatgggggaggctatgcatctatggggcagagggtatatgagagatctctgtaccttccactcaggttttctgtgaagctaaaactgctctgaaaaaaataaaacctttaaaaaaataaatggaacaaaatagagagtccagaaataggcccacaaatatagtcaactgatcattgacaaaagtgcaaaggcaatttaatagggagaggatagtcttttttaacagctggtgctgcaataactagatatc

SEQ ID NO: 33654 - DNA, 1060 bp, Homo sapiens
taattaaggttttaatgtgtctgtcaaatacaaggatgtttgctggtcaatgccggtgaccaaaatggactatagaaagattagttcaggtaagtaaatggttaggggttgaaagaaagccgtcatctcaagcttgcatattctgtcttgaaaaaaatgcacttatatgttaggccaaggttaaggaatttgctgtctttgaaggctctgacgattgggttgctggcatggtgaaggcatggtgaaagaatccgtattctattaatgggtgaacttctcacccttgtgataaatagtatacattatagagaagtataatgatgagatttatttcctctgtttcagggaaatgaagcaatgtgtgtatgcctgtcttaacttaaaaagctgtctccttaccatttttatctgtagataaaaatggcattttttgagtttaagttataagcacataaaaatacttattaaaattttattttctttgggctctttgtaaagtaaatgaaaaaaatatattggaagattttaactgtggtgtacatagtactggtattgctgatagaactaatatcttcattataaaatagctatattatataaggtcttaccacaaagagccataatgattcaggggacattattggaactctggaatccttataaactaatggggttctgttttacttagtgttctgtttttcagtgtatgtataaaacatcacaaaatacatgcagtaatgtaatatcctgggaacctgccaaattaaaagccaccttaattgaagtgtggtgtatcacttatacggtgttgtatttattcttcacatgttgttcaacacttatttaaatttttagttttatggcatttcttaatcttagtattaccaaaccctttataataaaatttcatttgcactttttgtatttttttttcttttgttttttgacaggatttcactctgtctcccaggctggaatgcaggtcacaatcacggcttactgcatgcagccttgagctcctggcctcaagccatcctcctgcctcagcctctggagtagc

SEQ ID NO: 33655 - DNA, 1050 bp, Homo sapiens
atttctggagttatgagaatgggcttgtattacttacatgggggatacctataaaagcaggatttaaagcatagatttcttttcagtacgttttactcttaagattattcaggttttaaagaaataccattactgtttaagattatccctgtaatgagaaatcacagcatgcctcttgaaaaatggttccacttcatcttttctcattcatttgctagcacaattataaatgcatgagtgcagtgcatggctattcaggtcaaattctctttcaggactgatgttcctgttatacagtttatccatctattaacatcccgaaatgtcaaaagcttcattttttaagagtagaatgtcagtttcttttttacttagagcaatttagccagcacaaaaagggagagatttgacagtcatagctgtcagggcaaagattggctgatgatttgaggaaataggaataaatgttcaaatatatatcagggtgcctgcacttatatacctctaggacaatttatgaggtgaattggaaagacaaataaattcggtgtatgtgtgtgaaaagagctgcatttaactcctaaatttcagggttttgagaaatatttcttaatttctataaactcttttctttaaatgcttaagtgacttttgttttgaaacccagtatatcattgtcattgtaggagaaaagaagttttcaattaagtattgtttacacctcactatttgaagctgtgctctcataattttcaaaattcatttcatggataattctaaatttatttattgtaaacatgttgataaaaagaaaatcaaggaagtcatatatatatggataaggtattggatagagaacaaatactatattaggtatattctacatgtacttatttattgtgtatagaatgaataatataaaatactgaaattgctttaaaaatactgtaaattatattcagatcagtggagactatacaaactgtatatatccctattttcaagttgtcaggttcaaatccaaacaattagtttcccctgaagcctctt

SEQ ID NO: 33656 - DNA, 1030 bp, Homo sapiens
gatgttaattaaaataatatttaggaatacgaaaactattttctgaaaagttgaattccaatataattataatttaaaaatgtagtagaattttttgagttccattgtaggataatagtagagcatgctggtgtttttccactgtcatattaatgtatgtctattaaggaataaatacaacaaagaggaaaataggaaatttgttcttgcaagttaaccaaatcctaaaactatttaatgtatatcagtttacctatttttacaggtatttaaaattacatagttgtaatattcctacgttggcttcctgctttctttagtttacactgtgagtattttaaagagtattttacattttctatattgactgtggtttgatttgtgcatcaagtcaatttttgtagcaatttcatattaataactggccaaatttggcccctgtgaaaatacatatatgtaaatttttttgacacatatgaaagttatcttcaaccaataaacactttgatctgtttggaaaaagaaaaacataaactgagtatctgagaagatattgtttactatatttaaaatggaacacttctatgaaaaaaaatctaaaataaatcacaagcagacacctacatatgatatatgaaggaaacttcaaggtttaaataaacaatatagtcagtggtcaaggtacaggccttagaattagaatgattaattatgaacaatttatttagcttccctattctaatagggaattgcaagtagttacgagggtgaaagttgctgatcaaatatttctcttttcttcctcttttgaacacattcccatcaggctttagttcttaaccattttaccaaagctgttgtttttctgaaaaaatattcatgttgtcaaatccaaagtttaattctcagttcccattttactttatttcttattataaactactggccacctataatctgttctcaacacagaagccagaatgttcattttaaaatgtaagttgtatcatgttatttttctgctcagaat

SEQ ID NO: 33657 - DNA, 1071 bp, Homo sapiens
tagccgggcgtggtggcgggcgcctgtagtcccagctactagggaggctgaggcaggagaatggcgtgaactcgggaggcggagcttgcagtgagtggagatcgtgccactgcactccagcctgggcgacagagcgagactccgtctcaaaaaaaaaaaaaaaaaaaaagaaagcagaccattgatgtcttcttgaaaaacttttctcaactgtctcctggggcatcccactttccttgtatttttctggcatctcccttagttttcttcaatgatttctcatgatcctctctaatctacaagttttggagattcccaaatctccgtcttgggttttcttgtgttttctatattcacttccttggtagtctcttctactttaacattatatgtgatttgaatgcttattatttccaaatttttacctctagcccaaatgttccactctaggtatatagctactttctcaaacatcttcactaggatttttgataggcccatccaactaatatgtccaaagctaaacttctactctccactcacacccctaaaaatgtcttttttaaaagcttttacagtttcaaaaatgacaactcctttctttcattggcaaaagtcaaaaacattgacttcttcctctcatacatcacatataggatccataagcaaatcctatggcttctaccttatgtacattgagatattacctctcactgcttatgctgctgatactttgcaaccaaacgaccctcattactcatctggattattgtgtatctttgcaactagttggactggctgcctataatctattctcaacacagaagccagatgatcaacttaaaatataagttgtatcatgttactcctctgctcagaatcttatagtgggtttctgctcatgaaataaaagctagaatatgaataatagcctacctacttctaccagaattaggatttagccccttgttggctgtctgatccctcctaccattcttctcctccctccctctgcagccgcccattagcccccttgctgctacataaatccctttcagctcttgcctgagg

SEQ ID NO: 33658 - DNA, 1051 bp, Homo sapiens
tatgattaaaattatttaattatttctaactttataattaaaatcacttaatttctataaatattgtgatcggtaccattaagtaaaggtatattagggactttagtaaagtattgtaatgacagatagttctatggatacaattgatgcccatgagtcaaaacaccttgatcatgaagattttagtatttattttcaggaaaactatccacaacatttgtaaataaatatgacttttcttcattcattattaatttattcctgcaccgctttttggtctaaaaacatctatttatccttcatcattcatctattcatctattcatccttgctaaggacccaattcaataccacaagttgtgtgaaccgttttgtaacttgatttttaacttatataatatttataacttatataaaggatatacttaaaaaattgtccaatcaaagatgtgccccaacaaagtgagagactgctttgcattttcgtgtctttctacgtctgagtgatctacagatttcagtgtttatgtgttctgactggggagtcttgagaatttttcattaaaagtaaagtttaaagcctcagagttaaaatgggtgtataacattttcaatgtatcaacttcaatgtccctagaaagttaaccaactacaatatcttccttaaaacattcttaaatatttgtttttttctaagaagtaaacagtagtttctttcatttctcatcatgtattttcagccaagattgtggcaaacatatgccactagcatgcttgtgaatgtatactaacatattcacaaacatgccatgtttatgcatacacacagatatggaaaagtagaagagttatggagtaccttattttatacttggttatattatttactaatgtttctaagattttttctgtaaacgtgataaaaccaaaattggtccaacatatcttcctaagtagaatagacaaataagcatttgagactaatgtagatgtttcagtgtacctaattcattgatattataaaagttagtaacaccctgcttgggggaat

SEQ ID NO: 33659 - DNA, 1354 bp, Homo sapiens
cattatttccttggccaggataaattgggcccctcccattttcgtttctcttaccccactcatctcatcattcacagtgtcttgtctatttgatctttaacagttttatatgtgtgatttcttgctgccactgctatttgagtttacatgaaaggtttaaccttctaactgatttaaattttctctcatctgccactttcaagctgcgtactgatctcagagtcttctttataaaatatcattttcatcctataattctccttagaaatattgaattaattctatctacttgatgtatacagatcaaaatccatgggcaagattgtcctcaaacaaactccccatacaagcttctccttctctatcagctccacctcagacaagcttgctccatacttaactcatgttgttttccctgccttggaattctgctcgtcctcctccctccctccccttgcaacacttacccacacttcagtgtccaggtgaagtcccactctcttccactggacattaatgacacttttctccaaattcttatgacacacattcacatttggaacttgatccaaagataattgtcagcatacttaacagaattttattattgatttcctcaggtttgtgtaccttgtttttcctggcttcctggaaaactcctcaggggctggcaacttattttgttcttcttggaatttctgatactcatcattgtattactcatttctgtaagcagtttttgatgacatgacagaacaaatgtgtctttaataaggggacaaatatgaatatgacatgggtgaaaggaggtaagaatattttagtacctcttttggaaaattgcatgctaaaatgcatatgaaaatataaaactgtatgtacttgaatcactctatcactttcacattaacctgttgtatctccttcctttttttatttttatttttatttatttattttttatttaatattattatactttaaattttagggtacatgtgcacaatgtgcaggttagttacatatgtatacatgtgccaggctgtgatgaaggaagtacttagtgatagtacactaagtactatcagaaatgaacttattttattttttatttcttgcttttttaaaaacaatctgctatatatttaactcccatagaagaggccccatagaagatgttcctgtcttcactgctaggtcctggcattcgtatagtgcctggaagttgataagtgttaaatattagttgaatgaatggatgaattaaatacgtttagcagagtcatactatgctacgatctttctttcttttttttttttttttagacggagtctcgctctgtcgcccaggctg

SEQ ID NO: 33660 - DNA, 1034 bp, Homo sapiens
atactcattttattcctcactgaaaaatcactcatcaattgttcaaggaaaaaaagcaggatggagataagccataactaatctcaaatatcaaaatcgtttcattgttagatgagagcaatggtgggtaatagacaaattccaatacaaattatgtgaaatttatatcaaaaatttactaattcagtaacactggatttaggtggtttcattttcagtcggtgtgattttaaatacattgcaaatatatttgattttgatgcctgaatcagtgtgtagtatcagtgtgtgcctgaatcagcgtgagtgtcattgagaaacaatgacaggaatgtatttatattttgtaatacagacaaagggactgtctttgctggagataaaaaagcacttcttgttcccaatatgcaaatccattctatgcattaaatatcttaacatttagagatataatgccattccatttatgaaggcatgtttgtgtttttcttcacttgatgtatttgttaatatgattaattccttctgataagcagtttttagaaagattggagctttgcctgtgttcataggcttttggtgcagctttcccagcctggcaattcttgaatcccaagccttgtcttcttgccaaacttttggacttgcctgtagacacacctacctgctttctgcctccaccagattccatgagtgacttttgtcttgatatccccagccagcccctgactggagctcaccatgtttttttgttcttgaacatctttcagaactagaccttggcctaccttccttagaaccttctcaaagctgacaacttttgatgcaccaaaaccactttgtggtcaagttatatcctttatcatccacttaaaaaaaaattccccctcttctcccatgctctgttatactttcaccctctcccatgcatatgttccctgactccaggatttttttttattaggctgaaatgttggtggaattacttattgttatgaggtattttgtcattaaaaaactctttcaggttaaat

SEQ ID NO: 33661 - DNA, 1034 bp, Homo sapiens
aattagacacagtcaagtaatatgacttgtcctaaatcacacaacttcctagatacccagtctggactattaacaaagcactgtttcatatataatattctctaacttgactttagttacttaaagtatttccacacaggaagctattatttagataataggaacatctcattctttaggtaaagttgttttggttccctgttttttagttaaccaaggactctagaaatgacaggtaacgtgttcatattcaccaccttcactggacacacttaatattagtcaatggcaacctgagtttctccaccacctttaacaagcatattagaaaatgcaaagagccttacaaagaaaatgatataatggtgtttttctaggcatgatgtctattggaaactataatgtgatattctactaatttgaaataataatgattgacttattttgagttttgttttacagttgatcagtaaccaatttattgaagccacgttagaatagtaagggctgaaaacccaaatggatttgtctgcaggcttgctcagggacggtgtggtatacagtcactcaaccaaaggtggctctgaagagactacatttatgattttaataggctataaagtaattttagaaaattattttttaacttcctttaattgtttaatcaacctctacattaaagaaaactgttaatttcactatagttttaaaaatccctgaaattataagaccaaaatacctagtagaatatgtactattataaattgctaattgattatggtgaaggtcctaataatgcaatgattttcttttaaatgttgaattcttgggtcacttgtcatacatttacccatttgtgatttaaaatcaaaatcttacagcacaattataagtactgtatagtttagtcttacattttttccaggcctgcaatctttgcctgttaagtggcatattgagttcttttacacttaatataaatattgatatagtttgctttaagactatcaggttagtaattcatttttatttgt

SEQ ID NO: 33662 - DNA, 1041 bp, Homo sapiens
gttttaatatttatagatgaggaggcttctataaacctctgtgtgtgtgtgtgtgtgtgtgtgtgtgtgtgtctgtctgtctgtctgtctgagggggagtactaaatgcaggaatagtgttttaagaatgtgtcatagtatggaattctaaggacccttgagtactaaaccttagataccaggaaataacacccagggatttttttttcctgtgaaaccagtttttcttctgtttttctcaatctttccaacagctttctctgctcattgtcattataagtgactgtcagcctgaattgtgcaccactcctcccctccagagcaccaacaaccaactggtacttgccttctcgcctcttagttcagatttctaagaaaggaaatttaatccccattgggttaggtaaatatcctttatctaattactcatgtcactagtcattccctggcccagggcccacacagtagcaactgtgtaacagaggcaatactaggaatacctattataggggtgagaataaagttctgtggagcatgtagggggattgtctatttggtgggttagagaaggtgcccctgaagataaagtggcctctaagctgcaacctaacagacaagtagtagtttgccaagcacagaaatggaagaagaaagatactattctgagtagacgaaacagcaacacaagggcctagttcaggatgattgaaacatagaagtcccaaggataatttctagatatcagtctagtaatgatctggagaagtggtcagagatctggtcaggaagaacacaatggtataacactatgaggagtttgaaattttcctgatggtagtgagggaaaaattaagttgatcttagaggaattaagcaaggagtgacacatttgaagaattaaccaaaacagtcttcaagaccaatggagtgttcatcatgttgatgcagatagataagaaatagacgagtctgttctattggtgggtctgactcaaggagtgagtgatagtagtgatgatgatggccaaataacaggactta

SEQ ID NO: 33663 - DNA, 1040 bp, Homo sapiens
taaaatttgtgttgtagtaagccacttactttgtggtaatttgttactgcgcaatagaaaacttaatacattctcttcttccattttcaagttcattctcctgcctcactctagtatatttaacgtttattcttccagtcttactttcaaagtttacttaaacatacctgtatccttaatagaatagaaaatgcttcacgtttttaaccatgcataaatgcataggtggtggtgtgctattcatcttatttactacttttttcacacaatgctatatttaaactgcatctgtattgctataaagtttgttcagtgattttaatttcaacatattccattatttgaatatttcactgctgtatcatctttcatcttaggcatataccacattttacccatccagtctcctcaagactttgtctgctcatattagtccactctgtgtttgtatcacagtctacttatgtgatggaactacttaggatgcttctaactctttatgattaaaaacaacgtgacaagcgttgtactggatgtcttcttgtggatcagtgtgagtttccttgggaatatatttaggagtagattatacacataggtaactttactattgagcaacattgaccattctccagaatgacggcatcagttttcacttgcaccagtgagtcagctcccctttcttcatagctgcacccaaccttaatggtgttcagttttctgatattttttatatacctgagagacattaggtggtatctcattgttttgatttgcatttctctgattactaaagagaatgaacttttcttcagtaccaattagctatttggacaacaccttctataaatttattctttatagtctttacctatttttctctttgtatttttttcatcctagcttttaagaactactgatggtaagtaagcctttgccattttcaaatgtgcaaataacttcttcctgtctatctccctttagatacatgtgtacagaaatctttcattgagacgtaatcagaaaattctgttttttcc

SEQ ID NO: 33664 - DNA, 1048 bp, Homo sapiens
ttacaacgtgatgtggtttgattgaagcagaaaaaggaatgcagtttatcccctcatttactcttttttggtttgaatcacagaaagccatttgagattttaatcatcctttctactttctccttcaataacttattgattcaagtaaatgtctgtttttaataatatgttttcagcttcctctaataagagttttagcaagacttaatgaaataatttattttgaataacatagagaacagatgctttatgagattttaaatttgtgttctagtaattttgaaaatactcttgtttaaaatcattttggatacccccactttcttgggagagccagagacaggtacggagacaggtgacctatggatgaaactgtggtatgttgtctcatggtatcatattttgttttgtttttccatcatagttcttgtggacattttggggttatttaaatgttatgtatttattgatttttaatgtttatctcctgcccccatctactttgtgaatttcataaactgatgaaacaatgttttattgaccactgaatactcacccatctcaaacggtgctcaatttttatttgttggacaaattaatgaagttaatcactgcggtgaagggttgatatttatcagtcaggaatgtcagaatatgtatttctcaaccaccattttgaaaattcatttttctttcacaacttgtgtttaattatatgtttaatgaattgaggaaacatatgtgtagaaatccagaacctttattttaatctagtctagaaactagctgtgtggccctgaaaaatgtattttataaagactttctattgatttttttgtgggagggaaaatgtgttttattaaccccaatggtatattttgtggttgagctgaacaaatataatagagtgctttacgtgccctgtgtcatttcatgacagttttccaacatataatccttggtaaagccttttcaccggtttcctgtgatttctttatgtggtttttgaagtcaattcatatagctttagaaagttaagtgtgtgagc

SEQ ID NO: 33665 - DNA, 1078 bp, Homo sapiens
gctgtccaggaacagacgtcatcatgatagaaagtgccaactatggcaggactgatgacaaaatttgtgactctgaccctgctcagatggagaatatccgatgttatctgccagatgcctataagattatgtctcaaaggtatgatacttctaatattcttttctttgtgcacaatataaaccttcaacatcaatctgtgttacatgttaagcataagaacataaacagtgttatgtattttaggacacttcaaaatagtttttccatatctgactattccttgtatcaccaaaatgctaattgcaaacagcatttggaaagtattacaatttattggattatctattacatttcatggtctgcatgacattgcatgctgttattttgatagtgttctttagaactgagttcattacatgagagaagaataaatgtatttttcacaatttgcaaaaataagattttctccaaatatggcagaaaaattattttactgctaacaataactttctaacaatgtagggaaaaaaagaagtaaaaattaataggtaatttataatcattaatcaaaatgtagtaagagtattgattaaggattagttggccttggaaaataattttaaaagtattcttttgctattcagcatatgaaattaatttaaatatttgagcaatctaaatatggccatattaacatcatataaatgaatgtatcatataatatcagtgggtaagaaatatttttgattctaaagagactggtcagtaggaatgcatattatataaggtttaaattatgttaaaatgtcttgataagttagctaagtattatatatctcttagatatttgttcactattactatgctttctcagaaatcagggataaagtcattcctttagtataagcctacagctattcagttatttcttttccttctattatttaagaacttctttaaatatagggaaaactatattttagataaaactaaacaaattgaagtctaaagacaaaaacagtagatttcaaggattctctcttttgtacttaggaaagccttccttatttttcacct

SEQ ID NO: 33666 - DNA, 1048 bp, Homo sapiens
caaagatgtaattagttaagataaggtcatatcagagtagagtggacttcaaatccaatatgacttgtgtccttttaataaataggggaaatttgaacacaggcatgcacacacacataggtagaaaaccatgtgaaaatgaaagcggagaccgggctcatgcagcagaagccaagcaatgccaaagattgccagcaaatcaccagaaactagtagagattataaatttctgttgttttagccaccttgtttggtactgcattacagcagctctaggaaactaatatgggcataagtaaaaggtcagtagaggcctggcgtggtgacttacacctgtaatcccagcactttgagaagctaaggcgggcagatcactggaggttaggagtttgagaccagcctggcaaacatggtgaaacctcgtctatgcaaaaatacaaaaattatccaggcgtggtggcccgcctgtaattccagctactcgtgaggctgaggcacaagaatcacttgaacccgggaggtggaagttgcagtgagccaagatcatgccactgcactccagcctgggtgacagagtgaaactctgttcccccaccccccaaaaacgtcaataggaaagataaaatggaatactaaaaatagtagagttatctgtttccaaaacaaggcaaaaagaaggaacaaagaaacaaaatacagattgtctgagatgaattcaaatacctggatagtagacctaaatccaaacattacaataattgcattgaatataaacatcccaattaaaagacagactggataataactgtcagtttctcttaaaaattaatacatatcaactttatggccctgtaatttgaatcctaagtatttatctatgataaatgaaaaccttcatccacaaaaacacttgtataagaatattcatagtagctttgttgataatagtcaaaatcagggagtagcttagatgttcatccataggagaatggataaacaaactggcatattcctacaatagaagattgttcaccaatagaaagggaca

SEQ ID NO: 33667 - DNA, 1029 bp, Homo sapiens
gaaaaatttgaaaaaaactatctcccaaaataggattgaacattattactgccatgttctgaaattggttatcaaaacctatactatatacttttaacatagaaaggaaatttcaacagttacactcgcagacataggaaagggtgactataaattaaaatctctctggaaaataggtttattatccaaaataatactgattcattaggggaagttatttaactcaattaatactttctgctgaagactttactgaagcaactgtatactgaaatagagaggttataaaatttcattaaacaggatttttaaattgtagtctcagtagtgagttaaattaaggaaaatgaatccacatttttctctttcagaagtatgtgttcataagtataatttttcaacttcaatcatatagcccatattaaattctaattaatattggccatcttttctaatgaatttagtatctagatttctacttagtctttcacgttacaagttacatggacaaacaattgagactgtctatatttcatagaggctaactagcacccacactcattaaaggagcacagaattgtctgaataaattacttctgagtttcctgctgacagctggaacctggggagcagttaagagtataatattcttacctccctctgcaagaagtggccagaatagttaacacttccttttactttcagcagccttactacttagaatcatttaaactgctgtgaccaagttatcagatcatgctgctgccactaatcaaagctgttcaacaagcggaatatggcaagaggaaataatagagtatgttttcattttgaatagaaaaaaaaatgcaaaaaaaggaattaaatacaaacaccaggtttgtaacaggtgttttatgagaattagttacagaacagatcgttctccctcagacaagattcaccagagacatctgccctctatggtgttaaataaaaaggttcatgttgccccaaagatccctgtttacatatttagcttcagttgcc

SEQ ID NO: 33668 - DNA, 1070 bp, Homo sapiens
acatttgatgttacatttaacaaggtaacagggaaggatcagaagagagatcatattcacttttgctggagaggaaatgtatttatttctacaaggcttccttttttttttcctcttggattcattctgattgctcaaggaccaaaagaattggtagctggctacttgtgtgtgtatcagagtctaatagaaacttttaatggcagtgtttggtcttgtcctgctctgttacttatcaagagctactcattcagacacatcaagctatcttcaagaaacttgcctgcttagaaaagaatatgactgtggatattatcaagaaaaagctctaagaatttctccttccactttattaggcactcactaatactcatattaaatgggttcaaataccaagtttgagtctcattaattatgaatgactgctctgcaacagatggcttgtgtttctctttttaagaatgaatggtaagtgtaaagtgagaaacatatgttattctgtgtctttagaactctgtacttcttaattcactcatcgatatggtctgcatttgtgattagcactgattctaacacacaatttgagaatttatgacgaattatagtacttgatcaaatcttgacactcgctgctacttaggtacctgatgatagtttctaaaatgttgaaataccttatctttatcctcagacagtagcttgaacactattaggagctgtttaccaaaaatcccatttattattggttttgaagatctaggactgatagggaccaatctatgaaggccatattggccttgtttttctttttaacctaactcatggaaaacaggaacttttttccttttttatggatattggagttaaagagtcccattgcttactacaaatatccaagtgaatgtgatgcttttgaaaaaggtttatttcttcaagacaaacccttacctcatggttactttgactatttgaataagtaatgcatataacagaattaaaacagtttccagcacacaagtagtgcttgataaaagtttgctataattactttaacaaagtctatctaatac

SEQ ID NO: 33669 - DNA, 1035 bp, Homo sapiens
ccaaattactttgatttgttataatgctttcctgtgtgaaagcagaacttgcgggaaaatgacagtgccaaaatttatgagtaaaacaacttaaagataagaataggtttttttattattattattattggctttgtaaggcttaatgatctccactttgtgaaaagaaaagtaataattggaataataatagaaagtataaccttttgtttgatgctattctcttatgctttaattcactattattacaattatttatttagtttcctatataaagtaaccaaattaaacagtaaagtgtcatgttcacctttctaaagcttcagagtaatgaatagctctagctccaaccaaagttttttctatttttttttcttaatgtgatagacaaaccaaagatacagcatgccagaactctaactggtatgtctaaagcttatcatgctagatccctaaaatcagtattattaaatcaccaagaagttttaaagtagtagaataaagattatgttaagtctgagattaagctgtcacatcagagtaatttgattttaaggcttgctccaccacctccattagtactcacatccttgacagagacaaagttcatccaatatcagttcttgttgcggatgaggtattgatgttttgtgatactttggtcagtcaataaggttaaaaagataaagtttatttagttttcaacattgccttcttgcagtcaaatgtctatttaattaaattttccaatatttggcaagaaaggactggcagtgtcagctttcttcagcttgatattaaatagcatcttgtgaaatttggtaaagactatctacagtgatatgaaacagatatactttgattccacttaggagaggagtgagaagtccaaattctttgtcaaggcagttaataacttctaagtttctgaatgctaaaagtatgaattacatctttggatcttaagtatgacattcatttgctaactgacttttggtgacttgtagaattctgcttctacaaatactgaacaac

SEQ ID NO: 33670 - DNA, 1128 bp, Homo sapiens
gagcattaaccttgactatgcctttggctccagccacctttttaagagtaaattgctgggcaggtcggggagggctagtcacagaaggaaactgtaagccagaccaggtgtgaggaggggaggcaataaaaagattacagggtggaggagcggaggctgaggaagaattggggcctagcttggcctgtcgaggaggggagaggtcagatgggtctgtagaaaaggaagattagaaagactcagcgacgcttggggtcggtactgaggggacaggagggagggaaagaaggaagatttgggacgagttgcactgggcacagaggctaggaaggaactgatgtgtaaaagaatgcctggacttcaggcacctcagaccatttgcccattttacgacaagaattatttagatcttgtagggtggaaaaattgaaagtgccgttttctggctatttggaactactcttgagtttgtattggggtcaagcggcattgcagaagaaaataagactcttagattttaggtcaggtgagaattgaagaggttttaagttcttaagaatacaggctaagggagaagaaagaggaatggaaggtggaagcttgcccatagtgaaggaggcaagcccagagaaaagagtagaggcacggagaaggggtgggggtttcttcccctccagaaaagcagagaaagggctgggacacggaaataagggattggggcacagagataagaggtcagggtgcggaaataagggattggggtgcagagataagaggttggggtgtggaaatacgcgattggggcacagagataagaggttggggtgtggaaataagtgattggggggttcttgccccctaggaaagcgggacttgccgctaagggtgaaggagaaggggttgaggggtacttgcccctgccccaggaaagcgggacttgccgctaagggtgaaggaccaaggcaggcgtccctgcgtggtctgacacccttgaaacgtgagtgtataatcagagaggcgtccctgcaatgattaaataccaagggaaggctgccttcccagtccgtgactggcgccggagttttgggttcacggataaaacatgtctcttttgtctctaccagaaaa

SEQ ID NO: 33671 - DNA, 1024 bp, Homo sapiens
ctcaatttgtaagacaatggtagttgttttaaactcttcagaaaactgtgttgcagctggaataataaagaggctgacctacctatcaaattacattatcttgaatttgctacttcatatcggagaacatatttccaactaaaatggaaataaagatccctatgagttgcatgcctttagaaagttttaataaattgttacacaaagcctttctaatgttctttctctctaagtgatgcggggtttttcctccttagctcaactagatttgggttcttttctcacaaccaagaataattaggcacaaggtcatcaaagagtgagtggagcagaatttattaagcaaaaggaaaggtctcagcaaaaaacaaaaaggggtcctgaaagcaggtttccagttgcttccttcacagttgaatacaagggcttaaggtgtgaattctaccccatccttccagtgcacatgtgggtccttagactgagtccctccatattgatttatttctcttactgcacatgtgttaaggaatggaattttccactgtgggcatgtttaggcaagacccctgtgcaagttcccttatctgcacaaaacatctggtataaatgcttgtggggtgggttggaagttctccagggacccttcccttactgtctgcctaaagcaagctggataactcctttcataactgcataattccatattaggagagaaggcctcaaaaatagttcctctcaggctctgaagatcagcctccagttaagcccatttccgaccatagagtattttgaacaaaaaaatcctttcaaatatgattgtcaggttttgaatgggacaaacagtaaattttcctgacacaattgaatccccttttgtcccctaattacaaagacccagaagagatggacccttttcctttaattagttatttttttagagatcaagaactcattgtgttgcctaaactggtctcaaactcctgggcttaaacagtccttctgcctcagcctcccaaagagcagg

SEQ ID NO: 33672 - DNA, 1131 bp, Homo sapiens
gttccttctgcactgccctagcagaggttttccatgtgggccacacccctgcagaaaacttgtgcctgggcatccagacatttctatacatctgaaatctaggtggaggttctcaaaccccaattcttgacttatctggactctcagactcagcaccatgtggaagctgccaaggcttggggcttgcaccctctgaagccatggcctgagctgtacattggcccctttcagctacagctagagcagctgggacacagggtaccaagaggaggggaaccctgggcccgccccatgaaaccactttttcatcctaggactccagacctgtgatgggagggactgccatgaagacctctctcatggcctggagaccttttcccctttgtcttggggattaacattcagctcctcattatgcaaatttctgcagcaggcttgaatttctcctcagaaaatgagattttcttttctatcacattgtcaggctgcaaacaaacttttatgctctgcttcccttataaaactgaatgcctttaccagcacccaagtcacctctttaatgcttggttgcttagaaatttcttcttccaggtgccctaaatcatctctttcaagttcaacgtttcacacatctctagggcaggggcaaaatgccaccaatctctttgctaaaacatagcaagagtcacctttgctccaattcccaacaagttcttcatctccatctgagaccactttaacctggaccttattcatatcactatcaacatttttgttaaagccattcaacaagtatctaggaagttccaaacttttcctttatttatttatttatttatttattttattattttttttttttgagaccgagtctcactctgtcaccaggctagagtgcagtggcatgatctcggctcactgcaacctctgcctccctggttcaagtgattctcctgcctcagcctcctgagtagctgggattacaggtgcatgccaccacacccagctaatttttgtatatttagtagagacggagtttcaccatgttggtcatgctggtcttgaactcctgacctcgggatctgcccgcctcagcctcccaaggtgctgggattacaggcattggccaca

SEQ ID NO: 33673 - DNA, 1132 bp, Homo sapiens
attaggatggattccaatatgtgttttctgcattgttttgaagagaggaatatttttatattttttttttgtggaatatgattcaaaaactggatccattttctcccattgagcccaagcaggcgtatcttgactctttctatgtaactctattaaacatccttctctgcagcatttttgggactgtaatccattttacatataaactatgtggagcatttagaaacagttctgtgtgttctgtttgtagtgtctgattttaattatctttaggttaaatttccaattctttcttacaaatattatgctcgtttaatatctaaatgccagctgtgactttatttcttacaaacaaagagaaaatgcaatcaacataaccaaacccatttagtttatttctaatttgaggagaccttaaaatgttttcatattccagtaaacattgccatgggtattttaggtataaacacattacatgtaaacagaacgcttttgccaaacagattgacttgaagaatattcacttgaattatgacataatgtagcactgtcaggcagatttgaggcattgttaagacagtcttctaagaaatgttattttgctagttttgaccactgtgaacatcaggatcttcattcctaataaatatatgtggttccctaatacaggtcttgacacaaacagtgctttaactaagaacgttgtgatggtcaatctacattttctaatatttactgagcacataccatgggtatatgcattgtgctaagcatcttatgctacttatctccttttatcttcatgaaagttctgtgttattatttttctccaatttataggtatagacactgaatcttagagaaattaaatatcggttggtgcaaaacaattgcagttttgccaatggcttttgcaccaacctaatgtgtaataactagcttcttgctctaattttaaatgctattattcagcttaccaataactactattagtaaactataaagaatagaatgggctctgatatcagactttcacttctcttaccattcttagtgaaatgacaaatttaacttgagtaaccaagtgaatagtcctgatctattttagctcctgtgtctaatttctgtaggc

SEQ ID NO: 33674 - DNA, 1034 bp, Homo sapiens
tgcctctttattggtaggattgtatatgtgtgtgaatatgcttctattcatattcattagaaggagtggtgaaattgtaatggagggcatccagagaatttactggacaatactttcctccctcgcagaattgaagtaaaagtaggaaacagaagaaaccatccagcacccatgtgttgttttctagtaggattctctaataaaaacaccagcctccttggaggaagggctgattctagggctaggggatgaaatatacaaaataaatctggagaatcttgtagcaccaaaagtaaggaagtgctcaaaaaataatttgataggaatatgtcaaagtgagacaggagcagtcaaactaaaagatctctcatgaaaaagctgaaaaatttatgcaaaaattaaataatgtaatattggattatctcctagaatataaaaataaagtcatgagttcctactgataaaaataaatgcatgggtgagtaaatacgtgaaggagaagagacaaatctcctgtagaaaagaattccaagtaattggtgcagatacttcttccttaatgagatggagcttaatcccttcctcttcagtgtgggctgcactaacttgctaccaaagaatacagtgaggaaagaggaaaaaagtaagttttcacttgagaaaaaaacttagaagacactacctttgtcagatgatgaagtttaacatcattagtgataagtcagattaatagtacttacttttgattatgatgtgatcaaaatggtatttcacctctgtggtcatccttccaaaaatctatgatctcagtataaccatgagaaaaggacatcagacaaacacagatttaaggactttctgccaaatagctgaccggcactcctcaatgtctttaaacacaccctaagtgtaagaaagtatcacagaccagaggaagctaagaagatatgacaactgaatataatgtagtatccaggatgggattctgggacacaaaaaaaagacatgaggaaaaattaatgaaattttaaaaa

SEQ ID NO: 33675 - DNA, 1018 bp, Homo sapiens
ttccttctttcttcctttctttcttccttcctttcttccttcctttcttcctttcctcctttctttcttctctctttctttctttttttgcagtcaaaatcttgctgtgtcacccaagctgaagtgcagtggtgcattcatagttcaccaggctcaagcaatcctctcgcctcagcctcccaattagctgggactgcaggcaagcaccaccattcccacctaatagcacaattgttttaatagtccatttgggagggttacattaaggtttagtaataataatagggacaaaggcagatgtgagaaactttaatgaggcagaatcattgggaacttgatcattggtaggtggtaagtgtaaagaaaaggtcacaaatgacttctcattattgaaaggaacagaggccgctttgtgggaaaagataatgtattaagtttttgcatattgagtttgagatgcctacaggatacaaaggtaacataaccaatggcagtaaattaaatgatctagagagaacttggcaaacttttactataaaataccagatagtaaatatttcagtctttgcaggctatgtatggcctccctcactgctcagttctgtggttgtagcctagaagcatccatagataatatataaacaaatgagcatggctgtgtgccattaaaactttatgaatattggccaggcatggtggctcacgcctgtaatcccagcactttgggaggccgaggcaggtggatcaccaggtcaggagttcaagaccagcctgaccaacatggtgaaaccccacctctactaaaaatacaaaaactagtctggcgtagtggcgcgtgcatgcaatcccagctactcaggaggctaaagcaggagaatcgcttgaacctgggaggcagaggtttcagtgagctgagattgtgccactgcactccatcctgggacacagatggagactaggtctcaaaaacaaaaaacaaaaactttatgaatattaaaatttaaatgtcatataattt

SEQ ID NO: 33676 - DNA, 1027 bp, Homo sapiens
tcttcccaactttccttgacaattagcagcatttagattttcatgccaaaatcagggtaacaagcaatgtccatgggcaaggtgagaaaagtaacaattttttatttggtttgaaattattatttaggccaaaaattgtgaacctaaactgattggtgtttattttaccctttaagggaaaaacctatttatcgaccaataaagaaattacaatgctttctttcagttctttgtttaaaatgcactgtagtgccgtatgatttgcatgttaatgatgtgaatctaactgtataataaataggaagaggaagataaaacttgtttcaaagagcaggcttgttttacttgatttcctccttaaatgtttaacttgagaacgcatctatgaggtatgcttatgtgaaagctaataattagtgatcatcaaatggagtgtcaatgaagccagaagtttcattctcagatttctcagtcagaaagcaactggacactggaggcattgaacatcgttgaaaggcagatataatgtagtaaacaagaggcacacagaatttcttctgtgcagtataatctctgaaatcaaaaagcatgaagcctccacaatttctgtttctctctccaacttccctccctaacctaattcaagcgtgcaattgagatgctttgtattttgtgctttgcattagtttcctgatatgttgttacgcatgttctccttaagtaaaatagcaaaataaaaccaatttttaaatagtaatgtgtgatttgaggaagtgtgtcttagaagcactgaatcactagaaattgaaaaaagcataatctgtatttctgaaagccatccagtttccgtttatttacaacctttgagccatttcacaaattgaaaagcaaccatccagccatttcatgtttagattattatatatttaaaagatcctaagaccattatcagcatgcagtagccctctcactgaacaaagacagattagaggtaaatgaagaaattcctctaaatcattgtttctca

SEQ ID NO: 33677 - DNA, 1049 bp, Homo sapiens
aaattgcagagaactacacacatgcacacatgaatggagactttttgaaatggtgatgtattagtttgctaaggctgccataacaaagtaacaggcactggctggcttaaacaacagaaatttactgtctcaccattctggaggctaaaagtccaagcttcaactgtctgtaggtttggtttcttctgaggcctctctccttggtttgtagatgaccactgtctcattttgtcttcacgtggtcatcctgatatggtttggctctgtgtcaccacccaaatcttatctcaaattgtaatacccacatatcaggggagggacctggtacatgaccattaacttgggaggtgattggatcctgggaacagttcccccatactgttctcatgatagtgactgagttctcatgagacctgatgatgattttaaaagtgtttagcagttaccccttcactctctctcttgcttgctgtcatgttagacatgccttgcctccccttcaccttccgccatgattgtaagttcgctgaggcttccctagccatgtggaactgtgagtcagtttgaccaatttggtataaattacccaatctcaggaaatgtctttacagcagtgtggaaacagactaacccacatccttttgctgtgtaatctatgtcctaatctccccttcttatagggacaccaatcatataagattagggaccaaccatgtgacctcattttaccttagttacttttataaaagctctatgtctccaactaaagtcacattctgaagtactcaagattagaacttcaatgtatgaattttggggaaaggggagcataattgagcccataacaggtgaaaactgaataatgtctgcagtcaagttaatgatcatataatcagtgtttgttttttgggttttgtatattactatagctataaaagtcattgtcattgagggaagctggactatctttgcaacttcctgtaagtctataagtattttgaaataacatttttttgaacaagctattgtagtagaacagacatattagt

SEQ ID NO: 33678 - DNA, 1051 bp, Homo sapiens
ttattgcaaaaactgtaatcccaatgtaaatgtactttgtttcggctgacatgttctaatttgtaagcatgttgtaatttataagcaataaaccatacctatgtttatggattttgtatgacagagaacaaccttagaagcaagctctctagttttttgttttgttttgttttataagaaatgaaggaaagaaacaaagaaggcaggaggaaatatgaaaatgtttagctgtaaactttattctacatgtatacatttcacagcatttttaaaaaggccatctgcatttataaagagataccctcaagaaccaaattaatgggtatgagattggcagtttaaaaacaaaactttatcagttaatttgcaggtgaacataatatcaaggtgtttactttttttaaccaaaactcttaagttaggttgatataaatagtaaaaattgatttgtttgtttatgcctttccaatgatctgaatattcacatccgctatcctcggtagtacagaattgagaactggatttataattagaaagtgacttagtgagcataaaatcatagcaaaaggaattggatagccttggggcaaacttagtcagattatgaaaagcacaatacagtagactttttaatgaatggaaatatctctgtgtgccagctataatcatttgcttaattctggctggcaaattctttttcttgcagctatcccatttgtaaattctatacatgaatatcttgatatcctcaacaaatattagtgaacaaggcaaatataatacagtccctgtctaggattttactatctaggagaaaatattgatgaataaatgttagtacactaacacttcagaggaatgaaaatgcagttgagtagattcagctttctttggatatactctcgttctggaaatgtatactgatcactttgattggatttggtgtcttccaagtctcctgagcaacacaagaacacattacaaatgttccctataagtcagctaaatttgtagttggccaaacgtgtctattacgattatgcgtggtttc

SEQ ID NO: 33679 - DNA, 1048 bp, Homo sapiens
atttatactcctttgggtatatacccagtaatgggattgctgggtcaaatagtatttctggttctagatccttgaggaattgccatattgtcttccacaatggctgaactaatttacattcccaccaatagtgtaaaagtgttcctattgctccacagccttgccagcatctgtgttgtttcttgactttttaataattgccattctgactggcatgagatggtatctcattgtggttttaatttgtatttctctaatgatcagtgatgttgaactttttttcctatgtttgttggctgcgtaaatgtcgtctttggagaaatgtctgttcatatttacccacttttggatggggttgtttgtttttttcttgtaaatttgtttaagtttcatgtaaattctggatatttgactcttgtcagatgggtagattgcaaaatttctctcctaatctgtaggtcacctgttcacactgatgattgtttctttcactgtgcagaagctctttagtttaattagatctcatttgtcaactgtggcttttgttgcaattgcttttggtgttttcatcatgaagtctttgcccatgcttatgtcccaaacggtattgcctaggtttggttctggggtttttgtggttttgggttttatgtttaagtctttaacccatcttgagttaatttgtgtataaggtataaggaagggatccagtctcagttttctgcatatggctagtcagttttcccagcaccatttattgaataggagatactttccccattgtttgtttttgtcaggtttgtcaaaggtctgaaggttgtagatgtgtggtgttatttctgagatctctgttctgttccattggtctatatgtttgttttggtaccaataccatgctttttggttactgtagtattttagtgtagtttgaagtcaggtagcatgatgcttccagcttcattcttcttgcttaggattgtcttggctatacggggtcttctttgattccatatgaaattcaaagtagttttttctaattctgtgaaga

SEQ ID NO: 33680 - DNA, 1052 bp, Homo sapiens
tcatcaatgaatttctgttactctgataacttcggtaagtttgttgaccttttctagtagcagttatagattttagtcagggtttcctataaggaagaataactcaaagaaatgagaattaaggaactgacataagagtaagaaattgatagttggtcagctgaaaattgtagtactttagaaaatatacaaaaataagagctggctgccttttctgaccaagcttgtctaaaccaatatttagtacaataacaaaaaatcagagaaagaaagcagtttgggaacatttaattttaagcagatccatttttattcatgttcaccatgaattttccaacaccaccttaaatcatttttgaaacaaggcagggtagaaataaacaaacaattactaataattaatttcatcatgaaacaattagtaataatctcatcatgaaaagactgcaattaactacactaattttccccttagttttaatgtttctctttcactgactattgaagaacttactatgttagtatgttctaactctaactctgactctaactctaactcatgattatggccaagagaaaaaattcttaaaatctattttaaaatatttacgctaatatcagaaataattattcataggctcttattagaattttttctaagtattattttttttattctaatgatacactgtcatctataagccattattaatgttaaaggcagttttcaaagatagattatatttaagtatattagttttaatatctgtgttttaagaatcttccctaggttattattttgcagatctattgtaatgcagttttggtaaatatttaatttggttttatggcagttgactagtatcccatgtggtagagatttgactaaatcatttgttccttttcctagattgcctgtgctgttttcgctgccctgttacatttcttcttcttggctgccttcacctggatgttcctggagggggtgcagctttatatcatgctggtggaggtttttgagagtgaacattcacgtaggaaatacttttatc

SEQ ID NO: 33681 - DNA, 1049 bp, Homo sapiens
tggaagttggtgaaaagagaggtgaaaatcccatacagtatgaaaaagaatataacagaatttcacccagtcagagcatgtttggcaaggattacaaaaagttattaatttcttgacttattttacttaaattaaaagtttgtatattctcttagtggaaaaaagaaatcctgagagtaggtaatacagtccttaaagtacttcatctctttacattccaatgaccctactttatcagccccacagttataggttctaaggaattcaaggctcaatataagtagaaaatactggacctccaaaagtgaaccaggaaacattgtaaattttaatcataaatatcaataagtaaggtatgtcaacttgctaaaaatattttatggatcttgaagtgttactgactaaagtaagttttcactgattacaaaataaaaacaaatataaatgtgtatatacaggcatcttctcatttgtttcatttttcctattcaaatttcaaagttttgaaaagtcataagaaaaaaacattaaacgatcaaattctggaacttaaatttctaattgaatctttaggaacattccacatgtgatgttatgtcttatgctttatagtcaaatgattgcacttagtagaacattgccgtcatatagtggacttttcatcactaaggatataatatgagttaaacttagatttctcatgtaaactaaagtactttggttatctcttttaatgttcattaggaattttggaaatacttccatttcaattcagagtatgaaaattcatagcatttactaaacttaaactaataatctaaaagaaaatgctactttatataaactgaggccctttaaatgtatgtattaaagatcaactcagagacagtgtctccttcatcttctttgtatttacacttaatatataatttccaaaatactttaaaaaaaaacctaatacagaatcgtgtattttttcctacaaccccttttttgaggtccgaaggtcaatacacaacagcaattataatagcaaatatttatatagt

SEQ ID NO: 33682 - DNA, 1106 bp, Homo sapiens
atgtagtaaacattatgttgctacattgtagataatgcaggggatgatggccaagactaaaacgtaaaaatcctcttcacctcttgctcctccaaacttacttcctggtcctaatcacttataaaagttttataatatgcatcagtcacacaaacatatattcacagaaatgggtgtaactttttttaaactatggactgaaataatatcttttgactttctcgtaattgttttgtcatttatctttcatatattttattgatttttagatatatttgctttttattatataatatttgaaaaataaaaaagtgaaatatgtatatgaaatattgaaacattttaataagatgaacacctgtgaactcaacatccaacctaggaaatagaacattttcaatatgttttcctctttatttaacctccgtaaccaatccctatgccttcctccagaaaggctcctaaattttgtttttccattcccgcaacttattctaatcatttctctccttccaaaaaatcttgttcagcattcctttattaaacctttgtttaaaaatggtattttttgtgtgtagtcttctctgacttgggtttttcactcccatattctaaaacccttcctggttataagtgtggcctctgtgcaatatactatatactttttcctctgcctgcaatacttctcctttttctccttttcctcttaaactatatttggtatagtgcagtgagttgttaacctcctgcactcaggagccagatgactgcattccaatgctggttataaggtctgtgccatcagacatgttcattaaccactgtgcttcggtttttctagtgtatagtattacctacctcatggagttcttgtgaggttttgatgggtgaatataggaaaggtatatagtatggaaaagagagcatagaaaaaattaatttatatagatgtatatgcacacacatgcacatatataatatacatacactatgtatgtatatgccaagtatatgtacctcaatgaacaaaaaagacaaaaattctgttttcatagagcctcaagcctaatgcagacataagacattaaatattagacattaaatgg

SEQ ID NO: 33683 - DNA, 1035 bp, Homo sapiens
tttatgcttttgaaccattttctaattgaagagtttgttgttgctattagtttttttaatgttgacttttgagacttctttttgcatgctcgatactagttcttttttggattacaaatatttgtgaatttgttttacaaatctgtctctcagcctatagcttgtgttttcatcctctaatacatatatttaaatgaacatatacctgtcagttcaacatgactattctcatgcaatttgtattttgctttcctttgtgactttttctttctttattcatctaacacaaatacacaattctgtctattattttcataaatgtcctaagtatattaataaaacttctcctctgatctttgcttcttggttaaatggctttggaggatggaaagttgcaactcatgctgatggtgttagaaactaagaacaaaaagtattaacaaaagggtgaaagaatttaacattgtttcattgctatgtcaaattccaaacaaccagttggaaaatggaaaacggaaaatggaattatatatgtgtatattgcttgacatcataaagttaataatttatttaaaatatttaaaaatagcatctatatgttttttatcagatttgtaagatcaccaaattagtatgcttaccatggtgtactaatgagtgattatattttattttatttcatcttaaatgattcctcttcatagaatttcagaaatgtcaaattctgttgtgtcaacaactgctctccaaatgagtgttttatcataaatgttgccttttatccttttttactttcattggaaacaacccaatggtttctgtgaatgagggaatgttttgtttaatttttgcttttttgtgtgtgttttaaacttttttttggcttttgttttgtgttttgtgttttgtttgtatgaatgattagattttgctttttttcactttaattttaatttttagcaagcatgggaatatattcttgcatacaccttgggaaagataaaaccttaaatgtagcttaatcaacattgtaaa

SEQ ID NO: 33684 - DNA, 1052 bp, Homo sapiens
ttgtcctttccccttcagatggagacttcattatgttaatgaacaagatatgaagaaaatggcactcattgtggccttgttgaattatgttgtgtatgttttaacatctctgatgctgtgttactaaaattacaaggacctgctttttaaaaggccagaacaattgtctgaaattagtaacaatgctgcatctagattggagtgctgcacaaacaaacataagagcaaagcaaaactgtatcacatagggtttttggtcactcacaacctgaattcaccacagctggaatagctgtggaaaacaaaataaaacaacaaaattaataatgaaatggaggggaattctagaattatatgctaaatgcatattttatgatttgctgtattaactgatgataaaactaatggcagaaaaagaagttgagcaatttctatgtaatgtacagatactagcattgcacatatagtctgctttctgttcctccagaatttgagtcctgttaatgtagtagaaaaaaaaaaaagaaattttctttttcttttgtgctggtcttgcaagtttgtctaccagtaagagagcaaagtttccttcctttcttctctttcttcattttctttttttcttttttgccttttattcctttaaaatttcgcctggcaaaaaataaataaatggaactatcactttataagaatcattttctagtaatgcaaacaaattattttttacaaaaaaacaaaataaataaaattagacttccttccctcactatatatctttatgcagtcagaatatttccaacagtgttttttgcaaattagagcaggacaaacttttatgtttacagggcacgtctgttgtaatgcaaagcatatttggcaagcagttcatcaccaggacactagctatgattctagaagtcaaaaggtgtctatagaactagtggggcttctgcatgtgaaaaacggttttccataggcattaaagtgctgaatgctcagtctgatcaacaagtgggcacctgcactaccactttttagaggaaattcac

SEQ ID NO: 33685 - DNA, 1019 bp, Homo sapiens
tattatagtcaattcataaaattctacatacagttgtacatggtgggttatcaaagtactccataatccaaatgcatctaaaagtattccaaatgcgcctttcattctagaatactaaaggaaagcgtttgaaagaagaggaaagtaaagcagacttctaactatttaatttaaacattgccattcagattgaataatttttaaatgatgatgctccactctttgatctacagacaaggttacaaaagatttacaattagtccaaaatcagaggattttaaatcttaaaggagttaagtttgtctcaatgatccaagactacaaaatttcttgctacattggcaaggaaatatgtttaaagccgagaactaaaatagctttttaaaatttaaaaattcctctgtttcttctgaatgtaaaacaggcaaaatgatcctgacttcaaaatgaaatatattgattgctctcaaaagatgtttgacaaagttaagtcagtatcttcaatgctttaacagtaggtagaggtctttggggttggaactcaggatacagtgactaggacagagtgcattcttaggctaattagtgcctagtcctctggagtattttttaatgccctgaatttcaagttgtcaaactggtttacatattgaatgacattttgaatcaataaaaatgagaaaaaaacatttaaatttggttttcatgactcatttgagaataaagatttccttcatcaccctaagtaataaaagctgatatgtcttgaaacaactatagacaatcagaatgtgttcatttataaagtatcactggtttgtatattttaatgctgacctttgcctgtgaactagaaaatcaagatttgtagagtcaggttgatttgccttcatttaattcctgcaaatgcattggaagtggatggataacttggaactttttccatactgttttccccctcaccaagcattaaatctaattcaaaatatgtctttctaaaaaacaatagtttattttta

SEQ ID NO: 33686 - DNA, 1046 bp, Homo sapiens
gcggactatatattataatggtggatgattctgaaaatgaggctaggcagttaggcagagtcataccatgtaggaatgtatgtcatcctaaggaattgaactttatacttttaattaatgtgtggttattgcttttatttttataaataatagcttttgtgatgataaaaataatacattatcaataaaaataagattctcagtataatattttcacctatataagagtataaggaaaaagttaaaagttatctcaaatatacaactcagctacaccactgttaccaatttgagaactattctttccaatatttctctgagtaagcaacactaatacacacagacacacacacacacacacgcatgcataattgctccatatcctctttaatcttaaggagttttttaggtaagtactgtatttcatttgtgtgttatatattatatattaaagtaaatatgtatgctatatatcatattatatatttatttataatataaagattatatttatatgatttatatatgaatgtagattctagaagatacatgtgctatgattgagggtctgcaatctttcaccattattgctttatttattataccaaggaacatgacaaatgtttgcaatctgacttgaccatttttactgtctttgctgtgcttgtttttttattgtttttctttctttttttaaattctcggtttttgaattttcttttgaatatttgcattattacatttttaaattttagcatcctagtgaatatctaacaacagaatcattattatctgcaaatgaaactatttttctataaaatcgtcttgtataagatacatattttcccacagaggctacataatgtgtgcatgaagtttcagatatatttaataggctatacttggtcactctggagataatctgtaaaaataaggcatagttttttgctagcaaaaaacaaaatagaatgtgatcaacatttcaaaaggactcttacatgctctattcaagcactactgacagtaaaaatagcatggttaccagc

SEQ ID NO: 33687 - DNA, 1046 bp, Homo sapiens
ttaaaggaaactccagtctatttgaaggtaattgataatgccaggtaaaagctgtgaaaagcatggtgatcagggatatatcatatctgagtgactggccagaatatgatttcttctgttctttctgttattaaattaatggtttgagagagagcaaaaaaatacttggagagtttaaaaaatcttttcttcacagaaatgatatattactatgtttttatctattgccaaatgttgatataactttacaattactcttgaaacagcatatgggaacagtctgagagttattcttaaatgctgaaagttgcttttgagtaagtctacttaccaattccccatctttttcctaattatcattctattaaagcatctattcagggactgattcagttgtttattcatttaatcaatattcattttaacaacctactatgtaccagtctttaaacttaacaactgaagagtctcttgcatagaccactactgaaaattatctgaaatttgctccattcctatgagtttgggtgacactatgaacctacccacttttgatgtcttgtctgtctactattctgtccactactggggcttgtctagaaaatcagtttctgaatttgcaagggtgttcaactgcttgagatagttttaaaacagatttaaacacatgttgaagattactgagaaaagtttcaacttcgaaagctgtggttttatgaaaagagagttttatgtaataatgtgatgtattttttcttgattatagagttggcttaatattatttattctccattaataatacatatattttaaatgtttgaatctgtctccagaatgaaaagtggttttataatttctaaaaaacagttatgtacaaggaacactgaatgagctctaggcaggtgaagtattagaatgtgttgcatggaaaatttactaagaatacctggttataatggtctatagtttcagggtgctttggaggatatcacaggataattggttgagcccaggagtttgaggccagactggacaacatagtgag

SEQ ID NO: 33688 - DNA, 1126 bp, Homo sapiens
ccaggggtgtggggtaggttagtataacagtgtttctattattctctcaatttccaaatctctgcattaaatttctaggtgctttgtcaccttatcttaactatttcatcacttctgaaggtaaaactttgggttttgccacctgtcatgaccagaataaaagttccaccaggtaagaagatcacaaactcactcatcgtatacaatgcagtgtaattttttgtaagtcgataaagttaatcctcattatttacagatactatatttgcaaatttgcctactggctaatgtgcatttgtaattgcaatagctgtactcatgggctttggtgcttattcgcagacatgcacaaaatggtgaaaaatttgagtggcacatgttcccagatgagatagaaaaagacaatgttctcccttgtttagttctcatacaatgaacgagggtcgtttttacagtctatttacagccacatttttcacgtttgtactttttgttgacgattttgctgtttaaattgaccctgaagtgtagtactgaaatgctgtctgggttcctcagtacaagaaggctgtgctgtgccttacagagaaaacacgcatgtcagacatacccattcaggcatgagtagtagtgccgccagccataagttcaatattaatgaatcaatgacatagatttaatagggcatctttaaagagaaacacccataaaagaagattatttattgatcagttgatgaaaatactgtaactataagctagggggaatctaaccatgaatttcccccaagagcaatgattctgggttcattaattcagtgttctcagcaaagttatagaatataagtaccacgaataacaaatatcaactatacttctcaagctgttgtccatctttgaatatttttcagtgttctaaaattgttgtttatgatagtatggctagttatagtatactctttttttctacagtagattccctgaacttctcatgttgtcatttctgaaagtagagtatgctgcttatcttatattattttttcaatattaatatattttttggattttacagtttatctcatagcttcattttgttatattattagctatgaaaattacatgaaaag

SEQ ID NO: 33689 - DNA, 1042 bp, Homo sapiens
caggtttacacagtttattattttggcatctatgttcatgcataatatgtattttttataaaataattttgtatttggttagtattagagataatatttgatgtggctgttatttttaaataaatctggttgaattttttaaacggaaaatttacaactcaatgttgaaatcataaactttccaaaatataattaatttttaaacctacaaatacttagaagtatgttccatggtgggagttgtcttgttcagtaaaataagtcaggaatttgaaaagtacagggagagaggacaatgcgtaccatgcatacaatgtaggctgacgctcttaagttgctttgacaccctacaacaaatgaaaagcaggactgttcaccaaaaattgaaaaccatgcatgaaagtcagaatcctccttggttgcttacaaagacaaccttttttgcagctgtggtagagcagaaaaatgtaaagattaaactcagaatttaatatttagagtctctgagcttcagaaaccattgactctacagatgataaaaatgtgtagtgcaaaatatatgaccctgggtcaaaaagccaggcactctaacacatggcatgggaatatctggatgcataatgcataccactcaagatttcagctcctcacactcttttatatcccaaagaatttacagagttgatccaccattccctaacaagaattataactattcttgagtaaaaaggcaatgaagaggcctctctcccacaacataatatgatctgccccctgaagagtttttccaacttcttggttgatgctaattttagcttaatctatccaggcatatgcaggaaactgtcaatgctcaaaaggggctgcaaaagttagtcagcatattttatcaagaaatatgaaactttcagtatgactgggttatgaaaatgcttgatcaagatgcctgacatacaagactatacaagactgtaaagtagagttaattgatttggagatattattgataaacattatataatactataatatctttgtaaga

SEQ ID NO: 33690 - DNA, 1047 bp, Homo sapiens
gtaatcccagcactttgggaggccaagacaggcagatcacctgatgtcaggagttcgagaccagcctgaccaacatgttgcaaccccgtctctgctaaaattacaaaaattagttgggcatggtggcaggtgcctgtaatcccagctacttgggaggctgaggcaggagaatcacttgaacctgggaggtggaggttgcagtgagcggagattgtgccattgcactccagcctgggtgacagagcaagactctgtttaaaaaaaaataataaaatagcacgagaaagactggcacccatattcagttatctccactgggtccctcccacattgtgtgggaattctgggaaatacaattcaagttgagatttgggtgcagacacagacaaactgtatgaccaaccattatttccactacataatcttgttaaagattttgtgaattttaggaaattcaaaaattgaaatgatcaaattaaattatatactatacctctatattgctgttgtacctgactttatacaagtgatatcacatattctgaagaacttcaggaaaatcattaaatagaattctgagacagtaggtaagactgagcaccagcacccaggcaaaggcttcttattcttatcataagaagtagaaaaggaggatggacctgaaaggaagataaaagagattttattccatggcttctattttgtctgtgagtcacttacctgctgaagaccatagaaaatatttgttttattacaaaaaatagaaattttcttaatgttatattctttggaataatttaaatattattgagactatccggttttaaagattagctcaattgtcctgtgaaactaactgggactggtggtttggggggcaatttcttgacaaatttctcatcatttgagtaaattaatgtgtttcagtttactatttctattgtggttaatgttggaaaattttatttaacaaattaaatttaaattttctttttatctaggtttccatatatgtttacatagaattctatgtaacagctaccctta

SEQ ID NO: 33691 - DNA, 1027 bp, Homo sapiens
tgtccctgtacaactgctctaacagaagctctatcttccttgctagcttactccgctccagactcactggctttcggacgatcctctgagaagagaaagagtttccggttagaaccctgaacttgtttccttggcttaaaacgatgtttctattgttttccacacaggaaaaaatgcaaggcctccgttatatttttcagatctttgttcaaatgtcatctcagggatgccttctctgattttctattaaaattgactcatccctatgctagcattttctattcccttacctggtttatttttctacacaatacacatcatctaacaatgtatatattttgcctatttatttcataattatcagactccccaaataagaatgccatctccaagaaagtaggaaatttgttgttttttcatccctggtcatttgatcactggtctaaaaccaagcctgatacaatgtggtgctccgtcgatatgtgataaatggaaaaatgaatgtggaaaaatgaatgtggaaaaattatcagcatagggaaacttcaaggagcataataagaaacaaaaattgaaatggaggtaaagctatctagtattataaagattcaatctcttaatgaactttcctcacagttaaaccaaattttactcagttcatgtgcatcataggcttggttgttttgtttgtgtatgtgtgtgctttgtgggtttttctttaacaaaaccttgatacacaactaaacacacatttagtcttgttttttcagagtaaatgagaaaaaaatttccaaaaacaaattgccatttttaagatacttttaaaaagtcttataatacctccaaaactttaaaattttcatgatgattttacctgttacaaaaatattttaacacaagctttaagttagataacacttaatgataaaatattttactttataacaacatagaccactgacatgtgacataatttccagagcatatgatcagaattctaactactttatgcatactaaatatctgt

SEQ ID NO: 33692 - DNA, 1761 bp, Homo sapiens
catatagaccaatggagcaaaacagagacctcagaaataacacaacacatctacaaccatctgatctttgataaacctgacaaaaacaagcaatggggaaaggatctcctattcagtaaatggttctgagaaaactggctagccatatgctgaaaactgaaactggaccctttccttacaccgtacacaaaattaactcaagatggattaaagacttgatgtaaaatccaaaaccatagaaaccctggaagaaacctcaggcaacaccattaaggacataggcatgggaaagacttcatgaccaaaacaccaaaagcaattgcaacaaaagccaaaattgacaaatgggatctaattaaactaaagagcttctgcacagcaaaaggaactagcatcatagtgaacaggtaacctacagaatgggagaaagtttttacaatctacccacctgacaaaggtctgttatccagaatttacaaggaacataaacacatttacaagaaaaaaagtaaccccatcaaaaaatgggcaaaggatattaacagacacttcccaaagaagatatttacattgccaacaaacacatgaataaagctcaacatcagagaaatgcaaatgaaaaccatagtgagataccatctcacgccagtcagaatggcaattattagaaagtcaggaaacaatagatgctggcaaggctctggagaaaaaggaacgcttttacacttttggtgggaatgtaaattagtttagccattgtagaagacagtatggcaatttctcaaggatctagaaccaaaaataccatttgacccagcaatcccattacttagtgtatacacaaaggaatataaatcattctactctaaagacacatgcccatgtatgttaattgcagcactatttacaatagtaaagacctggaaccaacccaaatgcccatcaatgatagactggatagagaaaatatggtacatatacaccatagaatactatgcagccacaaaaaggaatgagatcatgtccttttcagggacacagaagaagctggaagccatggtcctcaccaaactaacacaggaacagaaaaccaaaccctgcatattctttctcataagtgagagctgatcattaagaacacatggacacagggaggggaacgtcacacaccagggcctgttgggggtggagggtgaggggagggaacttataggacgactcagtaggtgcagcaaaccaccaaggcacatgtatacctatgtaacaaacctgcatgttctgcacatgtatcctgtttttgttttgaagaaataaagaaaaaaataaggttaatcctaccttggggtttctaacatggtagtgacaggaacttccagatgggagaaacaaccccaggtaacagaacaatttattcagctattagtgcaaagaaagtgtatttaccactaccttgatttccacactcaattccaatcccaattgtagtagtatattcacattattgtgatactttttaaggtattccttcaattacacataatcaaaaataagagtcttcgtaattacagtattgggtaagaattaatactcatttgacaaaaataaaaaaaaaaaatgatgtacttccacttctgttaggtttggttttgaattggcccctagtttcattatccctttctttccatcaagatatatattttctattcatactagttgtttcatttgaaaaatcaggaaaatatttgtaaatcaataagattt

SEQ ID NO: 33693 - DNA, 1040 bp, Homo sapiens
ttgacacagcacatgtttcagggagcacagggttgggggtaaggttacagattaacagcatctcaaggcagaagaatttctcttaatacagaacaaaatggagtctcctatgtctacttctttctacacagacacagtaacaatctgatctctctttcttttccccacacatatttcttgtttttgtttttcctccgagaaagcatacaaacaatgatatcttggtaacaatgtatatccctggtgccaggtgttgttatttaaatactacttgccatagaaacaaggaaaaatgattccagggctgtgtaataaagtgttgagggactgacaggaacatgtcaaagaacacagaggctagcttgaagtgggcctcactgaccaaatcaatttgaacatcagatcaaaaaatgatagtaacgcgttgtaacccataagctaatataaaaatcagtaagtccataataatataaacataaacttaattaatagggaaagaaaaaaatttatttacaatagacttccaactaattaaccaataaatgtagacaacaggatgtagttaattaatcacaatttggcagtcatcagttataattgattcaatcaggaatcatcaatggaagctaaatacagtaagtaaaaatttgatgaggaacaaacaggatgttgatatagtatcacagtatctccccaccaattactcactaattgcaaggaataaaacagtatctttacagagataaacctgacaggcaccatttgaaaccagtgatcaaaattaacatcaccaataatgagacaaacttacattatgtattttcttatattatgcattggcaaattcacagcatcactgtacagcacttgtgccaaaaattgataacctgaattgttgggagcaagccctgcaaaatctggccataaactggccccaaaactggcaataaataaaatctctgcagcactgtaacatgtccataatgaccctaacgcccaagttggaaggttatgggtttgcgggaatgagggcaaggaac

SEQ ID NO: 33694 - DNA, 1051 bp, Homo sapiens
gtttaagacatagaccatacaagagaaacatttacagatgttttgtatccccgaaaggagacccccaataaatatttatccgagaacctacttatcaactgagactggggatacattgttaattcttgttggtaatgatgattatatactgatcagtagataacttttcaggttctctttgtataaaaaggctttggaagaattaaggaaggaagaccttaacgttagcatacacagagtggcacaggcttgtaataatagagcattgtaattacataattggaataatcaaaccggaagttttaagaaaagttagcaactgcagctctcaaagttattttggtagtatttttttcaagtaatgatcttcatcagttaaaaaaacaattctgtttttttatctcacctctgtagatgtttttatacagtgtcccggaaagaggcaactgagatgctccagaagaacccttctttgggaaatatgatcctgaggcctggtagtgacagtagaaactactccatcactattcggcaggagatagagtatgtttattttttttaaatgtatggaatttttaaaagcgtggtatcactaaatacaagtccagatcagcacctgctatgtgtttcgttggggctgaaaatatgaacacaagtggccgggtgcggtggctcacgcctgtaatctcaacacttcgggaggctgaggcagacggatcacaaggtcaggatatcgagactaccctggctaacacggtgaaaccccgtctttactaaaaatacaaaaaattagccaggcgtggtggcacgtgcctgtagtcccagctactcgggaggctgaggcgggggaattgcttgaacccaggaggcagaggttgcagtgagccgagatcacaccactgcactccagcctgggtgacagagtgagactcggtctcgaaaaaaaaaaaaaaaaaagaacacaagaatagggagggaatgtcataaaagcaatgctaaagactgagccaatgctaacatttgcagcagggaagaagaaagaataacacat

SEQ ID NO: 33695 - DNA, 1063 bp, Homo sapiens
caagtattgatactgggctttcttttccacaccaccaccactcctcacggtatagactgatgaaaatagggattttcacacagggtatcattcacatgggggctcaacactgttttaggatgatgactgttttcatgaatgataaatggatgatatgcaggtatctgaaaatggaaggacgtcactagacagaagaaaaacagcaatgggatatcttagtcagagatgagatttacttacttgaagagggagggatggctttcagacactgtatggatggaatacttgtgtctccccagattaatctgttgaagccctaacctctaatgtgatggtattataggaggtggggcctttgggaggtagtttcagatatggttgtgatggcaggcccctcatgatgggattagcatccttataaaaagagacaagagtgtgctctctctctctctctcccctcccttcccatgtgaagatacagcaaaaagacaacaatcttcaagccacaatggccctcaccagaacccagccatgtggtcagcctgatctcggacttcacagccagcagaactgtgagaattaaatcttatgtttaaatcacctagcctatggtattttaattatttatttatttttattatgctttaagttctagggtacatgtgcacaacgtgcaggtttgttacatatgtatacatgtgctgtgttggtttgctgcacctgttaactcgtcatttacgttaggtatttcacctaatgctatccctcctccatgaccccaccccacaacgggccccggtgtgtgatgttccccaacctatgtccacgtgttctcattgttcaatttccacctatgagtgagaacatgcggtgtttggttttctgtccttgcaatagtttactcagaatgatggtttccagcttcatccatgtccctaccaaggacatgaactcatcgttttttatggctgcatagtattccatggcgtatatgtgccacattttcttaatccagtctatcattgatggacatttgggttggttccaagtctttgctattgtg

SEQ ID NO: 33696 - DNA, 1051 bp, Homo sapiens
acaattggcacatttagtgatagataatggaaagttcaggagagaaactagtgatgaaggaatggattagagcatagcaagatacattctatcaggtgggttgaacatagtaattagcaatctataattagcaattttggtacatagactggcatatagtttgtagcaggaaagcctgccatcagttagcctgttctccccaattaacattggtttaagagcacacttcaggccaggcacggtggctcacacctgtaatgccagcactttgggaggccaaagctggtggaggtcaaaagtttgagaccatcttggacaacatggtgaaaacccgtctctactaaaaatacaaaaattagctgggcttggtggtgagcgcctgtaattccagctactagggaagctgaggcatgagaatcacttgaacctgggagacagaggttgcggtgagccgagatagtggccattgcactcctgcctaggagacaagagcgaaactccatctcaaaaaaacaaaacaaaacaacaacaaaaaaacagacttcagttccaagaattttagagagaaggcattaaaggcattagaatggcaagagtaaggcaggccttatcctagctttctggggagatcactgagatagtaaattcggcatagaaaataagatgtgaatcactttaccaggactggcatgttaatttgggaggtggtcttacaaataatgcaggggtttagttcctactataaggatccatgttttctgaggtctgaagtttttacatatgggtaggctttctataagtgggtatgaaaggaaatattttgctagacgaggtggcccatgcctgtaatcccagtactttgggaggctgaggtgggaggatcacttgaggccaggagttttgagaccagcctgggcaacataatgagaccctttctctacaagaataaaaataaaaaaattagccaggcataggagtgcacgcctgcagtcccagttacttaggaggctaaggcagaaggattgcttgagcttaggagttggaggttgca

SEQ ID NO: 33697 - DNA, 1054 bp, Homo sapiens
gaattgctaaaagaaattccatttttaactagttttataggctaagtaaaggaagagaaaccaagatagaatctccaatatctgatatattagattgactctgtggaacatttccttttttacaaggagtcctcaccttttattataataggacataaaataaatgattgtaatatcaaatatgaaatattgtctgttgagtggaatatctttaatttcaaagccatatttatcttttgtgccataaattttagtttatatattacattataatgtatagattatacattataatttatgaaccataatattcatatagaataattatttgtgttatgttttttattacatattgaaccttaagagagtttgttggtttgaaaacaataagcatattgaagcaatcttgtttcaatatttacatttttatgtttgcatataaatagatgaatagattatgttatatttttattgtaatagatttctttatatatatacaaagtcaactaggacttcttaacctttttttgtgctatgagctgctgtggcagtctggtccatccctctcaggactgtgtttttaaatgcataaaataatacaaataggactaaaataaaaaatacattgaaatatatatattttttgcatgaaatgtaggttaagaacccctgagtcaagatttcgaatagccctttagttaatgtgtaaaaaaaaaaaatgcctgaggcaattcctaagacagagagatccataatgagcacacaagaagaaccaagctgagatacattcgttaacacgtgtgtgataaagcccttagattgtatctgtacaagtgtgttatttttgattttaaatccagaagtaagaattatcagtttaggaataagtatatgatagagacttagaggacactggttttgtttcaacttatctacatccctgtgttatctacaagaactataaaatcttggaatgggtttatgtgccaacttgagcattttagcacactacagaattttagccttgtccaattcaactgtagaactgggccat

SEQ ID NO: 33698 - DNA, 1079 bp, Homo sapiens
caattctatccaggttgctgcaaatgccattattttgttccttttttatggctgagcagtattctatagtacatatataccacatttttttattcactcattgattgatgggcatttgggctggttctgtgtttttgcaattgcaaactgtgctgctatgaacattcctgtgcaagtatctttttcatataatgccttttttccctcctgggtagatacctagtagtgggattgctggatcaaacgatggttctacttttagttctttaaggaatctccacactgttttccatggtggttgtactagttaacattcccaccaacagtgtaaaagtgttcccttttcactgcatccctgccaacatctattattttttgattttttgattatggccattcttgcaggagtgaggtggtatcacattgtggttttgatttgcatttccctgatcattagtgatgttgagcattttcccctatgcttcttggccatttgtatatcttcttttgagaattgtctattcatgtccttagcccacttttcgatgggattgtttgttttcttcttgctgatttgtttgagttctttgtagattctgggtattagtcctttgtcagatggacagattgtgaagattttctcccactctgtgggccgtctgttaactctgctgattatttcttttgctgtgcagaagctttttagtttaatgaagtcccatctatttatctttgtttttgttgcatttggttttgggctcttggtcaggaagtctttgcctaagccagtgtcttaaagggtttttccaatgttatcttctagaatctttatggtttcaggtcttagatttcagtctttgatccatcttgagttgatttttgtgtaggatgagagatgaggatccagtttcattcttctacacatggctagccaattatcccagcaccatttgttgaataggatgtcctttccccactgtatgtttttgtttgctttgtgaattctgacttcaaaacaaaattatgttcactgagtatctctgccactaaggatagtaagtatcatatgtggatgaaag

SEQ ID NO: 33699 - DNA, 1051 bp, Homo sapiens
caagaaaccccaacaagtgcattcagctaattttatcttatgattcagacttttttcccacattacaaagtgagacttttagttttctgtaattctttgcaacctgaccttatttaaagttcagctttgaattagatccaacagaggctgtgagttaaagtctttggaaggcttacttcacgtagaacctgagaatcttatatttctttaaggttttagctacttccctctgcaccatcccagctggacttggaaccatatgacctgagttttactttctgctctgccctgggccacattttcgtcttaatatttcatgttttaaaggcataatgatgtcactgactggctgatgaaatcccaagcgtaggtagtatgctacatgaggggtgagttttttgctaacaccacaaaggtctctggcccaatgagtggagtttgataggagttcttgtgacaagtctaatgttattgcatgccagttttgaggagagatgaaaacatttgaaaagcagtgtgttttttttctacgtttgtctgtatttcttactcaggcctctcaggcattacttggcctttctgttttcacaccaacttggtgagttctactataagattctaaaaagatgggtagtgcgtggttcaaattggttcatttgtaactggaaaaaatttataattaaaaaaataaaatatgtttaaaaaagccataatgatgaaactttcaattagcaatgactttgaaacatagtactatgattgagttaatggctatcttatttaacacatgcttattttttaagcaactctttggtaaaataaactatagctggcattctctgtcataaaagataaagcagttatatccttcaatcagggaatttaatatttggtagtgcagatttaaaatgtatgtgacccaggtaatacaagatagaccaataaattttaagaaaggtataataaagtgtacacaaattcagaatcttacttgcccataaattaacttgctattgtcttagttccgtttattttgtgctccaaggccatg

SEQ ID NO: 33700 - DNA, 1073 bp, Homo sapiens
tttgtttttgtagagatggggtttcgctatgatgccctggctggtcttgaactcctggcttcaagagatcttcctgtcttggcctcccacagtgctgggattataggcatgaaacaccatacctggcctcactgcaggttttgattagtccccctggctgcatatttgggctcaaaaaaatgcttttcttcatgttactaagtagactgaaatttatctttgtggttacacattatatatcatttgttatttcttaaagtcatgtaggttagtctttcacagtacataccttcgatgtttaccattttgactgaagatataatgctaaagattttattaaataaaattaaacctttataaattaattaaagttaacttataatgagttgtatacacagacagtagttcttaaggtagacctgtacttcaatttttttaaacctttatacagatttcaagaaatatgaaaaatcaggactatctatttttatttggatattatatatgcttctcctataacacaagactttttttattttaagctttggaagcagtacaaaagactgttgtgatgaagagagaagaagacatgtagcaaatcgtatatttaggcaatcatgttgatatagtgaggaatggataatgtatgttataacatgtcttatgtttttgatgtgccatccatgtgtttctaatgggcccttttgaacacacactaacaggggtttaatatttaggattagcactttcagtttggaaagtttccagcttggttcttccaggcccttagataccttctaagggtctgcaatttgatggcacagctctgatgtttcattcagcagagaagactgtgggttccttcaagttcatgcccattgctttttttaagacctatcttaagaggcctcttttccagtaagctttccttcttatctccctcttttcagattatcacttagcttcatatttccttgccagtttgcacatagtagtttctgatacaaattacccatcacctaataatattaactcattcattcttaatgaattcacttttttctcctggaatt

SEQ ID NO: 33701 - DNA, 1020 bp, Homo sapiens
aatgtttttgtgaattttgtctcttgggttatttgggatatagtaataaatttgccaatctacatcagaaaactgataattctgggagtatcttttaaagtttcaaatttgttcactgcatataaaaatattaagtcataaaattaccataagaaaaatttgaaataatttgggatttcctaaaactttagttcagtaactaccctagtcttttaaatctttattccttctaaatttaacaaatacgtttgtaacagtcactgtaccatgaagtagtgcctataaatctgaaaaaactacttagaaattatcaaaaatttcataaaattcaaatagagatgtggtaaatatattaacatttcaaggataagcagattgatcagatactcataggtagggaaatgtaggaagagtccaggggaagagaacaatgctgtttatctgaagctcaaggtacatgctttgagaaataagactggattgatctgcctatggaaggctttgtgtgtgtgataaggaggtccagtttagagtaagagtctgagaagaaaattgatatggtcaggggcacacgagttcaaatctccattatttttctgggtgaactttttgagttaagttcccaacaactgttgtggtctgcgatgccccagtaacaaggcaggtttgaaacagattttagttatgctgaaatctaaaatccttcttttatgagcaatgtgaacttttctttttaccaataaggtaagtttatgcaacctactcgccactggtagcatatcaccctagtgttggcaatagtttagtcacctcaattaagaattcttgtaagttgcctacattaattttatttatgctactcattgtaattgatcattatttttgtgcattctgattccaacattcgagtgtaagctctttgaaggcagaggcaatactttgtttatactagtagcttctacaatatataacactgtgctcatactagatactcaataatctttatgaatgaataaatta

SEQ ID NO: 33702 - DNA, 1096 bp, Homo sapiens
atctcctaaacaaattcataaagtgatagggttgtaaatttgtgtgagttagagactcaacttaattttttgatacctagaccattcatctgcctgcaaaagcaaattttaacttttgtcgtatattaagatttcatcactcattttaattaataataaagattccccacaataaaccttggtgacttgattaaatatttggattatctaaaacctcagtaatttctattttcttccaggaaagttacctcataaaccagttcctccacctgacattggctgtcttcttttctgaaaaagtacattaaagatatttggctttgaggctctcatattctctcttggcttcctcctctcacctcaatgaccagctctaacttaatattcattccagatatgaatttaatatttatttttaaaaatgttagataaacaacttcttgtgctaggcactattctaagcttcagaaattagctgggactaagattcacagttgccatatgggtcttgcagtttagatgtagaaacaggcactgaacaaataattacaacttccatgtctagcaatatggaagcctaaataattttagaaaacactttctgcataaaacaaatagaaaggatagataatatataataaattccatttcaaatgcaagactgggttcatagaaaagtaaggaaaatcctggaagaccaaaaacaaagaagaatgtgaatagtatgtggtgagactagaatattccacaggcttatgtttagcatttacatagagactggagatgggaccttgggccagtgcaaaataggaagttgaacttgaggttttagaaaaaggccaggagtctcaaagaactaaacacccaataacagcatgaactagaatgaaaaaaatgctcgtcatgtcataaaaaaataaatttatctgtttccgagatccagctttaaattaagaaaaaagaaaaagaagtatcacctgaaaattcataagcatgggcctggctgcacgatgtctgaatcttcattaatactacctgaatactcccagaacctttttttttttaattttattattattatactttaagttttagg

SEQ ID NO: 33703 - DNA, 1042 bp, Homo sapiens
agataatggaggtgctcaccatatgaaagctataaatgttgtttaaatgcaagtatttatatttgttataaatgtaaattttaaaattgggtaataattggattttgcaagtgtggctaaatataattttgtggcttatgacatgcaggtagttggaggcaaaggtacaagtacattctatcatttttcaaaggcatttgtctattcagaaggcatgatgtagtagaaacagtattctccttggagttagagtacactttaagtaaaatcttgactcttctctttactacccagcaaggtcaggaaaattatttatctctgtaagcctgagagtttttttaacatgtaaaaattgagttaaaataccattctcatagagttgcaaaaactacatttagtcaaatcaaatcaaatgaactaataaatgtaaagcacttgtcatgttcagtagttcgtagagtacttgttcccaaggcagtgtgtgtgtgtgtgtgtgtgtttgtgtgtgtgtgtgtaggggagagctcatacaatttgaaactggtcctggatgtttccaaaatactgcccccacccccgccccgcttagattggcatgttcttttgcttctacaaattggtcttattcctaaagcattcatacaaacatggtttaagaaatacaacactcattacaacctgtgatggctttcatgttgacagttattttcttatgttttctacaagtaatttttttttacctgcacttaaccataggaggccaaagaaacatcttgactagaggcattctttaatcttgttaaagaaagaagtgtggttactgtagccttgtagtatagtttgaagtcaggtagtgtgatgcctccagctttgttcttttggcttaggattgacttggcgatgcgggctcttttttggttccatatgaactttaaagtagttttttccaattctgtgaagaaagtcattggtagcttgatggggatggcattgaatctgtaaattaccttgggcagtatggccattttcacgatattgattc

SEQ ID NO: 33704 - DNA, 1025 bp, Homo sapiens
tctggtatccattgaaatttgtaggagaaatctatacttgtctgttggaagaagatgctgtgcaaacagcttagcggacgagggtaaacaagtttctctctagctggctgccttagaatttttaatatgacactataaggaagaatttccaagaaacgagtatcaaagccagaatttttaagatgtgtttgactatagaaaccttttttaattggagccttttaagaaattagagatttaaatttgattcttagctccttttaattactgaattcctcaactctttttgtgtgaatttcacttctataaaggtgaatttgcgtacgtcactggaatataaaaagaaattagttacttaaggtaaaggccatagagatagaccttgataaaggtttgttctccttaattgagggaagtgataatggtataatgggctaagggtgaacaaaaaaaaagagaaaagtggaacaatgtacacatagtttcagtgatgttttcctagactgtgatttttaaagcattaatggtaaaatgactctaacaacttcaaagttggcttgccattttcccaaatgcccataggaaaaaaagctaacaaaaattgtatatcaccatatatagaaactatcaataaaagtatggcaacacatgaatttgtgttttaggaaggtcccacccagaaaaacaattattgctaaacccctagtattttcacttgcttagtcatggaggcagtgcctgggtgggattaactctctgttagttgtaaatgcttgcctatattttgggatgagtgccaatcaattactgtcgggaaaaccactggatgactaacttcagacatgcttacgttagagactaatacaccttgaaatgtcacatctttaacttgaattttttcatctgaattctagctattatttgaaatggaaataatgacaaataaatttgagattcgtcaaaacatggacctaatagacaacttcatatcacatagaaggggacctccttaccattaacttgaa

SEQ ID NO: 33705 - DNA, 1055 bp, Homo sapiens
tcttggagctgatagaagacctgaaagtcaagttgacagaggttaaggatgagctggagccattgttagagttggtggaacaagggatcattccacccggaaaaggaagccaatacttgaggaccaagtacaacctctacttgaattattgctcgaacatcagtttttatttgatcctgaaagctaggagagtcccagcacatggacatcctgtcatagaaaggcttgttacctaccgaaatttgatcaacaagctgtccgttgtggatcagaagctgtcctcagaaattcgtcatctgttgacacttaaggatgatgctgtaaagaaagaactgattccaaaagcaaaatccaccaagcccaaaccaaagtctgtttcaaagacttctgctgctgcctgtgctgttacagatctttctgatgattctgattttgatgaaaaagcaaaactgaagtactataaagaaatagaagacaggcaaaagctaaagagaaagaaagaagaaaatagcactgaagaacaggctcttgaagatcaaaatgcaaagagagctattacctatcaaattgctaaaaataggggacttactcctaggagaaagaagattgatcgcaatcccagagtgaaacacagagagaagttcagaagagccaaaattagaagaagaggccaggttcgtgaagttcgtaaagaagagcaacgttatagtggtgaattatctggcattcgtgcaggagttaaaaagagcattaagcttaaatgaagtttttgcttagcataaggtttttggcagttttggatcaataaatttttacttttaactaaagtcattgtattaatatataatactttaaattttaaaaattcttgtccacaaggaaatttgtctgggttattggacaatttataagaactatgggagcaatatgaaggtgcttgagaaaagagatgatgttgaagttttccaatattctgttgaagttttccaatattaagtattagcttagggaaatttcacagttcattgtggagtgttaaacttagaacatgtgta

SEQ ID NO: 33706 - DNA, 1066 bp, Homo sapiens
ataatctttttttgtaaaaactcactttgtgaagactggagagcttcatgggtaagagttccaataaagtacattactggtagcaggcatcagtacaaagcatcaacaacctgttagttttatggcagtatattaaactatagacagctatgaaaaatacaaaatattaaaaattaaagtagaagaaaacatcaaattagtgatccactaaatagctagtgatgcatttactctgccactaatcagctgactggctttgggccaatttctctaagccagtttcttacctatattcttacctatgaagaagttaaataagatcaacatgccactttaatttttgtgtagaagtaaattttattcgcttctcagacctctaagaactacctaatggtcaaagtttttggcaaactggaaaattactttttgtgatctaaaagataaaatctagcttagataacttgaataattaatttgattcacgtatcttacacaaaatatttgatatatctgaggaatggctggagttgctatgaaataaaataattttaagttaacgtgttaaattatacaagttaacattaccagaataattcaagaaaagtggaacttagtatgctttacatcttggagatcacaatgatgaacaggtactgaacaggaacactgaattatagatgttaccaaaaaaaatcatgtttctaactagaatttaaaatcacactgggccgggcgcggtggctgatgcctgtaatcccagcactttgggaggctgaggcaggcagatcacaaggtcaggagttcaagaccaacgtggccaacatggtgaaaccccatctctactaaaaatacaaaaattagccaggcgtgatggcccacgcctgtagtcccagctactcaggagaccaaggcaggagaatcgcttgaacccgggcggcagaggttgtggtgagctgagatcgtaccactgcactccagcctgggcaacagagcaagactgtctcaaacaacaacaacaaaaatcacactgaaaaaaaaagctgcttcagctaatcagattgtattt

SEQ ID NO: 33707 - DNA, 1006 bp, Homo sapiens
ggcgcccggtgaggaggcagcgggacgaccgcggttcgggcgccggattctacctccgcgtctccccaggccgcggctcctgcctggcctggtctctctcccgtcttgggctgggcgctggtcttcgccggcctcccacgtgcttgggcgggggcgagaagcggcctgcctgcccccctccacccggggcgccctggccctgtcccgggtcccgggctgggaaccttccccgaaggagtctaagagggggcggcgcccggagaccccgtggcccctctgacccgcctttttcgggctcccggcgccgcggcagctgagtaggtgtggctgctgcgccgccgccgccgccagtgcggccttagtaatactagtaactaattttttacgagcgttccttccatgccggtaaatatgacagatccgtcccccggattggaaagagaaatcggagcggtgcatgagaagacaagaagggaatgtgtggctttggaaggctacctcccagggttatatcggttgtcgggaagaggcctccacttttaaagccactggcacacgcgagcgctctgaatgcagctgacccacactccgtgctgtattttttattagtgaactgtttactgtgctggcaaacgagtagggccctagagtcgtcaatgaatataaggactcttagaggaatgttaaatctgattttcaaatacaagctcttacagtatgaaaatgtggctgacgatacaaggcatgctgtaagcgccaaatactttgctgtatgagttctggaaagggagacagaaacttgcctgaagcgatgagggaaggacctttcccaccatacaccctatatttttaaagcacaagtacaaatcttttagctgctctgccctgccaagaaaccctgactcaccttttctgccccgatccatctcctaggaaaagataatatttattgattatttcctatgtgcatgtgttgtgataatcatggttaataagtttgtgtgcg

SEQ ID NO: 33708 - DNA, 1046 bp, Homo sapiens
tttttctacccaagacagttttagaaaaattgttatgtgtataacttgaatatttaaccaatttttagtttttaatttttatacacattgccaaactactttaaacaattaaaacaaattttgaatagcatggtatcataaactttcatattagctactcatcaaagcttggttttgtctttcctgcttgcagttggttgcgtttttctcatgctgtattaacatctgaagtttccaaaagatacagttgtggttttcaagacagttggttcagcagctgaaaacctcatgatattactttctctactttttttttttaagctaacagtagtgtcctaagcaaaagagagtttttactgttaattgtgcaatgagaaactgcatgtttttctaagattgctagaatttgctttttgggatgaaaaagctgcatgctgggatttcctttttctttcttatacagatataaaactaagagtgtatgtgagatgtactacattttgtctgagaatcccacagtgtccagtcctgtggacagcagcttcccagctaaagtatcttagagacattatctctgccagcatagccattccagcatgagagcaaagggtctactggtcagggctttctttcctcatccgctcaccccccatcaggctcagccctccttagcgttctagtgtcacctagctgctcacctaagaatctgttttatcttcacttatgtcactaatattaattcctcttttttttttttttttttgagatagggtcttgctctgtcaaccaggctggagtgcagtggtaccatctcagctcactgcaatctccacctggattcaagcaattctcctgcctcagcctcctgagtagctgggattgcaggcacacaccaccacgcctggctaatttttgtatttttagtagagacagggttacaccatgttgccaggctggtctcgaactcctgacttcaagtgatctgcctgcttaggcttcccaaagtgctgggattacagacaggagccaccatgcccagcctatta

SEQ ID NO: 33709 - DNA, 1087 bp, Homo sapiens
cccagctaacttttgtacttttagtagagatggggcttccccatgttggccaggctggtctcgaactcctgacctcaggtaatccacctgcctcggcctcccaaagtgctgggattacaggtgtgagccaccaagcctggctggttaatttttttgactaacccctttaacagatttcaatccagagaaaatgttacttaagtaaattttcttattattgagtagaaatatgatacctgagacgccattaagaatagatagatatagttatggatatagatatatagatattctaagggtcctaagactctattataatttttttttttttttgtaaatgaggatagaataaaagttcatgattgtctcatacaaataagtgtcatcaggctaactaaatggtgttttattacaaggtctttttcagtactttcacttctttctttcacaattaaggactcattttctgtccagttttatacgctaaggtctttttagtactttcacttctttctttcacaatcaaggactcattttctgtccagttttatactctaagaacaattattgcaaaagttcaaaatagatttatttaaaattattgttcttcagtcattcccaacatagagtaagcttttctttctatatgtttctgttagtttgttgtttttaatctcatattaaagcttttttttttttctttttttcttgagacgggggtatcactctatctcccaggctggaatgcagtggtgtgatcttggctcactgcaacctccgcttcccgggttgaagcgattctcctgcctcagtctccctagtagctgggattacaggcgcctgccaccatgcccagctaatttttgtatttttagtaaagacgaggtttcactgtgttggctaggctggtctcaaacttttgacctcagatgatcctccctgagccaccgcgtgagccaccagcgtgagccactgcgcccagccaaaagcttttacacatctttgaaaagtcttctgtgtgataaccattttgtttcttatataagataaaagctttaatctgttagataataagaaaattctgaag

SEQ ID NO: 33710 - DNA, 1050 bp, Homo sapiens
gtataaaggtcaaaactaggtaaaatcaatctatggtgatagaaatcaggataatagttaccttgaagaggtgggggtagagattggaagagagaaagaatccgatttctaggatttcagtactgttctctttcctgatcatgatagtgattacacagatagatgtgttttttgtgaaagttcatggaactaacagttagctgagatttggaaatgtgtgaatgttggaattcagccatattccacttctgaacagttcataaggttaggcttttgggacaataaactgtcaaagaaccttgttcattccagttctactcagtttccttcagaggctatcaaagaacaaaaatagcatgtgatcagtttttgagagaaacagtaaatttgcagctcattcacttgctgtttttgtgctattttgtcatttgttaatatcttttttttttttttttgagacagagtctcactctgtcaccaggctgtaggctgtagtgcagtggcgctatctccactcactgccacctccgcctcccgggttcaagcgattctcctgccacagcctcctgagtagctgggactacaggcgcacaccaccacacccagctaatttttgtatttttagtagagacggggtttcaccgtgttggccaggatggtctcgatctcttgatctcgtgatccacccaccttggcctcccaaagtgctgggattacaggcgtgagcccagcctattaatatcttttatagtgaatcagaaaagaaataaggaactaatatcagtgaattatattgattgttaacagtgattgaggttgacctttacccccaggtaacttgttgaaaacaaattgattgcagtgttgttttaatcatgatgtcaaattgactgaaaatgaataattcaggtcactgggttttcgtgttttgttttgttttgctttaagagactcgcgctctgtcacccaggttggagtgcagtggtgcaatcacggctcactgcagcttccacctcccaggttcaatcgattctcctgcctcagcctccc

SEQ ID NO: 33711 - DNA, 1034 bp, Homo sapiens
tcaagcagtcctcccgccttggtctccccaagtgctgggattacaggtgcgaaccaccatgccgagctaccaaacaaatgttttaagatgcataaaagattgcaaaattatctgatggtgcatcacaagtacaaatatgtcagaaaagtctgaatacctgcttcaaccacaatactgttcagtcacgtctttctgccagcctattatttaaagaatctattcatgcgcctattatttttttcttttaaaaaattttttctccagtgccacttgccaacatccacctattattctaaaagtaaaatatttactaaagcctttctttttgtagttttttttttactatttttgtagatggctataatcaaccatgatgactatgattcaaccatgaatcaaccatttttgtccttgtctctggatttttgagatttttgttacaataaggaattctgtggatttctcttacagtgaattctacgaacccaatgccctcatgatggaagaagaaggagccataattgctggtctgttggtgggtctgaatgtcattgatgccaatttctgtatgaaaggagaagacttggactctcaggtatgggaaagagactcattcccatgggtgtcactctgagttctgctatctcagaagtggatttgattaggttataccaaccaaattaggccatattctatgagtcataaacaggatttccttccattttgatgggaatataaaaaaaagattgtttttccttccagtttggctcatttatacgttacgaatgttttttagattcttgtcttggctgtactctctgttaaacatacatatacacacacacacatacacatttacatacacatacatacacacacaaacacaggtatacccagagatattgcaggtttggtttcagatcacaacaataaagcaaatatcataataaagcaagtcacatgcattttttggtttcccagtacatgtaaaagtttgtttatactaggccaggtgcgattgttcacacctgtaa

SEQ ID NO: 33712 - DNA, 1068 bp, Homo sapiens
tccctcctcccatctgatcctccagaatcacactttaattacaagaggaaagaatcacatctcattttgatgctagctgccagtaaactactttcagaatcagacaaccatgggatcctgtattgctgttctagaaaaccatggccacttttcacattatagtagaggatgagggtcttttttatcctatagggtaatttctactctgcagtctaccgtgccagctaagttatatattctattagcttttacactggaatgtgatacattgatgaactattactgtgatcacactgcatataacaatactaactttagataaattgcttttttttccatttcaggattaactgatattgaaatatatgaacatttctgttttcccacttaccattagattcaaaaggcatgtgtggttgtattttaggatttatgttatacaggttgtttatcgttattttccataacagagttcagacttaggagtaaaacagaaaagtgaactaaacagtcgcttggaagagaagactaatcagatggctgctaccattaaacaacttgaacaaaggtaaaagtcctgtttctttaatgaaacactttggattgtcagtgctgaagtgaaaagaatgtgctgtacattcggcaaatagaaaatacatgaaattcttccaaattagcatcagacattctggtagaaaaaagccagttgaatgttatgtgtgttttctaaggtatgactgaaatgtttttaggaaatgtcaatcacttgactagcctttaaaaaaaaaaaagaaaggtcagccttttatgactgttttgaacatcagaactcttaatccatgtcagagtcatgtgttagaggaaggatacttaaaagcatggaaggactcttaaatgtatgtatgtaattctgtgattttattgttcatcactgaagtctttgaatacttggatgctaggggatatagaggcactgagagataggtgtcctccaaggatctattctggatctttctctcccttctttaacccttttctcttatctcccttttctttctcctgggtagt

SEQ ID NO: 33713 - DNA, 1027 bp, Homo sapiens
gtttgttcttgcttcaattttagcagaattcatattactctgataggggctcttttttcttttcttttcttttcttttttttttttttgaaacagagtctcattctcacctagaactgagtacagtggcacaatcatgcctcactgcagcctcgatttcccaggctcaggtgatcctcctgcctcagcctcctgagtagctgggactgtaggcacacaccacaaaactcagctaatttttgtatttttttggtagagtcagggttttgccatgttgtccaggctggtcttcaactcctgggctcaagcgatatgcctgcctcagcctcccaaagtgctaggatgacaggcatgagccaccgtgcccagcccggggttcttttcaaactgatgtcttatcctttttagtgactcaaaccaaatcctgattagatatattaaaataagttaatacaagtttattttggtgcgaaatatttttgaagtccatgcacagtcttttcgtaatacgcgttttccatgaactttttgaatacctctagtatataacaaagcaggaagagttcataaactatttaaaatttctagagagtgagctgctaatttactggcaaatagaaaacaatggtatgtggaaatttattaaatagtaccactactaataatttaaagtgtacaaagaaccactctaggccaggcacggtggctcacacctgtaatcccagcactttgggaggccaaggtgggcagatcatgaggtcaagagttcaagaccagcctggacaacatggtgaaaccctgtctctactaaaaatacaaaaataagccgggcatggtggtagtctcctataatcccagctactcgggaggctgaggcaggagaattggttgaacccgggaggcggaggttgcagtgagccaagactgagccactgcactccagcctgggtgacagatcaagactccatctcaaaaaaataaaaaaataataaaaaaaaacactctgtgtagcatgctatctttattat

SEQ ID NO: 33714 - DNA, 1013 bp, Homo sapiens
tacggaaacttcacagggacctcatttaattttgtggactcaaatcttttaaacacatccttagcacctgctgtgtgccaggcgtagaggaagataagagattccagagatggtggatggtatatcgtcatctatgatagatgcaatacaatcatgggggcccaaagtatgtgtagcaatttgttctacttaggctttaggaaagtttcatgaaagaagtgggtgataattaatggaaggtgaacaagagctctctaagaagacaaggggaaatgggagagtacagtcagaggaaacatctttgagtcaagaaattgcctgtgaattgttcacttccacgtttgtgcaagaggctgtagaattttggagctagcaggggtctattagtaacatggcctacttacttctttttgctaaaggggcaaaatcaccaacttgaggttggtggcccaattattggcctggggacagttggaactcaggtctcctgacgtaggtgtttttccttcctgacattttgtgcatataaaaggcagggaaattgaggataaaagtgagttctaagtaatcattcaaaaagtatatttcatgttctcttaagtttctagcatttttaaattatgggtctcttttgactaatggaattctgaaaaaaaaaaatttgacttggaaaagaccaaagtgtaatttcctaatgtaaggctacttatttggaacggagttaaaacaagtacatttaatttaactttttcttgttaagagacagggtcaccgaggacggtggtggctcatgcctataaccccagcactttgggagactgagggggtggaaccttgagcccaggagtttgagaacagcctgggtaacatggcagaacccccatctctaccaaaaaacattagccaggtgtggtggcgctcagctgcttaggaggctgaagtgggtggattgcttgaacccaggaggcagaaattgcagtgagccaagattgcaccactgcactccagcctgg

SEQ ID NO: 33715 - DNA, 1061 bp, Homo sapiens
ttttacttgtaaatttttttttgccagagaatagatttctgcaacatcattttgaatggctgatgaccaagtattatcttacagttttttatctgacaacaaaaaaggatatcagatattatatccttataatatattctccactgtaaggttattttatttttttctttttgttattaaatatatagaatttaatataacattaaaaaggataacatcttacatatatgtcatatattatatccttatatataatatatgttatcctttttaatatgttgtatttttgagggaatgtggggagtggaagtaaatatggtcatcttttcagaaagaactgtagttttgggaattgcaggactgactggctttagtttacttttatcatgtttagagatagcttttttttcctttacatactagagtgcaaaataattgccatttggttacttttaccattattgatttctttctctaagtgtagttgcagtttttgtactttcggagtttctgatatatgaaagcacgtgtctaatacatgtagcacttccctaaactgtgtatttgattaggagatattgaggcaaaatagctacatgttacttgaaaaatatgaaacagttctacctgttaggaatgtcaaactgagtcctgtagagaactttaactctccttttcttcctacgtttccatttttgttttatattaaccaacttaaggccatctttttttttttttttttgagacagggtctcattctgtctcccaggctggagtgcaaaggcactatcttgactcactgcaacctctgcctcctgggttcaagtgattctccagcctcaacctcccgagtagctgggactacagtcgcctaccaccatgctgagctaagttttgtatttttagtagagacagggtttcaccatgtaggccaggctggtcttgaactcctggtctcaagtgatctacctacctcagcctcccaaagtgctgggattacaggcgtgagccaccgtgcccagccttaggtccatcttttacaacacatttaattaagtata

SEQ ID NO: 33716 - DNA, 1106 bp, Homo sapiens
atttaattttattattttatttttggagataaggtcttgctctgtggctgagtctgtagcacagtggcccaacaactgcttattgtggcctccacctcctgggctcagatgatcctcttacctcagcctcctgagtagctgggaccacaggtacacgtcaccacaccaagctaattttttttttttttttgagatggagtctcactctgtcgcccaggctggagtgcagtggcgcgatcttggctcactgcaagctccgcctcctgggtttacgccattctcctgcctcagcctcccgagtagctgggactacaggcacccgccactgcgcccagctaattttttgtatttttagtagagacggggtttcgccgtggtctcgatctcctgaccttgtgatccgcccgcctcggcctcccttaatacagccactgcgcccagccttaatttttaaaattttttgtagagacagcgtctccctatgttgcccagggtggtcttgaagtcctgggcttgagcaattcacccgtctcagcctcccaaagtgttggaattacaggcatgagccaccgtgcctggccagaatgaagttttaaaatttaaaatttagatttaaaatgaagttttaacaatttactagaaaaataatgcttttttcgaaattagcatatagtatagtctataagggtggatttcacaaactgagatatttaactcagtgtatatcttgtttcttagtttttttttgatattttactacaggcaataaactgataatttagtgtacataaacatgtttgggaggcagatggcatatgtggagctctaaaaataactaaattctgggggtagatttaaagttacttttcacttacttctcttaattcttttattgcttttctcatggagtctgttagaaagctatgccagggtttttagtttctgattatttcaggatgaagagtttttttcttttagtaactctttccccaaagtatgagtaaacagtcgtgtccaattgctagtgcatgtgaagaatatgcttttatggcatgcttgttatttttgagtatttacaagttgaactattaagagtaatttatatg

SEQ ID NO: 33717 - DNA, 1045 bp, Homo sapiens
tgatgataaggactgactttttgtttctaaattttattagtttccaagttgatggtatgcaagtctaaaatggatttgaaaagttgtgccttggatttgcttcagttaacaggccatatggagggactggataatgaatctgactagtttggcagatctgtggatgaactggttctcctgggcattttagtacttctcctactgcagtctgccctggatctttattagcggactctggtgcaggaatgggttttgaatatcacatctgttttttgtccttttgttttttttaaaaccacattctaaataagttttaagttaaggactatccatcatgtctgagggaaaaatatgtcacaaagaatgtttctgtgccagagggccattagtctttggtctgacttcctagttaacttcctctttttttagtcttcaaataactggccttagaaatgcagactaagagcagtgacagtattctcaccatgctctaataataagagaaataacaggcaaaaatgaaaaagaggtggaaataaaagagctgaccagttttttattgttgctattattgttgttggaggttgagaaggggagatggtcatcaggagaataaacaattaaacatcttgaattcgtgttgtttttgtatatctacaggcatatatttataaatgcctttgccacttcccctgttctcttaagaaatttgtatccatcttccccctgtacacactcctcacactgaaggcacacattttacctatataaacatactttaggagattgtaacttgccaaaactgttgctctcaacagttactttactgtggtatcccatgtccagaactcaggaacaaagaaaatgttgtcctaaagtttgcatctgtgtttggtttaggcagaacatgattgctaaagttcaggttgtggtggtttaagagagtatattctccctccagaagggttaattttactggactcagtgatcttacactgtgtttcccaactcctagcaaatagcaagggattgatacatagcattt

SEQ ID NO: 33718 - DNA, 1050 bp, Homo sapiens
ataactagcatgcaggtgatcctattattattaacatattcttttatcaggccgtttattgtaatctggtcatgtcttcatgatgttacaatttgattacctttgttagagtttggtgcacattcttggaaggtagcttcagcttttttgtgtgtattggggactgctccgttgttaattctctgtacttctgtacagagggggtagtatttttgagatatagttgtggaatatgaggatggttgggtgggtggcttccctgtatctttggatattttcttccactaaactcaagaagtgagattttatttcttcatccagtagtccttcttccccagactcatccttgatctattccttgaggttatagtatgaatcacccactattcaaatgtcaatttttcttagaatgctgttagtgatgagaagtgactgttttcagacctaaccttggcaaggtcagtcctactttgatgttcttgtttcatcacacttcttggcatttgtagatttggaagaattgggcctttggtacctctgatctcttcgtttagcaacttactgtgcacccatatgcttagcttttgctgttttagctttttttttttttttttaacctgccacctagtggccgaaatgttgctatactattgataaggtactcctaattttggcaaaatagtaagaggcaaagcaccaaagattatgttctctcccttctccaaatctctcttggtgagaatgatctttaaaacataccactcagattattagcaatcttggtatggaacgtttttaaaaataataataatgtactttatgtggtgatttatgttattatttaggcccaaagttttgatttaattgtttccttttagcttatttttgagatatgcagtctgttaggaagctgtctctgtcttgttttttcattgagctgaattcttttggaggatcactattattgtgaagtactattttacttttaattaaaaaaattaagatatttttatttttaatttacagataaaaattatatttaattttata

SEQ ID NO: 33719 - DNA, 1034 bp, Homo sapiens
ttaaagaaatgcacactagctggtgaatcatgtaaataaacaggattccttgcctgcctctgtgagcgctgtagacctcatatgaggactgctattgttagaggagaagcgtcctgagagactctgctggacttaagtgtggcgagatacatatctgtttcttggagtttctttgtgtttatttaaaataatatgaatgaaatctaagaccagagttgatagataagattgggagtggaaagaacaaactgagaagaggaaaatctaatgatgattaacatttctaagtgtttttttcttgattgctaaatgaaggaatcagaatgcatgatttgatgggacaaaggaagctataagcagaacatggatctcagttgatgctgtttccaaggacaacctgtgacttatgaaatttatgtatttttagggagtcatttagcaaaatggataaagaacatccaggaagctagtaagactttacaaaactggatcttactacttttacataatgtaggaatcttagaggaaaggaggaataaagttttatttgaggtcagctaagttgtattccaaatacattttgcctttctcccaatatataaactcttgatacgtttgggtcacaaaaatggaaaatatgctgctgttcttctgacatgaagatgatctttttatcctcagtagtgcacagctttggttatttttccagcaatagggatggagtctcctttactcagttctgtctatgtatgtttacacacacacacacacacacacacacacacacacacacacacacagacacaactcatttgtagaggtggctgatttaattttgtcggaagccatattaactactttcgtaatacttctgtggcaatggcttttattgcatttggtagtctcagcagtgcaatgacatttctaacaagacattgaaaatacaatgagagccaggtgcagtggtcccagatactctggaggctgagttgggaggatcacttaagcataggagttcgaggctgtcatgtgct

SEQ ID NO: 33720 - DNA, 1035 bp, Homo sapiens
gctaacaaattacttgtattttggctgagcgtggtggcttgtgcctgtaatcctagcactttgggaggccgaagtgagtggatcacttgaggtcaggagttcaaaaccagcctggccaacatggtgaaaccccacctctaccaaaaatacaaaaaaactagttgggcatgatggcacatgcctgtgatactcaggaggctgaggcaggagaatcacttgaactggggaggcagaggctgcagtgagccgagatcgtgctactgcactccagcctgggcaacagagcgagactctgtctcaaaaaaaaaaaaaatcacttgtatattattaaagtgtttaggattatacatacttgtccatttcttgttaaataaaagtgtcaaccacacagtgtccactgtgcctggacttgatactgtagtttggtttaagttttcttatgcatatacttttaactgagatttttttttggtccaacaagtaaagtctttgcagcatctttttataatctgtcactcatccagggtctccgcctcttctacatttttcttttcttaataaaaaaaaataaatctcttaattttgttctacctacattcctcttggcaatagctacaacatgtcttgggcatcttggcagaagaccaggttatattagataagccagggaaggcagtatttaactcatattttgggaatattgctgattagttctgaaagaagtatataaaatgctgcatgttgtagaatctttgctttgaactggagagaacagaaattcagctgaaagagtaagagtgtggctataaatcaaatctggaacatccctcagtgtttaattagagatgtatgtaagaggctggaggtaggggatggatggtgggaggtggggaaaggtagacttctgggtaaagattttacctgtcctttggtgatcctttagatagaatacagtactgacatatcaggttaaaaaattatatactaccttattccaaaaagctttagggtgaagggaaagtaactgttgaaaag

SEQ ID NO: 33721 - DNA, 1059 bp, Homo sapiens
tgttttctagatctcacaggtgtgtttcattcttttttcttttgtctcctctgactgtgtattttctttttttttttttttttgagacggagtctcgttctgtcgcccaggcgggagtgctgtggcgcgatctccgctcactgcaagctccgccttccgggttcacgccattctcctgcctcagcctcccgagtagctgggactacaggcgcccgccactgcgcccggctaattttttgtatttttagtagagatggggtttcactgtggtctcgatctcctgacctcgtgatccgcccgcctcggcctcccaaagtgctgggattacaggcgtgagccaccgcgcccggccgactgtgtattttcaaatagcctgtctgcgagctcactaattcttctgcttaagtctgctgttgagagactctgatgcatccttcggtatgtcagttgaatttttcagctccagaatttccacttgatttttaaaaattatttcaatctctttgttaaagttatctgataggattctgaattccttctctgtgttatcttgaatttcattgagcttccgcaaaacagctattgggaattctctgtctgaaaggtcatatgtctctgttacttgggattggtcattggtaccttatttggtttgtttggtgaggtcatgttttcctagatagtcttgatgcttgtatatatttgtcaatgtctgagcattgaagagttaggtatttattgtagtctttacagtctgggcttgtttgtacctgtcttgggaaagcttttcaagcattcaaagggaattgattgttgtgatctatgactttggatatgatatcgctgcagccatgtctgcgttaggcagcaccataagcccagtaatgctgtgactcttacagacttgcaggtttaccacctttgtggttgtgttaagatctgagagaattccctggattaccaggcagagactcttgttctcttctcttactttcctctgaacagaagaagtctctctttccatttgagctacctggagttgggggaggtgtgactcaa

SEQ ID NO: 33722 - DNA, 1029 bp, Homo sapiens
tgatgaacatagatgccaaaatccttaacaaaatactagctaaccgagtccaacaacatatcaaaaagataatccaccatgatcaagtgggtttcataccagggatgcagggatggtttaacatatgtaagtcaataaatgtgatacagcatataaacagaattaaaaacaaaaaaaatcacatgatcatctcaataaatgcagaaaaagcattcaacaaaatccagcatccctttctgattaaaactctcaacaaaattggcatacaagggacgtacctcaatgtaataaaagccatctatgacaaacccacagccaacataatactaactggggaaaagttggaagcattccctccaaaacctggaacaagacaaggatgcccactttcaccacccctcttcaacataacactggaagtccctagccagagcaatcagacaagagaaataaatggcatccaaatcggtaaagaggaagtcaaactgacactgtttgctgatgatatgactgtttacattgaaaaccctgaagactcctccagaaagctcctagaactaacaaaagatttcagcaaattttctggatacaagattaatgtacacaaatcagtagctcttctgtacaccaacagcgactcaacggagaatcaaatcaagaatgcatccccttttacaatagctgcaaaaaaataaaatacttaggaatatacctaacgaaggaggcgaaagacatcaacaaggcaaactataaaacactgctgaaagaaatcatagatgacacaaacaaatggaaacatatcccatgctcatggatgggtagaatctatattgtgaaaatgacagtactgtcaaaagcaatctacaaatttaacacaaactctatcaaaataccaccataattcttcactgagttagaaaaaaaaattccaaaattcatatgggaccaaaaaaaagcctgcatagccaaagcaaggctaagtaaaaagaacatctgaaggcatcacactacctgatttcaaactatatt

SEQ ID NO: 33723 - DNA, 1043 bp, Homo sapiens
tctagtgtcaattgaacttcagtgttaaaagagctgaaattcaattcaaataatgacttccttcatacttgaacagactttggtgcctgctgattgctatctactttggtaacacttgaaagtgagtgtgctgcttcacttcagagctggtttctaagcaaataagtactaagtggttttatggttattctggtataaaacctgagtattcaaactttcagacacctttttacattcttcatttctgggattttagaatcccttttgggttgaattttatgataaaaaaaaagtaattatacattcaagggcattttggaacagacccaaacattttttaaagtatttgctgtcaatccttttttatttgaagtgagggatataaataagtaagttaaaaataaaattctgctgagcaaaatggcaagctgtttctggtaccataaaaatcttacctaagatttcttgtccctggctaagcatccagaagtgacccagagtgacctatggaagacttatggaagtcatttttggacttctgttaaatcacaaccttggtatatcagttgggcaggtagtattaggcagaaatatgtggtgaaaagaacaggaggtaagaatgcctatatatctactctttgtcatttactaggcacagatcttgggctcttccattaacctccaccagcctcattttcctcaccattaaatgggaataggatactttctttactgcagagggtcatatggaaatgtaaataaagtgatgaatgtgaagtgctttggaggccttataagctgggcaggcatatgatgttatcatttttattgtcctcattatctccccgttaggtgatacatgatcaatatcaaggtgggatttatcccacgtcaccttttgtagatttttttgtaaattttttcttactcatttactcatcagatccccgcatccacagtgccaacatgccacagggcaaaggccctgtgtgataagtgagggattttttccaacttggttagaggtgaacctaagtggggtt

SEQ ID NO: 33724 - DNA, 1063 bp, Homo sapiens
aaactagggagtgatctggtgaaactggaaagaatccaaggagttccagggaaatctttcattcattcatttgtagattattccacaaatgtttattaagtatctatggtatttatacagcacctacagtactatttagggcactgggtatagcttacaaactgcttaactctgaatatcttttgtgcaaggaataagtagtataatagtcccttgaaatacaggaattcacctagagatcttctcagatcctcagatgtgcacgttttatatcatgtaacttaatccagaaaataaagcataagcaaactgatatttttacacagcaatgaattttgaaagcaggcagagcttctagtctcatataaggggcttagaacttgccactgcatcctaataacaagtaaaaagctgaacaaacaaaaatcaacaactcttcttaacttcatcagaaatgaggacacagggaaaactgctgccctcaaaattggagagacagataggaagatacaggaaatcataaccagagcagaaacctctgggaaccagtgctggggtaggaaaacctgaactgtaattgatgaaatgctgaaggctcactgtggacaagcctgagagtcaaaaactccagggaaacccagtcatagaggagccctcatacctttgtgaactatacttccagtaggactagtatagcatactcacaaagtgaactcagttacgatgccagttgcaggttgggaagtactggcctacaggaatcagagtccatttctcctagtaaacagaatacgtaggtccaagaacaatgtaggtgcagtgtatgtacctattactattagacctaatgcccaggttgactatataattgactacatgatttattgtccaaatggagatacctttaagaataaaatgaagcatcaatcaaatatacataatgtttaataatatgtatgagttgacaaattggttttattatattggtgaacctataagatagttctgtttaaaaaatattttcaagggtgggcacagcagcgcatgcctgtaatcccagcaa

SEQ ID NO: 33725 - DNA, 1051 bp, Homo sapiens
gccacagatatttcatccatataatttcaaaggcataatctaagagcaaagtacatttctgttttttatttgtttggatttgagccacagatgcaaagtagatcatgcagtcgtctgtttattcacagttaatatttgcttcctttttcaagaacaccatttaataggcaaaatataacttataggagcctcaagaatgggaacatctagtaaagtagttaccctatggcccaagagaattctgggctcaggtgaggttcagtgtcttaaatgttcctggagttcacagcattgtgtgtctctagttagttgatgtaatagctcttgaacagtaggttcctatctaacatatatgcctggacatgttctcccaaaatgttctagttcagttcagagttcagcacaaattcagttgctgttgctgctgctgcttctcttccactgtcctttctacctgtcagtctacactgaaaattcatccgtccttttactgagaaggaggccatagctactaggaggtatgagtatgtgactgtgtatgaagtctgatgaagctttcgatgaacttggttaggtttcttggatgagcagttcaaactagctcatcccagggtagtagacaacactgtgatgtgcatgggaagtctcacatccaacccacacccaataactatgtggggtataaaggccttgccatgtgaaaggttattctagctccagggcttccagtgggttggctgagtctgttgtttgactcctcactcttccgactcctgcctcctttctctcccttccacagatactgatcccatggatattccttagttccatgatgaactaaactcaaagtctactttctggaaatcccacctacaacacctttatagctgtaaaaatctttgttagagctatgcttggaaagacagatgcctaatcttccattttgccttcctctcctcaggtactagccctgtggtgaggttatggattaaagatacactgtcagagtaaagacaatatgtgtgattagagtttagaaggaagaaagtga

SEQ ID NO: 33726 - DNA, 1133 bp, Homo sapiens
ccttggccgtagggagtcccactgagggccaagatggacctggggcaggcagccatgccaccctggtgccactatgggtcaaaataaagatttgctggcctttgatgttgcctctggcaaatcttggccagaagggggaaaatgtaaaccaaaaattaaattctaaggaccctcaaccatctgaatggattttctccttggcaagggtactcttttaaaagttaacctgagaggccgggcgcggtggctcacgcctgtaatccccgcactttgggaggccaaggtgggcggatcacctgagcttgggagtttgagaccagcctgaccaacatggagaaacactgtttctactaaaaatacaaaactagccggtcatggtggagcatgcctgtaatcccagctactcgggaggctgagacaggagaattgcctgaacccgggaggcagaggttgcagtgagctgagatctcaccattgcagtccaacatggacaacaagaatgaaactccgtctcaaaaaaaaaaaaaaaatttaccctgagagactgtttcaggccatcatgggaagtgggggtcagacatacctcattatacctctccagcattaacatcaacacagatctttaagtctgataagaatcatttacaatctattctctctgaagcctgctacctggaggcctcatctgcataattaaacttcggtctctacaaccccttatcttaacccagacatttctttctattgatcccaggtctttagataaactcaaccaattgttaaccagaaaatttttaaatctgcctataagctggaagcccccacccttcgagtgttcccacttttctgaaccaaaccagcatatttcttaaatgtatttgattgaagtctcgtgtctccttaaaatgtataaaaccaagctgtgccctgaccagcttaggcacatgttctcgggacctcttgagggctgtgtcatggctatgatcactcatatttagctctgcataaatatcttcaaataaaaaaaaagaaaatcaacaaaaacattagagttaaactacacactagactctaaacacctaattgacatttacagactattttacccaactgctacaaaatacacattcttt

SEQ ID NO: 33727 - DNA, 1050 bp, Homo sapiens
ttttctgatcagaatgaaataaaacttgaaatcgataataagaggacccttggaaactacacaaacacatggaaattaaacaacatgctcctgaatgaccactggaccaatgaagaaattaagaagcagctaaaaaatttattgtaacaaaataggattatattatactaaaatctatgggatacagcaaaagtcgtactaagagggaagtttatggcaataaacacctatatcaaaaaggtagaaagacttcaaataaacaacaaaacaacgcacttcaaggaactagaaaagcaagagaaaaccaaacccaaaattaatagaagaaaagaataatgatcaggcagaaataaatgaaagtgagactaaaaaacaatacagaagatcaatgaatcaaaaagttgtttttctgaaaagatagataaaattgacaagcctttagtcagactgaaaaaagagaagatacaaaatcagaaatgaaaaaggagacataacaactgatatcacggaaatacaaagaatcattagagactattatgagcaactaggtgccaacaaattggaaaacctagaataaatggataaatttctgcatacaaccaacttactaagattgagctatgaagaaatagaaaacttcaacaaccaataacaagtaatgagattgaagctataataagtcctcatctgactaggtgtggcagctcatgcctgtaatcccaacactataggaggttgaggcaggaggattgcttgaggccagcagttctagaacagcctgggaaatatagcaagatcccatcactacaaaaaatgaaatacaagaaaaattagccaggcactgtggcatgtatctatagtcccagctactcatgaggctgaggcaagagaattgcttgagcccaggagttcaaggctgtagtgaactatgatcatgccactcctttttagcttgggcaacagagcaagaccctgtctcagaaaaattaatagtactacaaagctatagtaaccaaatcatcatggcattggtataaaaacagacacaca

SEQ ID NO: 33728 - DNA, 1048 bp, Homo sapiens
gatttgtgttattttacatgagaagcaatatggtgtgctaacagaggctttagagtaagatagaccagcaaggaataccaactctgtgctctcagtttccttccttgtagggttatgacaatatacctagagtgccatgggactaaacgttcaaccagtctctatcaagtatgtataccaacaggcaaaggatttattttattttacttcatttgctttctctgtctcccactacgagattgtaaggtgcgtgagaaaagaaatgttggtggtatttttttccactgttgtatccccagcacgtagaacagagcaagaaacatagtgtgtgctttataaattttcattcagttaatttttaattgagaatctacatgtgctaaacactgtccaaggctctggatatacattaatgagcaatgacaaaactctaccctcagggaatttacattctttgaggatgataaattttgacttagtcaaagggaagtcagtagttgaatatctaatagttatctcgaactcaacatatccaaaactgagctcctagactttcttcccctagggggcttatctaaagccttctccatatcaatgaatggaaatgccacctttctatttgctcagactgcaaatcatgagtcattcttgagtcctgtttttctcttaacactcctcatcccaaccttcaagaaagtctgtctgctctagttttaaaatatgtacagaatccaaccacgttttgccacctcagtttctcccactctggttcaagccactactgtctttctctaagagcactgctgtggcctcctctcagatctacttgctttcacccctcccctcttaggtctgttttctacatagcatagcaacagcgaattcattggaactatatcagtcactgctctgttcagagccctgtaatggctcctctttgttcttagagtaaaagccaaaatcttagagtgaccatcaagacctccgtgagctggggcctcgttggttcttgaatctgatcttctacactcttctttgctcactctgc

SEQ ID NO: 33729 - DNA, 1066 bp, Homo sapiens
cttcaaaatgtgttgtattgtcctacagtgtcataaagaacctgaaaatgaacttttgtttctaaagttggaccttgctgccatgactgtttagtttacagaaacttgaccccggctcatcctgtctctggctgtggcccggcaaagcactgaaaacccctctggtctcagagacagtaggggcagtgccactttctacaacctgccaacccacacactggagtaattctgaaaaaaattattcctaaactctctaagtgtggacggagaatgagcaagccccagaagtattttacaaccagagtgggtaatgaggagggggcttactggaatcgtcatatctctgaatattgaaaacaacaactaaaaaagtggaccttctcagaaaaaaagggcagcaaatgaccaagggcgccccttctggccgtgcttggcttgagtaactgtctctctttccccacccccatcacagggctttcagtttggcaaaggaaaagcagataaaaacagaacattccatatgtttctttctccatcggccaaaaacattttgacacaatgtttgtgaaacacctttggagaggtgcacttctgaatgctgcctctgccgtaaatcctggggcaagggatcagcctcttcccaggaaccatcgccttctataaaccgtgaactcaagcaggcattttttttttcttaccgaaaggctgctattgtgcaagggcacataatgggtctgttgctcttattggcttccaaatgtgcatggcaaagagagagatgtgggcctagagcagatatattcagcaaggtgacagcttcccataacaattctaacacttcttatcttatgtgagaataaaatatttaagggttgaaccttattttgccaaatgtatcttttctgcttttgaattgggcagaagattttagcaactatattctacaaatgttacttataacacacacacacacatctgaaatatatgccgaaaattgacgtctttgacctcagggagagcacctgtccaggtctgcctaaaggaaatggctccagtgggtctaaac

SEQ ID NO: 33730 - DNA, 1051 bp, Homo sapiens
accatggagggggcatccacatgccgcctccccctttgccctccttccgctcctgaaatcccagagttattcaatcacgcccccagctcagtccccattgctgccgttcggccggactgacggcggccgcgccccgcagctctgtaggccctgaagctcgggctaggagagtggtccgcaggtggtaccgcacgggaagggacggatgcgcggccgagctggcccgaactgcctcccacgcccctcggggccgtgggcccctccctctttctctttcgctcgtctgcactggccgagaggagcctgaagtcctgctccctccctcgcagtctgaaactggggcgttggggaaaactgcgagaaggtttaaaacccagctgttggtgagagcatttggctaagaataaaacgatattctttgaaggacaaatccacctgctcctgtcccatcaactggaagagcggtcgttctgcctggtgttatttgttcagatccggcttttcgggctcacccaaatatatatcatttggcaaatgctaccttgaacgtagtagggatcttaagcgctcaaactgctttggggacacgtccaccgctttctgcctgaactcctaatgacatgatttgcggcgttatttaaaaaaaaaaaaaaatggttagccgctgaaaacattatttaatagttgcttagattctaggtttagaatacacttattttgaagtttggttagtgtttaatggaatcgagggtgtatgcctttttgaaataaactttttatttgagaagaattttagatctacataaaagagactaagtataacactttaatggctaactttgttaatgggatcctgagggataatatagtagctttcatttgtcaggctcttaccttgtgctaggttctgtgctgagctctttatattccacattatgctttaatcgttaactaccctgcaagataggtgagagtattctcaccttaaaagtcaaaaaatgagactgagaggggtgaagtaggccggacgcggtggctcacgcctctaatc

SEQ ID NO: 33731 - DNA, 1050 bp, Homo sapiens
ttttgtatcctgaaacattattgaagtcgtttatcagctctaggtgccttttagtggaacctgttgggttttccaggtttagaatcatattattagcaaagagatagtttgtcattttttcctattcggatgtcaattctttctcttgcctgattgctctgattaggacttcctcctttaaattttaagtgtactttcaccatcctagttctatgctgtcttctttttaatcttttgatagtttttctttttttggaaacagggtctcactctgttgaacaggctggagtgcagtggtgtgatcacgtctcacttcagcctcaacctcctatactcaagcaaccttcccacctcagcctcctaagtagctgggactacaggtacaaggcaccacgcttggctgatttttaattttcttgtagagacagggtcttgctatgttgcccaggctggtcttgaattcctggactcaagtgatcctctcaaagtgctgggattgcagccatgagcccctgcacccagccagtagtttttcattttcacattcctcatctcagttttttctttcctagtcactcctgttcccattgtgtcttttttggtcatctttgtgtagcaatgaatataaataaatagccctattggctagcaaaaaatgttttttttaattgaccagttgttagactataattctgattatgcccaatttaccagttgttaaatggattgtttgtcattttcatgtttcccttggtaagtgaaattgtgaacatcatgtagcaattatcattttttgattttacaaaatggcagacaaaatgagtaaagtttaagttctctttactcctgtcaccaatttcagttctctttccagagataaccactattactagtttggcataaatccttccagacctttatacgtaatcatgcctctgtgtaatatacaaatatatatttgtattagcatatttattcttatttacataaatggtatactgtttattgtgttctacagcttacctttttttttttttttttttttttttt

SEQ ID NO: 33732 - DNA, 1109 bp, Homo sapiens
caatttgatgacttttgatacatgtataaacatgcttggctttttcttttaaaagtttgtaactcttggccgggcatggtggctcacgcctgtaatcccagcactttgggaggccaaggcaggcggatcacaaggtcaggagatggagaccatcctggctaacacagtgaaaccccatctatactaaacgtagaaaaaattagccgggcgtggtagcaggcatctgaagtcccagctactcgggaggctgaggcgagcggatcacgaggtcaggagatcatccattttgagttaatgggtgtatttttggtctgttctcttctattgatctatgcatggtacatcatcttgattactgtagctgtataataaatcttgaaattatgtagtgttaagtcttctaactttgttgctcagaattgttttgactgttttaggttttttgcatttgcaaaccaattttagaatcagcttgtgaatttctacaaaaagggtcaactgagaatttgggattctgttgactgtagatcaatttgtgaaaacctgacataaaaatattgtaccttctaatacaagaacacagtatatctctgtttttgcaggtcttctttaatttctttttttttcttctccttttttgggacagggtcttactttgtcacccaggctagagttcagtggtacaatcatggctcactgcagcctctaactcctgggctcaagggatcctcccacctcagcctcccgagtagctgggactacaggcatgcgccaccaagccagcctaaatttttattttttgtagagacaagttctcactatgttgcccaggctggtcttgaattcctgagcttaaacaattctgcctcagcctcccaaaatgctaggattacaggtgggagccactgtacctggcctgttcaatttctctcagcagtgttttggagttttcagagtgtaagtagcacacacctattgtcaaatgtttttgttgatgctattgaaagtggtactgttttttgaattttaatttccgattgtcattactagtatctattaatagaaatacaattaattttgtgtatgaccttttatcctgcaactttcta

SEQ ID NO: 33733 - DNA, 1193 bp, Homo sapiens
gttactattgtaattgttttggggtaccacaaacagtgcccatataagagggcaaacttaagcaaaaatgttttatgcattctgacagctccacagactggcccatcctctctctctcccactctgtcttcccctcttcccctccctccctcgggcctccctattccctgagacataacaatattgaaatcaggcaaattaataaccctacagtggcctctaagtgttcaagtgaaagaagagttgtatatctctcacttttaatcaaaagctagaaatgattaagctttctctgctgaagatacagaggaaggcatgttaaaagctgaggccaaaagctaggcccaatagccaagttgtgaatgcaaaggaaacgttcttaagaaaattaaaagttctacagcagtgaacacatgaataattagaaagcaaaacagccttattgctgatatagagaaagttttagttgtccagattgaaaatgaaaccagccacaacacttcattaagccaagcgtaatccagagtgacgccctgactcttcaattctgtgaagactgagagaggtgaacaagctgcacaaggaaagttggaagaatggatattgtgcatgaaagtagcagatgttgctgcgtgagatctaaggaaagaagctgtctccctaacaaaagtacaaggtgaaacagcaagtgctgatgtagaaactgcagcaagtgtatccagaagatttagttaagataattgatgaattatgctaaatgttcagcatagacaaaacagccttctattggaagaagatgccatctagaacttttgtatctagaaagaagtcaccccctggcttcagagcttcaaaggacaagctgactctcttgttaagagctaatgcactgttgactttaagttgaagccagtgctcacttaccattctgaaaatcctaggacccttaagaaatatactaaatctactctgtctgccctctataaatggacaacaaagcctggaagacagcacatctatgtaatagcatgatttactgagcacacatttactgaacacacatctcttacacttctgtgtaagagcatggttttctaggcccagtgcattagaaaaaacgattttcaaaatattacttctcattgacaatgcacctgatcacgcaagagctctgatggagatgtaaaaagaga

SEQ ID NO: 33734 - DNA, 1028 bp, Homo sapiens
tcatacatcagccagtgatttgataggatgttcttatatatacattgtgggtatatttggtacctgcaaatggttatgctaagtaataatgaacttatatataaccaggtagatgaacaaaacatttgcatttgtaactcgagtagttgtaagttttctgtggcacatagtcagttggcagtgactggtttttaactttccaatttacatggatgacttgaagatatattgtgggcatggtaatgacgtagaggcaaggaaacagtaaaaataatgcatcatgtaaaaactaaatttgtatcagtgcttacctggcaaatcatttgaagaggtcctgtttgaacttaattcaatattaaatatacctaaaaatagattatagaagagtcaagatattggcatcaaggtttgtgaaattagaatagtctgggtggtagaaatttttcggaacacagtgatgattactttaaattcattccttgtctagatctttgaattatatttcggacattttatgagactttccccaaagtgatgcattactattctgattttcattattttatttcaaacaagttttgttttgtttttttaaaaaaagatacaggttataggaatataaatatgggcactgtcaatattgtgaactaagagaatattctacctaggagatgtaaatgtgttgtattaaaattttgaaaactaattttgctggatatgctaattttcattattaactatacttggcagctgttaatggtttgggggcacttggctaatttaaatcttcctcttgattatgtttgtgatttctcatctggtgtgtgatgactgaatttgtagtatggtttatttattgttagagaatatattctctcatggaatttgactaaatgattcaggggattattttttgcatttttcttgatttttttgttttttggttttttttgaaggaagtagaattttccttttatcaggaacttgtttttaaacttgtgactgaaatatcataaatttgcttggca

SEQ ID NO: 33735 - DNA, 1023 bp, Homo sapiens
aaaaaaaaaaattaggccattatgagacaggttagttttaccctactgatgatctgttgttgccatggtaatcctgctcagtaccaacccgcaggttcagacattcggtgtatgtgcttggctaaggagccaatgggacaaagctaccctctgtgggattttgactgaatgcctctaagtcagaatcccgcccaggctgaaccacagggcagcgctgcagggcctcagttggcctcggatagccagtctcccaatggcctgggatagccagtctcctgccatccccgccggcccgcagttcggctcagcaagcgcgcaggtacccgaggccggtgcggagagtccctcctcctgggaaaccgggtgcggccggaaaggcggccgcccctcacccgtcatgcaacggcacgttcgtggggaacctgacattaaactgttcgtagatgacctgcttctgggtcaggatttcgcactgagcagagcagctccctcgctgtgatctactgaaagtcagccctcgacacaagggtttgaaaaagaaaaagtgaaaaaaataaagaaattagggcatgttggcatgcactagtggtcccagctactcgggaggctgaggtgggaggattgcttgaacctgggaggcagaggttgcagtgagcctagatcgcaccactgcactccagcctaggtggcagattgagacccccatctcaaaaaaataaaaataaataataatattttaaaacttcaagtaatatttaagcatttgttcaattgatactgaatttgagcttctaaattaagcttcagagcaagaaagcaacttaatttgaacattcataccttataaaatataaagattaagtcatccaattggccatgtaagtctcctaacaaagatagaaaaagaatatcaattctgattgttccttaccagtgcttctgatttttattataagaaagaaaatacccagaagaatctgacagaaaaaaccctacaaagttttccatatgtaagataaggat

SEQ ID NO: 33736 - DNA, 1110 bp, Homo sapiens
ttagcagagtgtctggcacacagtaaatacccagtaccggtagctgcaattattaataatgttcaggggtttgtttcttctgcctgctcccacctttgaccctttctattgcttattagtttctcaaccactaaacaaaaacaatgaggaacggggtgaagagcagttaacccattgggcagggttaaatggcaaaataaattactgaaattaagttagagattatatatggatttaatttttctggtttttgcctgtctcctgtcataaataattgggagtttaatatattatcatcaatggcaacatcatcatcttcatcatggacctgatcacagggaccaaactgtatactatcaaaaactgacaaccctttcaggactccagtatataccctcattaaaacaaaaacaactacccctgaaaaggccccagagttattgatctcacatgtgagtgaactttttcctagaatttattgcacccgattacaatccaaattcatatcttcactaattgtaactaggaacatttgagatttttgcaaaatgtaatagactgtcctttcccgtcatctctcatatttccctattgccatttgaaaagtttggcccattgaattcattgtcttcgttatcctatttcaagtttagcagttgttttgaactccagagataatcgttaggagacttctcttagttaggaaacatccttgttagaggaggcacctggtgagacagactgaagttcaaattctgactctgctttttttttttttttttttttttaaatcttcggcttatctcctgcatcgatgccatgggattatgtaagagtgccaccacgtggcctgacaatagtaggttgccagtaaataggtgttccttctcctttttacctccaccctcttggtaaatttaaacacccgtttattggcagtaatgctgtgcctttcttgtgtttcaaggatgtgcttttggggcaagacagtggctttggtcttgtgaaggatccatgttatttggctggtcctggatctaggtatgtacatgtacttatgatgctctctgcatatgaatgctgctggtgttaaactactcttgttccttt

SEQ ID NO: 33737 - DNA, 1029 bp, Homo sapiens
agtctttctccaccctcttatcatcacccttctcttatcactctctctttctctctctctcttttttttttttttttaaatatccctggcagcttcaacaaactttctaaagtgacaattgcaagggaaaggcacatgcctggtgcagcccatgtggtaggtagtcagacactggcttccagactccaaacttctatcaagggttcagaggctgagtccacaccaccctccttcatgagcgttcacgcccaacttgctgggtctcttggtgggcagccagcacccatccagactcaaagcctcagccatgatccagtcagtggaactcagggtttagaaaagaaagtcagtcctgatcctcagaagagttcagaagacatcagaacagaggctttggccaaggaaattgtccaccaagacaaatctctagcagacattttggatccagactccaggctgaagacaacaatggacctgatggaaggtttgtttccccgagatgtgaacttgctgaaggaaaacagtgtaaagaggaaggccatacagagaactgtcagctcttcaggatgtgaaggcaagaggtaagtccctggtgatgtcctcagagagacttacaatcacactccttccatggggatgatgataagtctaggactagttgcctgatgttctcctactgccacagctcctgaaccaagagtgacattttatctcagtcttggaggaatggctctggcagtgaggatgtgggacagatatgcaacaacaaagaaagtaatagtaataattataataattgccattagtacccattgttaacgttgtgtgtcaaacattgtattaatttatttatatcaacattatttaattttcacaagaactttctgaggtggctaccaattttacctccatttacaaatgaggaaactgaagtacagaggaattaagaccatgctcaccaaggtcattgaacatgtgagtgatggcacctggatttgatcacagccccatgactgtgcctgtctccag

SEQ ID NO: 33738 - DNA, 1094 bp, Homo sapiens
aaagttatagattaatttatcttttaaattatcatctttaaaaatgatgtgtctacattacagtgaaaaggagacccaaggaattgattaaaagaacaaaactgcccataacccactatcctgatataatagttcttaggtgtttagtctatttcaccacttttttgagcagacataacccatcttgtataaactgccacctagaaaccaaactgtgtgcctgaatgagtcctgtgtgaccatttgaataatactcttaaaatgaaggaagtggatgcttagtgtttgggcatgggccatcctatgtctgcaaaaggaacaaatgattgtgggactctgctgtttccttgatttggatggcctacttgattgattgccagcagaccaagtgtttatattctacccaatgatgatgtcacactgatcatgatcatcggatttagactgtggcgcagcccacagagttttctgtgcctgtgtttctctttataggactctaaatttggttggggatagacgctgctcttggattttatcattttattgggatccatctttcatagtcttagctagacctgtctcaaatggggttagcaaagctgaaccattatttaaatgaaacccaacacatctaaagcttctatacttttttccaaggagatctactttacaatataattgataacctcccccgccccctttttaaaaatctggattgacagaaaactctcaaataacaatacttcccctgacccactcatgcctgctggcagcccatcaatgcagcagctgttgaacataaaaacaatacttgggctaaggtaatagagacagacttctaaaaggaatttgctgggcgatctaaaatgaaattcacattgttccaggcttgacctgagatagaaatcaggagtctgttccctgatatgacaaagccaaggcaccagagccacctctttttaggatcgacgccaatgagtgtgagcacatcgctcaagccaaatggcacaggaagtccagttctgtggacacattctgcccacctgctgaactgtgactgggtaggatggagtgtgaaacattgagagaggggt

SEQ ID NO: 33739 - DNA, 1024 bp, Homo sapiens
tttttttttgcatttttattgtacaaaaaggaaatgaaaatatatatagcataacattaaaatttacctacttgtttttgataataacattcctttgggaagaattgattttttttctcttatagaagttgaggcacaataatgtggataggttagagattgaaaaacaaaataatcctcaacaccctaacacatcagtactcattcttgcctttccaacccacctgttttatcagacatttcttgtgtaccttctatatgcaggtgctgaaattatgttggtgagtacttgactgcagtctttgctgctctcatgaaatctctctataggctgagtaagcaataggatttagcaaggaaagggagatggggaggtggttgtggaagtgttccaagcccaggaaacagcatgtgccaagctctggaagtgagggagagactcttaagaaatccaatgtagcaggaacgtcagccttagggttgggtagggagagtggacagacaagaggctgaggaggtgggaagagactcagttgtgcagtgcattctttataggcatgtatttactgtgtagctctttaaatgctttatattccatccaccctttgcccataacttaagatatctcagatccttgaaattggttgaaggaagacaaagaaaatctgcagactactaattcttcaggattcaataggagagttgagaaacgatcaggggagttgattcctttcatgcccaaattgaacccttaaagaatagaggaaatgaagactgacagaggacacagagaaggagagtccagtgacaacatatgacaacgacaatgctagatcttcctctgcccagttttatgcattgagcctttcctcaggattcagaactagaagttattattttcttagacctaagcaactgagtcctgaagagtgtggtggggctgggggggaagatggtaggactctttccaccttggacttcaagtggcaatcagtgttctccaaaaaggaaattaaaaactcat

SEQ ID NO: 33740 - DNA, 1049 bp, Homo sapiens
gacaggaaactgttaaggcttgtaaaatgactatgacctgattaggcaaatatagcaactattttcagcaaagaagccacaagatgagtatagctgactttttttttttttaatgtataaagtttggagattttccagtgattttctaatagaccaaatttaaatctaacaataatacatcttgaaaaaaattaaaaatttatgtaatcagccaggcatggtggctcacacctgtaattcccagcactttgggaggccgaggaagatagatcacttgagcccaggaggttgagaccagccccggcaacatggtgaaaccccatttctcagaaaaaatacaagaattagctgggaggtggtggcgctcacctgttgtcccagctactccggtggctgaggtgggaggatcgcttgagtctgggagtttcaggctgcagtgagccgagattgtgccactgtactccagcctgggagacagagggagcccctgtctcaaaaaatattaagtagtctagatctcagttaatgcttatgctttattgtagttagaaaagtgcttaacctggcctgtaatcccagcactttgggaggccgaggtgggcagatcacttgaggtcgggattttgagaccagcctggccaacatggcaaaaccgtgtctctactaaaaatacaaaaattagccaggtgtggtggctcacacctgtaatcccagctacttgggaggctgaggcacgagaattgcttgagtccaggaggcagaggtttcagtgagccaagatcatgcccctttactgcagcctgggtgacagagtgagactccatcacaaaaaagaaaagaaaaagtgcttaacctgatgtagctataacattaataagaaatagaaatttatctaactttctctttagttaatggccaatggtttatacacagttttggttaagcttcaattaggttccgtgttgaattattgatggcatggtaagatgatagtaagggaggcaaatgtgtaagccatctatgaatgagcttcattatttagcttattt

SEQ ID NO: 33741 - DNA, 1739 bp, Homo sapiens
aatatttgtttggccaaacaaatttttaaaataagtggcattttagcattttggagattacaaaaggtacaaaatatgagacatttgaacttcactttgaaagttacagagaaatttgagaaaatgttgggaactctgaatcatatttcaggcccctaactaaataaaataaatctttgactttgggcatcaagggaattaataaatgtatccatgcgaatttttcttaagaaattagaaaagagaagtccatatgcaatccagtcgataggagtagggtaaactctaccgacttcatggttcataaagattagagtgtatcacagctgagtaaacacaaccaaggaggcatcacaaacagcaacatagtaatgggatttttctctactactttaaaccagagggttagttaaaaattcacttctgacatttctagcccttttctgactattagttaaaaattcagatgctttcctccagttcttaaaaagcatttcataatacttttgtatgaactgtagaactaaagggcccttttcttggggtttccaaaagaaaaaaggtattggagagactaaatctattttttctctcttatttctgcaaaaatgcccttccatacttctgttcccttcagaataaataacagctcaactcccagcatgacatgcatgcccttccgagacttcatgcctgtcttcctacaatctccattaggctacctgctgggccctgtgtgtgtacccttcgcttacctctgcttttgcatttcacctaaatgcctttctctttggcctgtttccagtctctctatctagtcatccttcaggactctcaaccaggcagagttaggaggactagttttctgaattcccatttttcttaggcttctctaatcagcagatactgtgttgtaccataatagttttcacgccttattaatttttgtatcttaaacacagcatagagtagtggctagcacaaaggagttattcagtaaatgcttcaaaagtaattgtgcagttacaggctcaggtctcttgctatgtagagcgacttagtcagaaaacattactgtggcaaaacatcctaaaaggagattgcagaacaaagaatttaacgatctcctaaattttctccaggaattcttacagttatcagtatttagtggttgagcatctgacaacaggaagctttgaagggctgagaaataaagacatgcaatgaattggcttaagattttaattttcatttcacctgttttctagtctcagtccaatttttctcagccctggattgctcagaccatactagttggattggacagagtgtaatataatttactcctatcaatcagaaaatactacagtgactggtgaggcagccttagcaaatgatataggtatttctctttgatgctgtattcagggccttcccctgggcttttcttagtaattgaaattatgtgtataggattgactcctgaagctgttttttatggaaattagtgggcatctttcagtattttcattttcattgcttatttgcttccagaaaactaccaacatgcttgatgaaagttctagaaataatgtgagaggtgattattcattagatgtctttgtcctgtggaagtggggaaacaggattcattggaacaataagtatttacattttaaaagtttatatatgatatctgtatgtatatcttacataaacatacataaatgtctagcaga

SEQ ID NO: 33742 - DNA, 1053 bp, Homo sapiens
tgcttttcaacagcgtttttcctaagggcatatgagaaatttaatttctgatggaatgaaggtgaaactctagtcccaggtaaacctgggtaggctgtagagacagaaagggggctgcaggtctaggtggaagaacgagaacgaatgcagcatggtatttccaggccttttagattcggcttcatccacaaccaatgtgagttcttatctgcaaagcgggcctaagtgtaatggagggaaggtgggccaggcaccagggtcctgggttctcccgcgcctcactctgtctccacctggcccatgcataaagaacactagtcaagtagccattgtacctgtttccttatctgaaaatgagaaggttggagagtatgacttctgttgaaacaacaaggcgcttacaaattttggtgaagtcgaatgagggcagcgttaagagaaatatcaaagttagtcattggatttcagggcttagggatggaaaccagctggtagtagactggttgtagttatgtccaaagggcagagtgggaaaaatttggccgaaaagagtgtggtgggtgaccagcaaatgttagaggtatacatcagggcacagaggagaaaagctaacatgatactgatgacttcaagtcttcactgtccaattcagaggataggggagggtttaagctgattaaacagtgggctttttttctcctgcaagagggtggaggtctataactgtgcagattttatcagatgcatgctaatacatgttattctgggggactctcttataccttgaagtagacattgctgctatttggcgtgaaaaaaataggaggacttatttgaattgagaatggggataggctgagttccaccgagatgttggcttagagatgcctgggccatgctgtacagtaggaagcccagcagaggagattgggctgtgtgggtcatgacaaagggagttgttagcttatggttggctattaaagtcatgggcaaggatgggcaagaaaagtgtgtaaaatgagctgacaaaagataaatatgttaattaattct

SEQ ID NO: 33743 - DNA, 1061 bp, Homo sapiens
tttcttggctctaggcatgggatttcatggtatagatgacaagcagagtagcaaatgttgttcaaatcatctttaaagaatgcaattctcattggtaatgagatggtccagacattttatattatgaaagttaccccagcaatgcttagctttgaaagcatcccgatgctggcttcatagctgtggtttgggtcaaaactttgcattccagtgttttcccttttgcatgagaactaagggcgtttcccatcttcccattaaccttctttttttaaaagagaatgtgaaaccaattcaatactttctagaatgcagtcagataagagtgtgtatctacagaaatgattaatcagggtacttaaataaaacttactttgcggacagttcgtgaggccagaatttctccagatactgggaggtggctggtggtcagtcaaagattttgtgtgcgagacagcatgttcttttctttacctctcttcagctcagaggcgtctgtactactgaaataggacctcagaaaaagacatgacctaagatgaaggggtatgtacttcttctcttttccaagtgggtattctgtaaggagaaaagacagagctcaaaggagtgtactgtacatgtctcctctgccctctgctgccccatggtttcatctcagctctctttaaaattggacatctgttcccttgaaacctgagttctgatatttctaccttctcccatcaggtactgctgctcagaaagactatttgttttcatctgaatatgtgaaacctgcacatcagctgtacacaggggccgcctattaaattaatattcaacagtgctttggactaatacatatttttacatactataggctggtgaattcactcaaagaatgagtagttaatcacatgagttataaggctacacagcatcctgtcctttggatagctttatggttatgtatttgtgactatttgattgacatctgtgtgccccattaccctgtacgctccatgagttggggaggctttgttttttcatcatggtatccttagcatttaacacagtgt

SEQ ID NO: 33744 - DNA, 1052 bp, Homo sapiens
ggaattccaaatagcttgagcagcttttcaatcagtattttccttttattggtcagaagaatgtttggtgaaattttccccaagatttcataataaagacaatgatggaggtataattttattgggatctggaagatttggatatgtaaacactggctgtaagggcctttcacatagaggaaataatgtgagtaaattctgatgggaagaaacctgggtttgtcccaagaagagtggtcatttaatttaactgcagtgtaaggtgctccctggggagaagtgggaggttcagtaggaatggagacttgaggttagcccatggggccctgaaatgacaggccaaggagtttggattggggaccttgagtaccgagatccccttgatggcaaggtggagggaggaagtattagagagggtgagatcaagtcagggaggccagttgggaggctgttgaattagtaggaatagaaatgtggaggatgtagtattgataagacttcagagttgatggtgggaggggagctggtctcaagcatggctaagtactgttaacagaaatagggaactctggagaaggggcgagtttgggatagaggaatatgatttcagtttcatgaacatcaagtttgaagtacagatgggacaacccaagagaagtgttcctctgatagaaattcagaactggatgccaagcagagttcaatattagagataaattcagagagtcgtttccagatgtgttagtgttaacgacatggaatatatgcagttccctgaaactgggcctggagactcaaaaaagacccctcaatccttggcttgtggtagctaagggaagagctataaaatgctggactggagggatgcggttcagctgctgtgctggaggcactgggtaaggtgctcagagctgccctgtgcatgtcctccagtgccgttctctccagtttttaagcctgttcataaaccagagaaggaacttctttttccctttcccccatcacatactgatgggcagtgactctcaggtttcctttaatactgggcagag

SEQ ID NO: 33745 - DNA, 1748 bp, Homo sapiens
gtatgctcctatcacctgaatttcctttttcttcatgtaaatggacagatgtaaatgatatgtggtggtctgcatggtgccagggatcgtgcagagtggctatccagtttgtagtctacactttggatgaatttagtccatgggaaaggcagatatactgcagatggttaatatacaacaattgttgtagggaaactacaagacaaagagagaaatagcactttataaaatatcagcaaatgtttctgtgtgtatgtgggggttgcagtgggggtgtattttcttaagctgtgttaccaaagtgatttctctgtaaatatatttgttttgacttagagataaagctgagctgtagcattcaatgtagaatattgggctctaacttccaagacagtcaggaggaggatagaattgaaaataaaaattaaacttctccctgctctgtttacaactggtaatatacttgaaaagtagcaattttctacagtacctttaaaggtaatgttgtctctttagtttacttgctgggtctattttccacattgggggctggagggagatgagaggggagggtaccatttactgggcactgactatatgttcgatgttttattcccttcccctcatttcattctcagggtcatatccctagaaggtaagtgtcactgtatccacgtcttagaccttggaggctgagggaggctgtgcttttctaagaacagccggttacttagtatggcccaaattccaatccggatctgtgggactccagtccctcttcatttctccccctatagcaggccttctccatcttctcaaattctataccacctccacctcctcagcccaggttttccttgtatgaatatatgtaagataaaacttggctagtcacagacacacctttagtgctgtgttgtgcttactgactgatttctagttcttgatgcacttgtctttccaaccacagcataactaaaagcaaaacagtgtcattctacttatgctttgatctggcaagcagcagctttatctatgttttgaaagtagataggtagaaattatgtgaactgaaatttcttagtatacaatttcatgatgctgtccttcgtttgtggattttcaatagtcttcaggagacatatgaagcaaaaaggaatgaattcctgggagaactgcagaagaaagaagaagaaatgagacaaatgtttgttatgagagtgaaggagaaagaagctgaacttaaggaggcagagaaagaggtaagccatctgtcctgcttcaagggaaagatttgtaagagagagattttctaaatacatcacgctttagaggacttcatgatggtccaagtactttctacatgcattttgtcacgagtgacctgccaacctggccaggaaaatgggtcagatattctcatccctgtcttacagatgataaacaggttataaaagttaaaactatttttgcagtcacatacctagttagcagcaaaaccgagactaaaactagatcttaggtctccagatctgatcacatggcctgtgtagctctgtgtttcttcaatttacaagtcttaaaacatgagatttgggattctgcgactattattatcttcttagtctatcagccaactcagctagactttggcagtgtctgggggacaacgatctgacacaaagcctgcactccacatctgcgcccgtgcttctgccctcacggggcttgcactccctgcttcagcc

SEQ ID NO: 33746 - DNA, 1024 bp, Homo sapiens
gaattttcctcaccttggctagctccacctgctctttgtctaaggcccttgcctcatcagggattagaactggcccatatgccagaacctgtactaaatgcctaatttgtatggaagagtgcatatttaatctcttttctatactgctcctttctgatgcttatcctttcatctgtgtgattgttttttcccctctactaacaagatcctcccagctttctctctacatgtagaaaggataacatttctcatgaacccactgcccctctgcattttcctcactggttagagattaagtaaataggatagaatatgctgcgtctcccctgacacacactttcttttttgaatgagcaagtctccattttgatttcagcaaagattttttctccttttctttgtcctcaaccatacttagaggaaagaaggaatggtcttccatgaactgattatgcttaattaagcaaagtaaggaaattagtttcatggaagcctaaacaaagctggaatagaaactacacactagacacagcagtagtcatagtcttcacaggtttaggagctactggaccaacattcttgtttttgcttttgtttttttaaataattctagtctggagctaactgtggagcagccaaatagtagctggcatgttgattcaaaccatgggctgaatttgctcataggctgtgcatcagacaaaagcttgaatatttgtgttgtatgcttgttccaaccaccgcttgtgtgagcatttttgtggcttgtacagaaagtacacttttaaattgtctcttgcatcactaaaatttttttaaaatgagcataacaacgaaaggcatccagctgactttttgattccaagattattgattggattgacttttttgcattaaatttttcccagcaaaataaatcatatggcgagtcagggaataaaaagtcaaaagaaacaaatagaagcttttttttttaaaaaatgtattgcttctgaacttttttctgccactgctccctagccct

SEQ ID NO: 33747 - DNA, 1116 bp, Homo sapiens
ataaatatgtcttcctttttctatgcccagtgcctagcacacagggttcaagaaatatttatcgaatgggtataataacgtccactgtacataaaaatttataatcagaattgtgatcgttagtgccagaataagactacaagattaattgtattgttgtatcttaggtttttctgttgtgtcttaggttttacctcttaagtactttctcttgaatatgtgacaaaagagagactactattttttaggtatttgccatatatttatagtcctcaatataagatttcatctgccatcatgcttctcttgaagccagatttttaaaatactgaagcatgacaaatgaagtataacagtttattaaatatgaccggctgccttccctagaagtctcttcaaagcagggagccatggttttattaacagtcaccagcaatggctagaaaaatgtggggaatcttctgccagtaggattgctgtcagctgctgggtcagttctcagggcactgaaaagaaaagggccgccatctgtccatggcagcttttacatatgtcccactctgcacaactcgtgatatttctcttgggcaaaattacattgaaatatggaatgactcttaaagatttttatgtaaaaagataagtataaaatattttaatatcccagtacatttttttttggtgttaaaaagcttaatttattttgggagagattatattatgaatttcataagtctgaaatacaaattatactttagtgctaggaatctagcttttgaacctgcatggaaatttttgtacctgcatttgaatttacataatttaaaggttcaaaaaacttttttttttttttttaaatagagatggaggcttgctgtgttggccagaatagtcttgctatgttggccagagtgttctcaaactcctggcctcaagcagtcctcccacctcagcctcccaaagtcctgggattacaggcatgagccactgttccctgctgcctttttttttggggggggggggaggtcgagaacgtctaaaatgtgaaaatgtgtataattgtgggtaaagagccagtacatataagagaaacaacttgattgtgttctgtcttaa

SEQ ID NO: 33748 - DNA, 1035 bp, Homo sapiens
cgggacctcttggtactcaagcctgtgggtcttcccagcccctgtatgtctagttctttttacactttgatgacagtttgtgcttgatcattctgggttccaatactcacagtgttggaattcagtgttagtgtgggtggaacttgcaaccccagacaaccgttttgttaaaggcttgcttgccctttgctattttactattattcaacgtagcaatcatctcacacttactcatttactgctctgaggtttgtccaataaatatttcacatgtctgtggtttatccccttgcctaaactctaagcttctcgtgagaagagaccatacagtctccttcctttatatcctatgggtgcctagcataataatcctgggtaaaaatgtgtgtcaatatttttctacgtggatcacacctgacaatgtttttttccattcttggttgcagtgagttatagtttgtaaaggtaaacacacgtgaggacaaattcatgctctccagagttaggatttcagatcattaacagggcttctgggaggccattgcccattgctacaatcacctgtacctatttgagagtaagatgtagtgatgggcataggctctgcaccagaaggccagtccttgagtcctggtttggccactcattgtttgacctggcgaggtgttaactaaagtgtttgtgcctcagtttcttcatttgcataaaggaactaataacagctacttgtgagggacatagtagtgtgctgcggatgccccagcctctgggagtgcccttggcaggcagccttctgtggacagcccctctggggactgccttagtggcagagtactgcctcatccaaggagggctcacatctaatgactgagttggaggaggtataaagtcctggtcactttggtgcccacacaggacaacccaggtgaatctgtccaatctcgcttctttcttttctttccttttttttttttttgagacagggtctagctctcacctggtgacagaatgtagtggtgcgatcaccactcactg

SEQ ID NO: 33749 - DNA, 1050 bp, Homo sapiens
ctgtgcctaagccaggacactcctgctaagcatagccctagaaaaatctgaagatgtgttgcttgcttgctttctttgccctatgcattttgtgctcatctctgcttcaggacactttgtcccggctactcctcattctttaactagatctgaacatacttggatataataaaaccagaagccagtctttgcttctcccgacaaggtccttgtggaaaaaatggcttatttgtataacttctgccagccatgttagaaggaaaaagaatccccaaatcttactgtgaagtgcctgacatgtgagcctccccctcaggcctccagctttattgaagtataataagcaaataaaaatggcatttaagatgttcaaagtcactttgggaggccaaggtgggtggatcatttgaggtcagcggttcgagaccagcctgaccaacatgaggaaaccatctctactttaaaaaaaaaaaaaacaacaaacaaaactgtgtgtattggtgcatgcctataatcccagctacctgggaggcagaggttgcattagctgagatcacttcagcctggacaacaagagaaactccatctcaaagtacaaagtgtttcaatatatgctgaggtgtttaccacattaaacatgtccatcaccttgcatacttttttgtaggacacttgatgtattcccaaacttcaagtatatgatacactactaactacaatcaccatgatgtctgttaagtctccagaacttatttgagcctgcccttactagggaaggtgactcctaagattttataggctccaatttagagttgaatcatcaaatgtgcaagcaaaccaagctgtacctgctgcgaggctcttttctcaggtctcaaagctttggggttagctgacaaactgaagtagcacacccaaatgcttgttgcctttaaaagccagaagaggctgacttaacattgttcccttagcagtaagccacgtttggtggctgaggaataagaaacccttcactctaatcaaagttctcccttgagtatttctattacc

SEQ ID NO: 33750 - DNA, 1012 bp, Homo sapiens
tgttgctctgagagtgcaagtgccatgttgaggtatcgatgtaagccttttattcccagagtcagtactggctgtgggcttctggggaagaggtctctctactaggctgagggcagttttccagaggaagtggcttgggaaccattagcagccagcagtcttagctactgggtggtaaatgccttgactcagtgaaagggcaccgcatgaagcaccaactattttcatcatacatgctggaacaacttgtcccactgatggcaagaagggggtgtgattgtgtaccagcatactctggttgttgccaaatctgcaacttggtgagtatgtggctgagcatgttgccacatgcagcaggtcctcttcacatctgagaagggcagtgcacaccagactctgtgaagctcagcatgtttgtggtgccaaatgtggagacggaagtatcatagaaatccagaaaggagaagtggaaggaactgtggctggcaggatggcagtgacatgggcatctgtcactcagcatagcagggaccttgggacctcaccaagtagaattgaagagcacaagaaccatattagagaatggtgaaatctagtcagaactggtaacaattcttcccttaactaattctattggaagcagtaagcccagccacaactacttgttttgtgatactttgtagtttagggtgggcatgactccaatttctacttatatcttatgggtctgaaggtcaatgggcttcccagggtatctacttaagaggaacagtctcagctagcacatgtttttgcatttcccaaatctagtgacttcatatctagtgatttcccaaattgagcaatttcatatctagtgatttgaattggatttgctttctagtctctgacctgcttttccatgtagaagcacttggcacagctttcctgtcgaactgctgcctttcctatagagccctccagataaaatctcatcttcagtgactggatgtgcttggcaagtgagatggtg

SEQ ID NO: 33751 - DNA, 1031 bp, Homo sapiens
ccatggtatatatatgccacattttctttatccagtctatcattgatgggcatttgggttggttccaagtctttgctattttaaatagcactgcattaaacatacatgagcatgtgtctttatagaatgacttataatcctttggatatacctagtaatgggattgctgggtcaaattgtatttctggttctagatccttgaggaaatgccacagtcttccacaatagctgaaccaatttacactcccaccaacagtgtaaaagaattcctatttctccatagcctcgccaacatctgtttcctgactttttaatgattgccattctaactggcatgagatggtatctcactgtggcttgattagcatttctctgatgaccagtggtcttttgttcatgtttggccacaaaagtgtcttttgagaactgtctgttcatatcctttgcccactttttcatgggtttttttcttgtaaatttaagttccttgtagattctggatattagacctttgttggataggtagcttgcaaaaattttctcccattctgtaggttgcctgttcactttgatagtttctttggctgtgcagaagctctttagttcaattagatcccatttgtcaattttggcttttgttgccattccttttggtgttgtagtcatgaagtctctgcccatgcctatgtcctggatggtattgcctaagtttcttctaggatttttagggtattgggctttacatttaagtctttaacccatcttgagttaatttttgtataaggtataaggaaagggtccagtttgttttctgcatgtggctagccagttttcccaacaccacttaagtagggagtcctttcaatcttatgctcttttgccacaaggataaaaacctctcagggaattagaactgaaccaaaacctgtgcagtggctatagcagagctcttctagactcctagttccaggttcctttgaggtatgtctccaggcaggagcagttttgtccaagtcttctcataggttcaa

SEQ ID NO: 33752 - DNA, 1028 bp, Homo sapiens
atgcttaagttgagatttgaagggtgagtagacgtttatcttggagggcattcaaatcatagagaacagcacatgcgggggctcggtgttctgaaagtcactgatatattcaggcaaatatcttttttcctaccctgggattggtagaagttgcaatgggaggtaagcaggatcacatcacagaaggctgatcccctgttataaatttggtctctctgacttcaatattcgcttgagttactgtaatgacctggatgagaaatgagggcatgaatgatggaataagacatgatggatttgagaaatttaaagactgaacagatgccagctgaaacttatccagggtcctagttctgttgagcctcaaactaattgggagacaactggctgcccagggataggaaagttggtagttatccaatttgattcgagatttcctgagttgagatccaagttcacgtcactcaggggcaatagaaggcatttagccacactgctaatatttgattctgaacttctttacaagacagtgtgagagcggtcaaacttaacaaaccacaaatctaagaatgtaataggttatgagcacaattcaaagctttaatgctggtcactcctaatgtaaaaggttggtgaaactccagttttcatacaattgatgtccagtgccaaggtccatactagatgatactttctaatttgattatactaatatggtaattgagatgtgctgagctaataatctaatgattgaaaggcaaatagttgcacatttatactattctcactcctaaaattctcccccatttgctttccctgtaacttctctacactaatgtggcagtttggactgcccataccggcagatccctggctaatcagtttgaaagagtttcaaatgaatgacattcgattttaaaacaaaaagccccctggctcttgtaaacagaaataaatgtaatgagaggtgagaggatattgggtagctcatgcaattatcaggaacagggaatcaagctcagaaaatg

SEQ ID NO: 33753 - DNA, 1051 bp, Homo sapiens
aggggaccggtttttctgacccatgatacagtagggatttttaatgtatcctatgtatttaaaaaattatccttattttttgacttttcttaagctttattttctgatcaggtaaaattatcgttagctcatttagaatctaagcataaaaaaaaacagaaaacaaccaacttaatatgtaaattctctttaacaaatatgtaaaaatactggctctgatccagacacaatgctggtgatacaaaaagattatgaccttttttcctcaagaaaaatacttctcgtaggcgagatagatatgtaaataaagtacaggaaaatgtggtgagtataataatagaaatgtgtatattgggctgggtgcagtggctcacacctgtgatcccagcactttcggaagctgaggtgggcagatcacctgaggtcaggagtttgaaaccagcccggccaacaaggtgaaatcccttctctactaaaaatacaaaaattagccaggcatggtggtgcatgctgtagtcccagctacctgggaggctgaggcaggtgaactgctttaacctgggaggcggaggttgcagtgagccgagatgcgccactgcactccagcctgggcaacagagcgagacttcatctcaaaaaaaaaaaaaaaaggtatgtgtttatatatatacatgatatagaagttacagaaaagtagcaatgattgtttggagtagcaatggaacaagtaggtcaaggatgggttctaggaggagttcgaaaatatataccaggtagataaagggtcgttcgtatttcaaaataacatgcatgatgatcagtggaccacacattattgattcaactgttttaaagaaaccaaataacagtgatttaactttgatagaaagttaattttctcccaagtttaaattggttttcagctcagggcttcttcgctccacaggattatccagggatcaaggtttccaccccacctcttttttgttgttgcagtcttctagggtttttttttctatgtggttgaagcttgctgactactatgtctgaa

SEQ ID NO: 33754 - DNA, 1091 bp, Homo sapiens
atccaaagcagcagtcctctcttcagttttcagtcaaaggtgattagtcatctagagactatcagaacagttatagttaatagaagctgccactttagaaggaacatgtgattgtttaaaaatcatgtatgtgtactttgctttttttttttaagttctgtcttctgtaagattgtaaaaatcctttattcacattgtaatcctttatcgggggaacctgcccccaatatttcatcgtaagttctttctattttccataagtgtcggccggctgagaaataaagagtataaagagaggaattttacagctgggtctctgggggtgatatcacatatcgctaggaccgtgatgcccacctgagccacaaaaccagcaggtttttattgaggacttcaaaaggggagggggtgtacgaacagggagtaggtcacaaagatcacatgcttcaaagggcaaaaaggagaacaaagatcacatgcttctgaggccaataaagatcacaaggcaaagggcaaagcaaagatcacaaggcaaaggggaaaatcaaaaactcctgataagggtccatgttcagctgtgcacgtattgtcttgataaacatcttaaacaacataaaacaggtttcgagagcagagaactagtctgacctcaaattcaccagggtggggttttttcccccaccctaataagactgagggtgctgcaggagaccagggcgtatttcagtccttatctcaaccgcgtaagacagacactcccagagcggccgtttatagacctccccccaggaatgcaattcttttcctagggtcttaatatttaaaagaattgagcgatattgttcctacttgcacgtccatttataggctctctgcaagaagaaaaatatggctctattctgcctgaccccacaggcagtcagacctcatggctctcttcccttgttccctaaaatcgctgttattctgttctttttgaaagtgcactgatgtcatattgtttaagcacacgttttacaatcaatttgtacagttaatgcagtcatcacagtggtcctgaggtgactgacgtacatcctcagcttatgaag

SEQ ID NO: 33755 - DNA, 1033 bp, Homo sapiens
ttaagtttaattctgtttagttttaaaattttcttcttcctttatattttaattttttaatcttttattttcatttggactagggaaaattctgagaagattgctatagcttcataggtcaaagtaatttaggggaagtgggtgacagaggaggaaagatgatacaaatggattaagcatgaataggccaggcgcagtggctcacgcctgtaatccctgcactttgggaggccaaggcgggcggatcatttgaggtcaggagttcgagaccagcctggccaacatggtgaaaccccgtctttactaaaaatacaaaaaatagctgggcctggtggcagacacctgtaatcccagctactctggaggctgaggcaagagaatcgtttgaacacagaaggtggaggttgtagtgagccaagatcgcaccattacgctccagcctgggcaacagggcgagactccgtttcaaaaaaaaagcatgaattctgacaatttaggggctcgctggagagtatgtagctttaaaggtctgtaaggttctggaatgtgttggatgtgttgattatggtatgatatagattgataatagcatgttgcttgaaattcaaatttaaaaaatatggcaatgaattaaagataggggttttcaaagaagaaagttaaagaaagagttatgtctttaaaaatgtttggccatgctgagaaaacaaaggtgataattaaaatctaaggtaaaagataattaaaacatgaggcagaaacagaaaggaaggaaggatggatagatagataagagtttggcagtagtggatgaaaccagagatctaaggaaaaggaagtcaggaaataagctttagcattagtagtttatgctgaatgtcatactcctaactccaagccttacaagatgtgtaaggcattcacttgcctctgtaagcctcaatcttttttactataaaatgatcataagaatggtcacctgtggctcactgtattttaaggactaaatcaggtaatgtaaatgaaatagctt

SEQ ID NO: 33756 - DNA, 1029 bp, Homo sapiens
caaacatagaagaaaaagagatcagtatttgctgcattattagtggtcaattgcaattttctggttctaaattttattatttttattattttttttttgaggcacagtcttgctctatcacccaggctagagtgcagtggtgcaatctcagctcattgctgcctctgccccctggcctcaagcgattctcatgtctcaccctcctgagtagctgggattacagatgtgcgccaccatgcccagccaattttcacatttttagtagagacagagtttcaccatgttggccaggctggtcttgaactgctgacctcaagtgaactgcctgccttggccttttaaagtgctaggattacaggtgtgagccactgtgcctggcctctaaattttatcaaaagaaatatcaaaagaaaaataaatttttacaagcaaattattggcagtgttattttatatggccttatattgctaaactggtaaagtattaatgctatgacttgagaacttaataaaatcaagaagtcacaaagaagcttctaacatggctgctttctgaatcacagaaactctaccatggctttttctggagaaatatcttgagttctgttgacatatggaagtcctgtgaagttacagtagataagacagttgccttgggatagggaaacatcattgaattggaggttaagagaattgagctttagtctgtgtcccatcactctccatgtgattttagccattcccacaaacgctgaatcccgggtttttcctataaatgctatttaacaggttacattgaagaggctcatttgatagacaatatgttttatttatgggtgagttagggtagttgcactctgggctgcagagttgtttcactgagagactctatgcttgaaactcaataactcaatgttgggaagagaagaacttggctggaaaaaagtaacctaattcttttattctgcaagcctttattgagaggttctgtgtcaggttatgtccagtaggtgggtacagacatcaaaa

SEQ ID NO: 33757 - DNA, 1045 bp, Homo sapiens
gaagcttaaaggagatgaacatgaagcaactcgtccagtgctgtgacttacagtgctcaataaaggttggctgctattattgttgttctatagcagtgacgactggcaaggttggataaatgactcttcttccctggatcaaaagtgttaagtgttgggattttcctacttgggatacttttgctgagaaatgctgacaaagtgaatcacaaggcactaactcttagcaaatttgaaagaatatttttcaaggataatttaaaaatgtggaatgttgactatatataacactgcaggaaaatccaggctttggagtttgaatcttggcaccactacatacatgctgtgtggtctcagatataatactttatacagccaggtgtcactttcattatctacttaattgggattatatttctcctaggtttgatgtgacagttaactgagaacatacttgtgaaagaacccagaactgtccctgcaaggaacacgtactcacatcattcaggtggtaacaagatgtcggagtagaaatgagtgagttatagagtccagggtcttggttcaggttctggccctgtaattactagctgtatagcttggagtaagtcacttgaatgaaatgaggtctcagtttctaaattagtaaattaagagagttaggttagcttttctccaagattccttagcccagtatcgtgtagtagagctttctgtgatgatgggaatgttccatagctgtgctgtccagtgtggtagctacgagccacatgtggttattgagtacttgaagtgtggctgacgatactgaggaactgaattttaaatttcacttaatgtcaatgaattaaagtttaaatttgagtagccacatatagatagtggctactatattggacagtgcaacattagagttttaaaattcttaacgtactctagtacttaaaatacagcctcatgaatggttctcaccctgggtggaagcttactggagtacttttagcagttgtgagaaaagtaatacaaagtttgttatagtacctaa

SEQ ID NO: 33758 - DNA, 1023 bp, Homo sapiens
ccagcagcagtcgacccaataccctataatcagatattgaactcagtacaaagcagtttgggataagtgtcagtaggtagaagggcagcaccatggtgaagtggcagagctccagattcttggatttaagtctgagctcttcactactgtgtgactctgggcaagttacttaccttgtctttaaaatagagataatagttgtgcctatattacagagctgctgcaaagataaatgagtaacatgtgaaagtacttggaatatagtaaatagatgctcgcaattgagaatactcttattccagaggaaatcgtttttgatcttggccttgaaatatgggccagtttagaattgggagagatgagagaaaggctcttaggatataggatcagtataagtaaacgcataagtggcaaagggagtccagtttgaagcgagagaagtgatgtaacactgagaagggattttaaaactccagatcacatagggcctggaataaggcatttgaattacattctgtaggcagtggggatgctttgaaatggaaatcatttgctcttggattcagagtctgtcagtacaaactgattagtatattgttggagatgagatatcggagcaccatcctctgttgtgttccttctcctttttttcatccatgtccaggtgcagtttctctgtagagctttggagggggtgtgggtggctccatgtaagtgatcatcttcttgaaaaagagagatcaatttgcagacatattccaacagtgagtcagtactaagttcattattagttcagcaaaagtgggttcatgtggcattatatcaagtagaactccctattaataggcattaacccactcctttgatattgatgttcataatgatcctccccaccatcctgaggtggtgatgtaatcttttttcttcctctttattctggtgagcacttctcacaatttgccaagattaaattatgctccagttagtaataggaaaaagtacatttagttgtattaaaatttt

SEQ ID NO: 33759 - DNA, 1049 bp, Homo sapiens
gtgtattcctgtaagctgtttttatgcgaacttattaaggtcaaggatgcttactcagtaagagagactgtatctttaaaactatgaacttggccttgcatggtgcctcacacctataatgccagcattttggaaggatgaggcaggaggacgcttaagcccagatgttcaagaccaacttggttaacatagcaagattccatctccagacacacagaaacacacacacacacacacacacattagctgagtgtggtggcatgtgcctatcttctcagctacttgggcggctgaggtgggaggatcgcttgatccccggaagtcaaggcttcagtgagccatgatcataccactgcactccagcctgggtgacagacggagaccctgtctcaaaaaacaaaactaaaaccaaacaactaagaattcaatttttttgttttgtagataaattattattattttaaattttatttgtatacattcacagggtgcaaatataattttagttacatggatatattgcatagtagtgaagtcagggcttttagtgtatttatcaccagaataatgtgcattgtacctattaagtactttctcatcatccacccgcctcctatccccacacccttccgagtctccattgtctatcatcctacactctacatccatgtgtacacattatttagctcccacttataaatgaggacgtgtgatatttgtctgtctgtgtctcaattgtttcacttataaacagaaagcaattaaaaagggtaaacagtagtgtttttcaaaaaccaaaccacaaaacacagaaacacagtatcattccaacttttgaggaggaagaactttcttttttgtttttttctaagagaaaatggccatgttgctttatttattatactgaaagcaatacagccttgttctaaaaaaaaaaaaacagcaaatataaaagagagaatgggaagaaaactccatgaatccaagtaattccacaaacaaaaataattaatactaaatattagatgagtttattgcagaacttttcc

SEQ ID NO: 33760 - DNA, 1015 bp, Homo sapiens
aaaagatcaacaaaattgatagaccactatcaagactaataaagaagaaaagagagaagaatcaaatagatgcaataaaaaatgacaaaggggatatcaccaccaatcccacagaaatacaaactaccatcagagaatactataaacacctctacacaaataaactagaaaatctagaagaaatggataaattcctggacacatacaccctcccaagaccaaaccaggaagaagttgaatctctgaataaactaataggctctgaaattgcggcaataattaatagcttaccaaccaaaaaaagtccaggaccagatggattcacagccgaattctaccagaggtacaaggaggagctggtaccattccttctgaaactattccaatcaatagaaaaagagggaatcctccctaactcattttatgaggccagcatcatcctgataccaaagcctggcagagacacaaccaaaaaaagagaattttagaccaatatccgtgatgaacatcgaagcaaaaatcctcaataaaatactggcaaaccgaatccagcagcacatcaaaaagcctatccaccatgatcaagtgggcttcatccctgggatgcaaggctggttcaacatacaaaaatcaatgaacataatccagcatataaacagaaccaaagacaaaaaccacatgattatctcaatagatgcaaagaagacctttgacaaaattcaacaacacttcatgctaaaaactctcaataaattaggtattgatggagcgtatctcaaaataataagagctatctatgacaaacccacagccaatatcatactgaatggacaaaaattggaagcattccctttgaaaactggcacaagacagggatgccctctctcaccactcctattcaacatagtgttggaagttctggccagggcaatctggcaggagaaggaaataaagggtattcaattaggaaaagaggaagtcaaattgtccctgtttgcagatgacatgattgtat

SEQ ID NO: 33761 - DNA, 1070 bp, Homo sapiens
gttctcatggttttctgtccctatgttacgaacttcaccttttcataatttatttgaaatgggttatgttgacaatatgtaacaaatgtcagtgaagatcgtggcattgcaaacttgtgactgagaatcaagggacccacctaaacctgtgcttccttgctgttccagtaattgtgaatgtgcataggctggaaagagcttaagtgtaaaagaacaacatagtactctagcaaaacacacaaatggtacatttatgaccatgcaagaggcatgagccatcaagttccagattggagggaagctattgcacatggtgtagagaaaattttaaatgttttgaacagtgtctagctatatgctaatgcagaaagttttgaacacctttggactttgagagccagttgagtattcaagactattaggaaggtaaaaagagtggtctggaaattatactaagtttaaagctattttttctattgattttttttgccttattttcagaacctgacttacaaattactgtggcagattgtcagatctggttaagtccaaaatcgggctttgtaggtcaaagaggcctccgtcacttttaaacttaatcttggagtttggctgatgctgttcccgaggcccccaaaccattaactcatctgtgctcgagatcactgaagctatacatccacgctattcctaaagcgcagctgtgtgttgtgaaaaatgattttctcattgtcattaagagaacaaatgccacaggatttttttttctacaagtcgacaactgaagaaagccatttctccctagttgatagaaaggctgtcattgcacagaatggcctctcttatccttttgtgcattaactcagcataattttcaaatgtaaaacttctaagaggagcataattctagaaatggcaagattataattatgtgcagcataaaggataaatttgtagtttataaatcatggatattaatattcagcaggagcccaattcatggtaaaacttgaaataagtacattgttaaaaataattgaatttgggttttagaagaaattttagcagtt

SEQ ID NO: 33762 - DNA, 1021 bp, Homo sapiens
tgaacaaggcactctgtgcttttttcactgggccccacaaaattatgtggcagatcctggctcttggtgttttacatatgtgtgtgtgcgtgtgtgtattatatatatatagcttacaaacatctttgaggtatggatattattatccctattttacaatcaaggactatgaggctaaggcaatttcctggagagcacacgtgttgtgaaggggcagaatgggaacttttgttgagaaatcttggcctcaaagcccactgtctttccaccttatgctagtgcaagtctaaagtaaaagtgtacaggggaagggaaaagaagctaatggtaaatctttgttttgtggggtgggatggtatggaaacataggggttgctgaagggcttggcttctggcaaccatttaacatgtatacacaccccttaatttttaaagatgaataactcgattttttttttaaagacagcttggcataagactaatttataaggaccttactccacagatctggtgactgacccaacaagtgtgattctgtattattcataaaaggaaaggctaaaaaaaaaatgtgaagggacaagttttagtttaggccatgaattggtggcagtcttcggattagaacacctttgtgcttgcttttgcttcaacatttagctcatgtttttctttatttttttcacatataggcatgagacaacatagtggttttggaattgttttgatgataaaagttgtagcagtcaaaaatgcaactacttggtattcctgtattcacatcaacaaaaaccaaaactttgtgtttggtttccttctcccacctgcattttccccactttttcaaagtgagagtgtattttttttaacatttttcatccaaagcatttggtagtgaatttttttcattagttacctatggcagaaaataggaattttctctctagagaaagttctcaaggaactgagaatttccaggcctgatattcttggacaatattatggcccaatttctaataac

SEQ ID NO: 33763 - DNA, 1038 bp, Homo sapiens
agtatatcagtatccacctctgctcattctggagcatgaaaagaggcagaggaaacagctcattgctttctagtaaactgctttctctgcctttcccactatgacacagaaagacaagtaagagcatcttggcctctggaagtggtttcaggggaactctgaggaaatccttagaacccagcctcaacaccatgaaaggactggtatttagacttttaatattatcttcagtagccactaactggtggataaactcatggtattggaagaagacatttcttaaacaattttaattgttaagtaaagcgtttgaccttcttagtatttcctttttcaattttaaaacatacctggaatctcaagaactggaaatggtttagttttctcttgccctctgagaggtcaccctggacaagtgtctttctggatcttcatgtgtagctcacaactgttcctcatagttttcttcctcctcagaggtggggtgtggtggaggtagggatctggggagagaatagagaggtgagcctagcagggatgtgcatttatgaagggtaatgtattatagtttgctatggtttgaatgcttgtgtccctccagaattcagatgttgaaatcctaactcctaaggtaacggttttagaaaacagggtctatgggatgtgattagatgacgagggaagagccctcatgattggggttagtgcctatataaaagagagctcagagacccagccaacccctttcaccatgtgaggacacagtgaaaagtcattgtctatgagaaagtgggccgtcactagacactgaaccagctggcactttgatctgggacttccagcctccagaactatgagaaataaatttctattgtttataagctacccaatgtaaaatattttgttatagcggcctaaatggactacgacacagttctttatcttagctttgcaaatcagtagtgctggtggaactaggctctatgtccagttgtgccagatagcagcaccttcctgcactcagtgtttattgggacc

SEQ ID NO: 33764 - DNA, 1037 bp, Homo sapiens
gtgatgttagtgtgtcagttttagatctctcctgctttctcttgtgggcatttaatgctataaatttccctctacacactgctttaaatgtgtcctagtgattttggtacgttgtgtctttgttctcattggtttcaaagaacatctttatttctgactttatttggttatttacccagtagtcattcaggagcaggctgttcaatttccatgtaattgtgtggttttgagtgagattcttaatcctgaattctaatttgattgcactgtggtctcagagacagtttgttataatttctgtttttttacatttgctgaggagtgttttacttccaattatctggtcaattttagaataagtgcagtgtggtgctgagaagaatgtatgttctgttgatttggggtggagagttctgtagatgtctattaggtcagcttggtccagagctgagttcaagtcctggatatctttgttaattttctctttcgttgatctgtcttttttgttgatgttgatgctatacctttctgtttgttagttttccttctgacagacaggcccctcagctgcaggtctgttggagtttgctggaggtccactccagatgctgttttcctgggtatcaccagtggaagctgcagaacagcaaatatttctgcctgatcgttcttctggaagcttcgtcccagagggcacccgcctgtttgagatgtctgtcagcccctactgggagatgtctcccagtcaggctacacggtggtcagggacccacttgaggaggcaatctgcccgttattggagcttgaatgccatgctgggagaaccactgccgtcttcagagctgtcaggcagggacgtttaagtctggagaagctgtctgctgccttttgttcagatatgccctgcccccagaggtggaatctggacaggcagtaggccttgctgagctgcagtgggctccacccagttcgagcttccctgctgctttgtttacactgtgagcatagaactgcctactcaagcttcagcaatggca

SEQ ID NO: 33765 - DNA, 1042 bp, Homo sapiens
taagacttgcacatgcacagaacagggtagtggccatggccccctgatttgtgaaactgaattagagaactaagacttgcacatgcacagaacagggtagctgagggccagcttgagtgatgcagtaaagacttccagagtctagagaaggaaaattcagaaccctgaggcaatcaagggtattttcaaccaatatgatccttctaaaattgacctcctcaccttctcctgcctaaaactctcagtggtccctcattgatctgaggccgaggtccaaattccttagcttgtttgccaagacccattctaatctagtttcttcccaactctccaactctccattttctcagctctcacttcccactctttcctctctctaattttccagtctggcagcttcttgttgttgctgcccctggccccaatttgaggctgcttcttcctcagtgtctgttgctacttggctcctgcactagattgctggcctgctcatccttactgtgtctgactggcagctctgattgatcttcaaacaaaactttgcccaggttgttttccatgcagtacttttcccccacccttaaagatagcatcaatctctccttgctcttcctctctaccttgtacttacttctgtgactgcatgtaatgctggtttttttgtttctgtttctgtcataccttccggttttaagctccttattaacggtgattttttaaaaattatgtactcagtatctgatatagcgtttggcacatacaaaatgcttagtaaattctgagctggaatgactactttaaacttcaggtataaatatagggtagattataggaatataggaactaacaactgcatttgtgtgtgtttaatggctttaatagtactgatcacaaagtcagcaccacatacttattgctagcaatactgatattaattgagtctagtcagatcagaacgtgcacactttttaggcgcccttgcctccagaatcaactttttccccccatttttctttctcaaaaagttgaaattgtgcgagtt

SEQ ID NO: 33766 - DNA, 1028 bp, Homo sapiens
ggctcatagacttgcctcatttgggaatatcctatcacattatttggaggtaagtgttcagccccttctgaaataatatgctgcctgaactcagtcaggcagtcactaatggtggggtagtacagcgccagccttgggcaggctgacaggcagcttttgacattatgggctgaggaacaggaccttgggatgtgacagtataagaagcaaggatacagaggaataaagaaactggggcatagccaaaaaatgaaccttagcagactattgattgagcagggaaaatttgatggggtatatgataaaatcattctccaaagtttttctccaatgttatatttgggctttccctcctacaaattatgactttttagctattgttaagtataaaacagcaatttgcaggagacctaagaacattgattcgttttcatctttgggactcctttttatctttcaactcttacttccaccggtttacccttttctctctaataactctttcttagaatctgaaataccccaaatatagccagtactccacagtgggatacttcattagtggaaaagagtctgggttatagaatattgagaatgtgctaagcactgaattttgcattagcataaataggataatttctttaagatttaaaaaaagactgtgaacaatattattagcatttgtgtgaaaaaatataaaacagaaggttgaattatgctaaatagtgcatcaattctcctgcctccgtttagcttacctggttgtcagaagttattacttaaattatttgggctactggctgagacttgctatctagagatattggtgaactatattgttataattggatttgaccttcagccccctttaattcatttatttggtaactttttttttgattaagggaaaagccccaacttagctgaactttttgtgcattacatttccttttaaatgtttcctttttattatgggaaatttcaaacaaatataaaagaatagtgtaatgaacccccatgaattatca

SEQ ID NO: 33767 - DNA, 1069 bp, Homo sapiens
gcttcctatattatttttaaatttccctttagaaagattgtgccaacttataatctcatcatcaacaacagtgtatgagagtgttcatttccaatacttcctccaacattaggtgtaatcttttaaaataagcttcatctaaatcatcttaacctgttctgaaagcgctgagtcagtttacaacagggtactaatcagggctttcgaagtgaggactttgcagtacgccttactctaggtaggccactcacagaaggggcagtgattggagtaagggtgtttatgttcagtgatttccacagttaatttctaagatgttttcatagtcaggatatatgtatacatatacaagccaagagcggtggaagcatggttgttgtttttcactacttttcttcttcatattattattttatcatgattattatttttatttaattttagtttttatgttcacaaagatacttcaaaattatttatctgagagaacaactctgaggtgagctcattgaaggaagggttagagaacctaactgagctatgagaagctcggaatgcacactgtggctacatacacatagcctcaatgagctcagcaaacacaatttataaaatactttcaagtttacaaaacttttaatttttttcttattgaaaaaactatataagaactacatcaagagattcttaaaaagtactgatatggtttggctgtgtccccactgaaatctcgtcgtgaattgtaatctttataattcctacgtgttgtgggaagcacccagtgggaggtcactgaatcacgggggcggtttcccccattctgttcttgtgatagtaagtgagttctcacgaggtctgatgattttataaacatctggcttttcccctgctggtgctcgttctctttcccgccgccctgagaagaggtgccttccgccataattgttaagtttcctgaggtctccccagccatgcagaactgtgagtcagttaaaactcttttctttataaattacccagtctcaggtatttctttatggcagcatgagaatggactactacaagtacc

SEQ ID NO: 33768 - DNA, 1024 bp, Homo sapiens
taattctagctttgctgttagtagtttttgaggggaagccatgtatcctctctgagtctcagttttcccatctataaaataggtataattatagcacttatcacatattggtttaaatgtagtgacacacgtaaaaggccttagctttagacctgcctctgaagaagggaccaattaagggcaagtggaagcctgtaaggagagtggagactgtccaacaaggaaatgagttcatccttcagttctgcactttctagctatgttttcttatgtttaaaactaggacattatgtctgtcctattgagttgttgcaaggattgtgtggaatgggataatgtgagcgagcaactcttgtcactagatgtgttttagataaacattattatgaagatgttagggatcccctggggactagattgcagggtgagagtgtgtccaagaaaggctgagcattagttggaacatttgtgctcagtaacctgattattgtgatgctttctgggttgtgagtttctggaaaacttaaatcaaattgcttattatgagaatttttctgacatgtggaggtagttcaatctggaagtgaccttggaaataattaaaaattaaaagcagctttgttgtctggaatagtatgtgaagaaaatgtcacttgttcactccaaatctcaaggtcttcccttctacaaaacatgagaacagcttctagaaatgaggagttatttgggattgttgattttttttttagaggagtagagaaatgactaattttttcattggtgagtaatatgctacaaagactcgtagaatcatatacttttggacctggaaagtagcttaaggaccatctgattaaaattttaagttttattgatgaagaaattaagctcaagaaaggctgttacttgtccaagatcacagaagtattaactattgaagcttgagaaaacagccagttctctgctcaaatttcagctgaaactacattgtataataaaataactcaacataacattacaacag

SEQ ID NO: 33769 - DNA, 1048 bp, Homo sapiens
gaaaatcggtctcattacctgcagtcatgttccatcagccctcgtcctactcagtttactgcctaaatgtagcacagagctctcccttttttcctatcctcagcgacctggcctgagcttgagcttttatgattgtttgcctggattgttgctgtagtgtaacagctctctttatatcaatttgtgttcctgtcccacccatacccattttctaggctcttccacactgatgctgcaatgatcttcctaacttaaagacttatcttatccctagaggattttgtccatggcatacaagactttttgatagccttccagccttcattccccccacccctcaccctctgcctactttgtgtctgggagtgtccagcatcaatatctaccagactatgagctctatgaggacaggatccattcatacatgtacctctttgaaattctgggatccagaatggggccgggaatatggtggggtggtaaaaacttctgtggaattgaattgaaatttgtacaccttctgaaactaacaagattttagcttgttaacaaaccagattatacctccttctgtctaaacactaaattcttatttgatggattcagcattgtttgtcgaagcaccctgtgaaatggaaaatagacggctctttcctctgactgctcaacaaacctccagaagtatatttagaacatttagcacttgaggagtgttaaagactgtctgtatatttcataaggctgtcctcctcctcatctgatatgaggaggtggtattaatttctaaaaatagtagaaaggcagagtaaagcaatccaagagagtctcctacactgtgttcttcaaagtatcttttgccttttggctatcttgagaacaggaaacgaaataatttagcagatttttcagtgtttcttgaatctgctttacattttcataattcttcccttgtcatattctgtgaatcttttcatgttctttataacattgattttagcatttatccagtgatgtttaaccaaagtggatggattcagtcttatttcaa

SEQ ID NO: 33770 - DNA, 1880 bp, Homo sapiens
caattgtttttgttgctaactactagaaaacaatttgtgggatgagcccgtttctttctctctaaccttttctagacctgaccatgcggggctagacgccttcagtgtttgaagtggtattaaacaagatgcaacaggcagatgacacacagttgtcaacatttcatgtattgctgttctctagaaaaatacacccaaacctcagatgacaaaagagaagtaaagacattggtcttttagtggaggctgttggaacattgccaaactcttataaaaagcattttattccacattttcacattccatttttattcacctttttatgagtaaatttacatgtatagattgtagatatacaactccacttaatttatttctcattctttgaaaattttggctttttctccctattgtaagaaaagtctctgtaatatttctcagtgttaaagagaaaaaaatcctctgttttaattaaatgttggggtcaaagatttcacatattctcgggaccagttaattgaattacctaattattccaagagtgggtaatatttaaaatggttttattagtggagatccacaacttaggaactggtttccttctaagttatgagcactttccaaaagttgtttgggactcggaatgccatcccctgccctaccccacaaagaaaacaatagtttaaattatgataaatgaaaattagttttccatcctaatccacaaatctttgtaacccatactggggctgatctatagtgctgtggtttctttttgcttctttggaaaaattaatgccaagtcacaacgtgacatatgacttccttcatagctccagtgttgaaaaaataatattttgttttccctttgccttggactgttagaagtttttctctccttctgctcgaacagaagcagtataaggagttcttattcatttttctcttttcagtgcagggacatgaaaggagttgggcatggccacatctgacaaagatggtagcagaaagagattttttgctctgcttgtccaacctcccatgcccactgccccacccactggccctgatagtgaggatcacattggccacctggcctgaacaacagttgggttcaataagctggcgatagctaggttcctgcactaggcacagaaagctagaaggcaggtcaagtcagagtccctgaagacaagcattaagtcaaatggtttgtgatagatgttgcagagcaaatagcttggtattaggcagaaatggggtccaaccgtaggcaggaagggaaccgtttgtgtgggatgctcaggagtttccattggaaagggaggggtagtatgcgatgcttggacctctgtgaaaaggatatttttaaagtggtgtacttgttaagtccagagctacccataatgctttggagtaataaaaaaatggaatcagtacagattaaggaatataatataaggaatggaaaccacatttatgatcaattaataaagatctttttaaaatttcatgaaatgttaagaaaatataagaaaatatttagaaaatttatcattttataaaatgctgatgtaaatttagtacttatataaaacactaaaattcttctaaagggaaaaaatcttacctgagataatgtcttatataaatgtaagtcattactatataacagcttccctatggaaagaacctaaagtttaaaggcatgttaaaaacgtttttaaaaatatgttgattattttaatggggttgtacttagatataggtacaacttagttaatatctttttcctttttaaaaagctttataatattttctttattcctttcatcatcgttttcatgaacgtcctttaaaaagtaacatcttactttctg

SEQ ID NO: 33771 - DNA, 1032 bp, Homo sapiens
tctttatttctgccttcatttcgttatgtacccagcagtcattcaggagcaggttatttattttccatgtagttgagcggttttgagtgagtgtcttaatcctgagttctagtttgattgcactgtggtctgagagacagtttgttatcatttctgttcttttacacttgccaaggagtgctttacttccaagtatgtggtcaattttggaataggtgtggtgtggtgctgaaaagtgtatattctgttgatttggggtggagagttctgcagatgtctattaggtctgcttggtgcagagctgagttcaattcctggatatgcttgttaactttctgtctcgttgatctgtctaatgttgacagtggggtgttaaagtttcccattattattgtgtgggagtctaagtctctttgtaggtctctaaggacttgctttatgaatctgggtgctcctgtattgggttcatatatatttaggataattagctctgcttgttgaattgatccctttaccattatgtagtggccttctgtgtctcttttgatctttcttggtttaaagtctgttttatcagagactaggattgcaacccctgtctttttttgttttccatttgtttggtagatcttcctccatccctttattttgagcctatgtgtgtccctgcacgtgagatgggttacctgaatacagcacactgatgggtcttgactctttatccaatttgccagtctgtgtcttttaattggagcatttagcccatttacatttaaggttaatattgttatgtgtgaatttgatcctgtcattatgatgttagctggttattttgcttgttagttgatgcagtttcttcctagcctcgatggtctttacaatttggcatgtttttgcagtggctggtactggttgttcctttccatgtttagcgcttccttcaggagctcctttagggcaggcctggtggtgacaaaatctctcagcatttgcttgtctctaaaggattttatttctccttcacttatgaag

SEQ ID NO: 33772 - DNA, 1028 bp, Homo sapiens
atctctgctccacctccctactcagcttcttcttacttcctctccagttctggctgtaaagcaccagcccagatggatctcagctctcaatcgtgtagttctcttgtttcctgaaaattttttctttaatgcttttccttcctgctcttgttggtttatatttttgaagaaagattctgttttgatcaatacaatgtataattagatgttgccaataagatttggaaagcacaatttgccctatatcaaccaccatacaggtaatacctccctccctgcatacgctcacggggactctgctacagttcttgagtctactccacgttgcttaagatagattgatgctaactctatgcctattcaagatttgtgattttgacatttgtttcctgtttgtctgacattgtgtaaggcttagttcatttgtttattataataaagttgctgaatagtgtaacatcagctaaccttcattttctcactgaaagcttattaagctgaagagatctgtctgtagtcaagaaacactaaatgatttcagtgcaagttcaatttccacatattccattaaacaatcagtggtcataatactttgcatatagaaaaataaagaaataaaacaacctaaaacagagaaaatagttgtcaatttaattctagtggttcaggcatttgaaataaatcccagttaggtagtaatacatgaatacaactgatcatatataatggggttaaagaattgctgaggtatgactggggttttccacgaaaaattaaaagttctgtgactccacccctcccaagtagactggccttcttgttcttgcagcatgaataccagagtaacaatgacaataaaattgtgttttctactcctcataagagaaagtgaagacaactgttccagatttatcttctgtataagatctaccacttcttagttattgacacttggtttgttctcaccatttcctctgcctttcatgtctcctttcctgacattgaagaaggctgtagtgataagtcaa

SEQ ID NO: 33773 - DNA, 1086 bp, Homo sapiens
acccacctatgcctcccaaagtgctgggattacaggtgtgagccactgccacctggtatcttccacattcttatctataaagtgagagtaattccagtaccttcctcagagggtggttataaggatcaagtgttttgatacaggttaggtgcctagcctgatgtctaggatacagtgaaggattaataagagttagctgcttttattatttttgtaattattcactcctccatactttctttcctaattcatataatcttcaacctttttgaaagttacttatatctctttcatacagtattggaaaaggggcaagagatcttcttgctaaaagtttgagtgacaaagatattgggggctattggataagaggaaaagaacatagactcctgagccaaactgcttggtttcaaatgccagcctcatgtgaccatgggcaagttgtttaatctccctgagtctgttcctcatctgtaaagttgggattaataatatctacctcctagggtggttgtgagaattaaatgaattcatatacgtaaagcacttcaaacagtggctgacatgaactgtgtgctatacagatgatggctgttaaaattatttttctgcattttctgtttgggacctggagcctcaagattgggctgtgtaagcactggcatgggggtggtgtctttcagctaatcaaatggttcctttctctttcttcaacattatctggagtcagcctgccagccccagtgctccacgtgtaccagtgggctggagtgctcatcctgccagcctcccctgctgatgcggcacgggcagtgtgtgcctacctgtggggacggcttctaccaagatcgccattcctgtgcaggtaatctctggctgggccacagttgggccagctaccaagacagctccccaaccctgaccccaccaagtgatctggggacaccaggagctggaagcactttttcaaataagagaagaaactctaaacaagacttctgatgggatgaggagaacagtgtgttagagaaatgatacatgttgagatgttttaataaccttattaggttattcggttcttatcaa

SEQ ID NO: 33774 - DNA, 1055 bp, Homo sapiens
tcaaatggtcctttcttcagttatgggagactgcattccaccctaattcttctcacgggtctattctagtttcagaacagctttgattttgttttttgtttttaattgacaggtgatttttactgtaagttatggttttttgaatcttatgaaactcgtgaattcataaaaatgtatgaattcagatttaatcagacgatcaccagagcttgaaaaatgtttcacagtccaaaatagcgctccaggagcagttcctgcccattaactgcatattataagctgcatatcaaaatgcaagcccattggcaactgaatatgtattttcagaaattgattgaatgtgaatttacccaccagagcagaaaaactccaaaagaactattctagcctgctgaaagcatagcatacattttaaagacttaggtaggttatacactaactttctctaagggttgtagaaggattttgtactaagagtcatggaaaaacttttccagatatgcatagttagaaagttttcagtgaacatgtagaaagattggaaaagccatctgaaatcctagtcacaaatggggcagagtataaaggtttaggaacagatgagtctgttcttagtttaagtgttattaactggaagagagtgatacaatgttggaggagacaaaaaggcaaaagttggattttgtataatttgcttcttagcagtggtcttatatacacagtttgctatgcactgcgagtaaacaggaaaagaacagcatgggttctggagttaaaatggatggatcttaatccaagctcaccacttactagcattgtgacccttagcaagttacttaaactctctaggcctcggttttcccatatgtaatatgggaaggataaaattaatcttaaaacggtaatagcatttctatgaaccagccaaaaataaaattatttgaaatatgattctgtgtataataacattacatattacatacctatgagtaaatgtaacaaaagttatgtaacttctagggaaaattgatgctatgactgactatgtagaaaat

SEQ ID NO: 33775 - DNA, 1047 bp, Homo sapiens
tcctacaccccagctttaatttcctagaagggaggccaaggcctaggttttctttccttgtgtattttttctgtctccatcacccacacaactggaattgtctatgtataatcagtttaattttgatcctggccggtcttatttcagatgcttaatatcccctctcccttcctaataaatagtgccacaatttagacaagatgtttaagcacaagtctagttcgcatttaagcgtgattaatcaataattgatgggtctgcctgatcataagattgggtcatgtacttgtgaaaatgcattcaagtttagagtacttgatttggggagagggataccactgagtaggcaaagcggtagaagctaagatagaccaaagcacagacttggtagattttgcattttttgttttggcccaaagttgtttaaacagagccaggaagactcagtagatactgtgccctgaagtgtttttgccatgctcctgcaaacattggtagtttactcataatgacctctgcagtgtctttttaataaatccgtccgtctctctgttgttatttttatataattagttatgttgcaaaaagtcaccgtgaaaactggattagcaaacactgaaccactgctcctactatggtgttagattcctgaaagctgctgttcacaacatttttgtcaactgatcaagatacaaccttgttttatgtctgttgcagtttaaatacaccttatttaatatatttggttgatttattaacattgaaatcatggccaacagctctgtaaatcatgcctcaatgaagattatctcacacttgtattttctctgtagtctttgctccttgaacactagacagcactttagcactacgcttagggactgttttcaacagtgaaatcaccaatagcaagcacaaaaatgagaaaaacatggcactaaatagaccatgaaaaggacacttgtttacactatgtaagctgaaactagaatgtgcacgtcagtagactcacatttttcaccattgtgcacatgtctgcaatgacag

SEQ ID NO: 33776 - DNA, 1043 bp, Homo sapiens
tgtatttcctctagaggtagtagttttattcaaggacaagctactgacactaaaacaattattctaaattttcagtattccaaaaaaacagtggaaatttataatgcatttatctccagtaaaggtgctaaattgtacaggatgggcatggtggctcacgcctgtaatcccagcactttgggaggctgagacaggtagatcacttgaggccaggagttcgagaccagcctggccaacagggtgaaaccccatctctactaaaaacacaaatattagccgggcatagtggcacgtgcctataataacagctactcatgaggctgaggcaggagaatcccttgagcccaggaggcagaggttgcagtaaggtgagatagagccattgcactccagcctgggtgacacagcaagacgctgtctcaaaataaataaataaataaataaataataaataaaaataaaagtgctaaattgtacaaacatgccaaatatctttgcttttaggctgtagtcaactattgtggttaatactgacattctcatgctgggcagattgaaaaggctatgtcttcgatattttaaaaataatgaaaatgaattaatatttgttagtatgtttcatcatggggtgcacagtagggaaacttggaaaaggtccttgatgttgtcaatgttagagaatgtactagaaagtgagacggatgtccttatgttgatcctgggtcttatatagtgttctttctgatcttgtatattatcttggttttctttcaccatttccctcctatttttttgtcagaacttgaagtagtttcatatacatccaatagagctcatttggtagttatcaaaatgattaaagccttgacttgggattccaaagttaagagtcttgaactaccatttcaaagctgccacacttttctagtggtcgggtataatatttcatctccaaaagattgggactgtttattcctttgttttatcttgcatgcatctggtgaaccattcatctacccacagcctgctatttttaggggact

SEQ ID NO: 33777 - DNA, 1047 bp, Homo sapiens
ttgtaagggctgtatgaatccatagtgttcgaggttggatgtaactaatgcccataaatttctagcttgagaaacccttatatacagattcaaggttcagatttgttttcatcttagaatagtggctgttttttttttttttttttttaaatacactaaaggtatttcaaaaagttgtggtgggccattatggatagtataaggtcaatttcactgatttttttctttttttcttttgctttggaagacgaaatataggaaacaatgtgtaagaacctgaatttaaaacaggaccttctcagagcctcttacagaaaatatcctgagtattatattaactgtaattggtattgttggactaatagtctttctttgaaaatgctagtgcttcattaaatttcccgtaattgtagtgattgtccaaatttagttccctcatttaaccatgagaaaatggagtaatgaatgaacccaaagtcacattattagtgttgattgtggagagtagaacttagttctcgtgaccagcactttttctagtagttatggcctctttcttttatttttatttttcattttgtttccttatgcctaagtacttttacttatggcctctttaattggctcctatgctgtataggcattggcctgtagctatagtcatagctcctgtatgtatgggcattgtcctttgattggggtggggacttggaactggtttaagggacctcgggacttttaatagtctgaaggcagctggagtattactgggtgcatggggagtatgaggtggaagacgtattctcaaatatttttgcttgaatttcaaagttaaagcttttctgctttgtattttcctaaggcagtcaaaccatgtgttacagttacttgagctaagatgtcacgattaattttaaaagtttaaattccagcttctcccaggttagtctgttctctcagtttagagaggacaagtcatacatgaaatagtgtatttgtgaactgtaaagtatgtagcgtaaaggtgcaatacttcagcttcttcag

SEQ ID NO: 33778 - DNA, 1025 bp, Homo sapiens
ctccacagacaaattaatatgctcaacatttctgaaaagacagggcaacagtgccgttctaatttttacaagaaggaatctgaggccaggttcccttagaagccaatttacattgacagtttaaagaagtggacatacaaacatatataggaccagaattaggaaaaagttctgtttgctacatatttcaataaagatattaaaaaataacttgattgtccgttttttttttgagaatatcatgaaagttctgtagaccctttccccagaaaaatttgcatataaaacctacatatggtttcagatggtgcatagactttatgtaaatacccttgcattatattcgttgatttcttataatgtttacaatttgaaattggcatacaggttttgtattttagttacttaaatgtttttcatagtggttataggtatttataatcagcatgaaaatattagaaagtgaaagtgtataagaatttgtgtttttagcttacatacaaatggagatcctgctgtggattcaaatgtgtgtatttgtgtatgtaattagagttttacatccaagttttatcttagtatgatttggcttttgtatcaaaagtacgtaagatgtttgtaaggctgtgtctagacttatctctgagtatcagaataatctgactaaatcttgcttactcatgtgctatggttacagtgatatgctataaatgggttataggtgtaccaagatttgatttttcctttcaccccctcagagtagcctggttgtggttgaaggtccctgcctgccaactcaggttgaaagtagacttcatttacccagtggtctggccaagttactggaaaacaacaataataactaggtggtttttcattagtaggataaatacagatttagtcgatggaatattaagtgcggggaatagtggaagtcggtgagcaggatatgccgtactctgacaaggttgagctgtctttgcaaaggagaaattatacaaacttttactctttcaatttgaaag

SEQ ID NO: 33779 - DNA, 1029 bp, Homo sapiens
ttgatcataaaagtatgggtgaatttctaggctctgagttcttttccatgatctacataagtgttaccttctaccagtaccacactgtcttgattgctgtagctttgcagtacattttgaaactgggaagtgtgagtcctctaactttgctttttttcaggttgttttggctgttttgggtcctttgaattttcatatgtatgtttggatgagtttgttcagttctgaaagacagggatttgataaataatttttgaagtatttcaatccagtctttcagtctatgagtgaggaatgtctgtttatttaataggtccttaatttctttcaatgatgttttatagttttcagcatacaaatttttattaagtttattactaaatattttattatttctgatacctttgtcaatagaagtgttttcttaatttatttcagattgttcattgctagtgtatagaaatacagttcctttaggctgggtgtggtggctcacacctgtaaccccagcactttgggaggctgaggcgggtggatcacaagggtcaggagtttgagaccagcctagccaacatagtgaaacctcgtctctactaaaaatacaaaaaattagccgggcacggtggcgggcgtttgtagttccagctaattgggaggctgagacaggagaatcacttgaatccgggaggcggaggttgcggtgagccaagattgcaccaccgcactctagcctgggcgacagagtgagactccatctcacaaaaaagaaaaagaaatacaattgctttaaattttttttttcatttttttatggcctgtgacacatcctctagagatcctgagaacatgagctcctacaaattgctttttaactaattatcttatatcctgcaacctgctgaacttgtttattagctctgatagggggtgtgtgtgtgtgtattcttataggttttcctatgtatatatttaaatttttaggataattttttttttggaggcaggatcttactgtgttgcccaggctga

SEQ ID NO: 33780 - DNA, 1029 bp, Homo sapiens
tacaatactttaggtgtgaattcagtaatatccagaaaaaaatactaaattcaaattggccaagaactgtatctttcatcctgcttcaatgtagtactgattcagagagttatgatattgaggcatgatattgaagtatttagcacttcatattttagaaaataattattttaaaaaataattttttgcttggaagtttctgttttaggttattatttttatcccgagatttaggatgctgattttataaagtattagaaaattcattaataggtaacataaagaaatgctttatgttacctattaatgaagaaaattgaagatggttatcctcagccttcaaaattcagtcactggttccctcctgtttcttgtacaattctcattgagattgataaaaagggaaatacctttgatgtgaaaaaattagtgtacctcattgtgttcacactttacaaagcagaatatttagatttatatatttttaaagtatacttgcattgctaaaattgttatctgggaaccctacaacatttactctaacacaagacaaattcctaaagtttgattgacaaaataaaactggctaagatttcttttgcctaggctatcatctggacagtgcaaagaaagatgtagtctaatgtggacattataccattaatagcatttttttttaagtgttgttaagggagtcttatgttcaatttgatgtatatgagctgaaaatatcttccttaaagaaaaaagcatcataaatcttttgtaaccatatggaacctgttatccctacttcagatatttataattttgtcatgtaataacccagtaatttttttgaactaacattttgaaatttttagagcttttgaactgttttcattggaccattgctgcaatattgaaagcaatcttttgtaaattactgttgctgaactcaccaagagtgtttaggtctattataagctccataataattataaaaataagtgcacttgttagctgagtttactaagttgatatgtggag

SEQ ID NO: 33781 - DNA, 1086 bp, Homo sapiens
ttttttaaggtctcttttaatttccagacagttaaaaacaatctagttatcttaaagcattagaaagttattatctggagagtgcagagatttcagtccatacacctttctccacaaagcagagccagaagtaactgactattgtgcctaaaactctgtttcatttttaaaaacaagtgccattaaaatggaatatctaatgataagcatatgaaataatgtgtaattagctcaatttaactattccacaacttacatattccaaaacaatgttatacatgataaatatatataatttttgtcagttaaaacaaattaaaaaaatggactatcgtcgcacagaagcctagaacaaaaatatgaagagaaatatctgacatttgtaaagaaattataagaagaaaaaaagatacagaacagaaaacattcactactttagaaacactttatgcatggcttcttgccccaaacttttattgtgatggccctaataaagcagattattggaaaaattggaggacaagggttgtataaaaattttattttatgaagaaaatatgtagcggaaactgaattttcaagacatttacaatgtgaaatcatgttgcatttaacaatgtactttattagcaacttcaccaaatattccccaagtcataagcaacaattatttttattaggttttggggggtggagtagttttaataaagtgcacagaatggtgacacccacaaagccttatataaaggcaggattcatgcatcctgctgcaagtacctctgcactaatataccagatcctaaaatgcatataaggtggactagcatcttaattctgctagttgattgtgtctttactgaaaagaacccagctaccaatttgcctttttttacaccacaaatcctaattagaaacttgaggttttatagaaatcatttaatgatagagattacatatgtgaattaatgtgaatatagtatctgtgcttcctgtgtctatgactattttaagatataattgtgctgcgctatcagattaacatttggaagtttctagaacagttaatgctatttacagaaaggagta

SEQ ID NO: 33782 - DNA, 1471 bp, Homo sapiens
tagaaccagaaatatcattgtacccaaaggaatataaaacattctgttataaagatacatgcaggtttattgtgaagcactgttcaccatagcaaagacacgttatcaatccaaatgcccatcaatgatagactggatacagaaaatgtggtacatatacaccatggaatactttgtagccataaaatgaaagcaattatgtcctttcagggacatggatggagctggaagccattatcctcagcaaactaatgcaggaacagaaaacccaacacttcatgttctcacttataagtgggagctgaacaatgagaacacatggacacagggaggggaacaacacacactgtggcctgttgggggtggagtgaggggagggagagcatccggaaaaatagctaatgcatgttgggcttaatacctaggtgatgggttgataggtgcagcaaaccaccatgatacacatttacctatatgacaaacctgcacatcctgcacatgtatctcagaacttaaaataaaatataaagcatgtgcctgaagatcgttaacatctggagcccctgtgggttcgtttcagattttttttgtgtgtcatttctcttggtttcggttcaaattacataatatcttgcaggcatattgccttaattttgtgggttattttaaattttgtgccagataacgtatttgcaaaattgtacaactatcttaatgactaggatgaaattttctttcttcacaaaggatttctgtttgcttttcctaagcacatagaatgttatcaatcaggatactttaatatgattttataatcagacatgcagcaagaacttgaatatttataggttactcagatgatggaattttcacagagaccctcttgattgattttagatttcagtatcagttctgccagcccacgagtctctgtcaaaattctgcttagcctctcaactattccatgagaagggaattgctttccagggtctccatacctgattctgagccaagtaatccctcactatttctattagctttccaatgctttcaaagaaattaaagaaatattttgtctagttttctagttgattcacttagcccaaaagtgctaatgtaacatcattggaaggaaaagccccactcattgttcttccatttactttttgagcagtttgtaaagttctttgaaattgcctgtcaatattttgacagaattatattaaattcctgaactgatttttagagagttaacattttcatatttaatctttcaatccacttacaaaatatctctccatttatttgggtcattacttacaaccctcacaatagttaaaaaatattctaatggtttttctgcatctattaatatcatattttttctttttaaatctgttgatgtggtaaattacattaatatttgttaaaaatgttgggccatccttccattgcctatgcattgcttaat

SEQ ID NO: 33783 - DNA, 1024 bp, Homo sapiens
tcccttctgccatgatagacaaattagctgatatccataacatgtttagaactttcaaaatatgttgttatttaaataccactaatttttggtaggattagttttgttcttgctgtgaaattgttagtggtggtgatggcagaagggttttattttgctttatattttttctttttcattcaaagaggagattttttgataacttattcaaactgtttataatttaagttgaattgttatcaaaactgtaagtgaacatttgatgcaataatttgggtaatttagggaagaaaaagtaaaagatttgcctgaaatatttaaaccctaagcttgttttttgtttagagacacatgtcaaatcttattattatattgttcctggaatagttctgtgcatctggtggctgcccagtacattttaattaatgacagtatttatgacagaaacggaaatcttagacatttggggattttcctacatattctcgttttcggatatgtttatatataggactagtttcactctaaacttaaatttttctccagaaggcataaaacctaacatgcagagtaaagaacagacatgtgctgaatgaaactcatttgacattgaaatggaccattcttgtttttaaattatatttgatttaataatagaggtggcactaaataaccccatatcatcttagctctatggctaaagaaaatgtattttctttttactttttctttgtatgttttaaacaagctgccaacaactattttatacacctagtatatagaggctctgctaaagggttagttgaattgaggagccatcataggcattttatgcttagaaaaagaaagtgtctcttctctcactctttcagctgcagctgtcatgagttcccttggcccatgtgggctgctctgagtcactgactctgccactattaagataagatgagttttccagaatgtcgagggggcttgtttggcatttaatattgaatatagattccattgaggctgaaaaagaaaa

SEQ ID NO: 33784 - DNA, 1025 bp, Homo sapiens
gggtagaacgaaaaggagattttgaagatagtttctgctaatagaagacagaatgcttactgtaacctcagttgatgtaattatatgaacttgaggttagatgaaaaggtgaaaggttgtggggatagtgggacaggaagcgtcagtggctcaggcaacattgatctgttgcagtgccagtctctaatcattcaatcagctatgtgttgaactagattctatatgagctaataaaagtgttacatggtggtactctacggttggcaccacattttatactcactgggagatggaaaaacacacaggaggtatattgaaactaggtagattggtaaccttcacaagatccttgtgtgtcttgtttaccatctcatctcatacatagaacagtacctggtatatactagatgtttaataaatattgatttaataagttattaacatatgattaagaacatagataaatacaacaacaaataaagtctctaggattttggaaagaggctgtaaccacctgggaaaacttcacagaaaatgagagtttcagatactgagaatagaaccactaagaagcagaaaagagaagatattctcgtgggggagaacaacggctgggaggggaggaagcatggccaaggcaaagaggtgggcattaataaggtatgttccacgttctggggctaatgagaagacaatgttagctttatttctttttacttggaatgatatatgttatttataaggttaagtgagattttacacagctttaatgcctaggctggccctggacctggaaatttgagccattgaagtttgggggtttggtaatgacagtgaggcctttgagctgcactgaagctggtctcttaggacaacaacaattagaggaggaaggaaggtaaaggaggcctaagacagtcagggggagggagactccccattcactgacctgtcagttcaggcctgggctcttgccacctgtgatcctgttcatcatttggttaggtacccaaagcttatgtgaa

SEQ ID NO: 33785 - DNA, 1064 bp, Homo sapiens
aaatgtgttacaaagataaatgaagtagaaatatagaaagaaaaatagtaattttaaagcaactttaaaataagcaaacatgtctttataaaaaggaattgagtaggaggaacagagatcaacaaaattattgtttttttttctacaataccttatgttttattacatgctgaaaagatcgccacaacttaaatttcctctttttttctcctccttaggccaagttcacagatgactgcaagttcagggagcgttttcaagaaaatagctataatacctatgcctcagcaatacatagaactgaaaaaacagggcgggagtggtatgtggccctgaataaaagaggaaaagccaaacgagggtgcagcccccgggttaaaccccagcatatctctacccattttctgccaagattcaagcagtcggagcagccagaactttctttcacggttactgttcctgaaaagaaaaagccacctagccctatcaagccaaagattcccctttctgcacctcggaaaaataccaactcagtgaaatacagactcaagtttcgctttggataatattcctcttggccttgtgagaaaccattctttcccctcaggagtttctataggtgtcttcagagttctgaagaaaaattactggacacagcttcagctatacttacactgtattgaagtcacgtcatttgtttcaatgtgactgaaacaaaatgttttttgataggaaggaaactggaattctttgtactaatacagggagcacactccttcagttcagcaagacataaagccttttgctttatgcttgagggatatttagaactttgtattttcggaaagttaaataacagggactacgtatttttctgacttttacagattaacctgaaagaacatacatgatacatttttatttttggtttccaaagaatattttgatgcagataaaatattttgttaacttttgtttttttttgtttgttttcttaaaagtacctctgcattgagcatattttcttacttttattattttaattaatatgacataagcaatca

SEQ ID NO: 33786 - DNA, 1088 bp, Homo sapiens
aagaactcactgtcacaaggacagtactatggggaaatctgcccccatgatccaatcacctcccaacaggcctcacctccaacactggggattacagtttggcatgagacttggtgggaatgcagattcaaaccatacgaatgggttccctggtcgggatgcaactttgtattggatttgatgcttgtgtagcaggcgttcaatgagtccccagatagcagtgctggctaaggccgaagaggagaaaagccaaactctggagttgtgagaaaatatatttctgttttaagccatcctctctgtgatactttattatagcagtcctagagaactaacacattgagtaaggctgtagtatatcagggaaaatgtatgaagtggcaggcccccagagctttgtagggtttatctgccctcctctggagtgaccatgccttttgaaagccaggtactactcatttcttgttcatcctttccaatcagcgtgatgtcactgatggaatcaatcaatgtgaagttctgtgggatgcccaaccagcccagattccattatgacagaggacaggagaataaacataaccccgagacaaaattgtaaatacatgttattgtctgtttaatgagaaatcaaactgattttgactttatttcctaattgaggcagaaaagaacttattcacgaaatcaatagctacatagtatctatctgaagacacattagtctgttccagcaagtagcactgcaactgcaattagggctactacttggaggagcttgtggtagtctacacttattctccaggattcaacatgggggttgtgccagctgccatgtatgacaatctgaattagacatttcagtcaatgatccctgagtggctgcatagacacagtggacctaacccttgcatagacacagtggacctaaccccaagggttaggataaactaacccttggccaggactccatttctcatctgacccccataagcttccactctaagagcggggccacagtgattctttggatctctagataccagtctcagcttgaatgcagattgaatgcagattcagtagtccattaa

SEQ ID NO: 33787 - DNA, 1030 bp, Homo sapiens
aaatctgtgaccttactaattgctttttattgtttctttgtacctcttctctgcctccttttgtatgaattaagtatttttacaattttattttatctccactattggcttttcatttatatggcccctttaaatctattctattgattacactaggttttaaaatataatatatgtcattacgttaatgcctatttttaaataatatgccactttgtctatagtgtaaaaccttacaacagattatttcaaattcatcctcatccttgtgctattattgtcatacattttgattttacatatgcaataacacataatacactgatactgtcctttagcacgtttgtattgtaaagcaaatgcaaatattaaaaaaaaactattaattttataaatgccttcccttattccattttctgttttctttgttaatttgtgtaggtctaagtttttgtcttgaaaaatattccttatgctttaagaacttttaaaaatattttgtttagtgaaagtctgctggcaatgaaatgtctctatttatttttgtctacaaaagtatttatttctccttaatttttataaatattttgggtgattttataattctagattgacataattttttttctgtgagcatcttagagatattacttcatcatcttatggtttatataatttgtcttatataattcttctgtaattactatttttgttcctctgtatgtaatgtgccttttttctctggttgtcatcaagactgtctctgtctttggctttagtagtttgtatatgatattggttttttgtttgttttgttttaatctgtcatgattggtgtgctctgagtttctttgtgatttagtgtctgacattaattttggaaaattctcagccatttatttcttcaaatatttctactgatttgttttctttctcttctccttttgcaattcctgttacacatacgttggactctttgataatgacctgcatgttttggatgctttgttgtttattttttccctcctct

SEQ ID NO: 33788 - DNA, 1165 bp, Homo sapiens
aactcttaacatgctacaaatacaatagcaacattaatgacaaaagttttcaaaagcaatagatattatttattgagtgcttaccatgtatcaggcattaccaagggcttagcaaaatagtgttatttaattcacacaccaatttaggtattattatgcccattttattatagaggaaactaaattttaaaatgtattactaacttaccagtgtcacacagtaagtaggtgacagagccagcatttgaatccaagtctatccatcatgcagtagataagaacctgaatatcatgggaagccaagctgggtgtgagtttggatgctcccctctctagctacatatccttgggagttaccaaaactctcaatgctttcatctcccacatttataaaatgagggtaataatgctatctagccataataaaatgtttgaaacaattaaatgagataatgaatgtgaagcttttaaaacttcactcagaatatagtggcttcttaataaacgataacaagtattcatagaagaaataattactattaactctggagcaaaatatgcattttgaaatgaatacacaattaactgagactgttagtttaacttcattcaaattcttaggcaatccacaaaatataaataaggcagtgaaatttcaaccaaccctcaagttcttgacaactattaatatctgccaccacatctgtctgattatcagtgttatcatttcttctgcctctataaccctcaactgtgccatttaaaagatgtatttctaaaattaaatgtttagttgtaatttcctgacaatttgtcagcaattactacatactaataattccaatcggattttaaaaataatttaataaagcattgtgttcattagaaaaatattttattttagcaaactttttaaaaatttcactaaaaagtcttcttaaaaatcttcccaagtctttgtagattctgtggcacatatacaccatggaatactatgcagccataaaaaatgatgagttcgtgtcctttgtagggccatggatgaagttggaaaccatcattctcagcaaactatggcaaggacaaaaaaccaaacaccacatgttctcactcacaggtgggaattgaacaatgaaaacacttggacacagggtggggaacatca

SEQ ID NO: 33789 - DNA, 1073 bp, Homo sapiens
caaggagattacttgagtccaggagttcaagaccagcctgggcaacatagggagaccccatctctacaaaaaataaaaaattggctggacatggtgatgtgcacctgtaatcccagctactcaggaggctgaggtgggaggatcacttgagcccaggaggtagagactgtggtgaggtgtgattgtgccactgcactgcatgcagcctgggtgacagagctggaatgcagtggcgtgatcgaaaaaataacaatttttaaaaggggcactgattttaagctataacccctatattttaaatacataggctggattttatcttgctcatacagacttttaaaatgataccctgtgtttagccctgaaaagtgcttacttcttctttgtctgatgggtcttaaaattttctatccttgcagcttaccctgtgttaccactccactaaagaaaacaaagtattcttttttacaataaaaggttatttttatatgaaactttgaatttcacatttatcaactcatttgattttcaaaactggttttgttggaggtgcaggtcagaagaggagtggaaaccaacctgccctaatcctattgcacccattttcccatcagctcactaaagagtcgtgtggaaagttggtagctttatcctcagaggccctcctggatcctctctggacctttcccaggtgataccatttcaggaaaatgggtttcttttcaaagacagaatgtctttaggacagaaaggggttgtttgccttctaggtatgtgcatgaggggttcatttcttagcttgattttctttccagtgattcatgatgtgaccttctaacaagttccttttcttaagtctaaaaagtgtggacctggtacccctttactgagtaaagagaaactaaggcatgcggtttggaaactaatggtaatttcagcattgagaccttggtgggactttggagctcacaatcagaccagtgtttgacagttaagcttgtgtatacttactccagctctctctggactggtcttgtatgggtccaagtcgttgtaagttcaggaaggtaatt

SEQ ID NO: 33790 - DNA, 1035 bp, Homo sapiens
acatacctgagactgagtagttgataaaggaaagaggtataatggacttacagttccacatggctggggaggcctcacaatcatggtggaagaagaaggaagagcaaagggatattttatatggtggcaggcaagagggcatgttcaagggagctcccctttataaaaccatcaggttgtcaggtgtggtggctcatgcctgtaatcccagctgtttgggaggccaaggtgggcagatcacgaggtcaggagatcgagaccatcctgtttaacacggtgaaaccccgtttctgctaaaaatacaaaaaattggccgggtgtggtggcaggcgtggtggcgggtgcctgtagtcccagctactctggaggctgaggcaggagaatgacgtgaacccgggaggcagagcttgcagtgagctgagatggcgccactgcactccagcctgggcgacagagcgagactgcatctcaaaataaaataaaataaagtaaaaaccatcagatcttgtgacagttatttactcccagcactttgagaggttgagatgggaggatcacttaagcccaggagttcacgacccgcctgggcaacatagtgagactgtctctacaaaaacaacaacaacaacaacaaaaataaatttaaaaaaccaaaaaagcctaatgtattacattttcctaatactattatcacagacatctggcagtaaacatctgtgggaaaactacatgggaaggctaactttaacagagaaagatgctaggtgacaagatcatcaaagtaagtgactttgagccagggaagaaaagtggctcagcacaaatgtggtctttcttcagactgatcatagtatagctgattcactacctgtgccgataaagctctattctcttgaagtcacagtgtagtcattctgattggaatttggattttgctaaattcttcagtcattctgcctcagataactagctcttcttgtccattgcatgtaatttcccctaagtttattcactggatacagcctttaattattt

SEQ ID NO: 33791 - DNA, 1131 bp, Homo sapiens
gagaattgcttgagcctgggaggcggaggttgggatgagccgagatcatgccactgcactccagcctgagcgacagagagagacccttctgaaaaaacacaataaaataaaaaataaaatcccaaataatacccaagtatgaaaaagtgtctcagcattacaacagtagagcaaatagatgcttagggataaaacttgccctgcagtgaattagataaaaagcctgaatatggaacggccacttgtagtgtcaagtcccatgtggattgtgatggcttaacttggtcatattcccgggttgccagtcacgatgaaaactttgctcagggcagtcaggctaggaagtaggggtgagtggaagatagctgcctttctccaatggcatctgcagaggtggtctgaagaagacattcccacacagagaggggagtcttgagtactgtttgctctgggaaagtgacaggccctttcacaggcagaacagaaagcaggcacttgaggaggtgggtgggtggaagaaacagctcagccccagtgtgtctcctgggaacttaactctctcagcacgactgcccttcagttaatctgttcaggtgctgtgactcttctccaaaggctgagaaactaatggtgattactcttacaccaaatctaaattccacgggatttatatatatatattccagatttctcaccagttttgttctatctgtcctagtaagcgccatctctcttatcacaggcctgtatcccatttcccactctaacttgctccattctaggctgggagtatgacatgtttagggtctggaggtaagagcagatatcttgggctgattaaaccataggattccatttgtcccattatcttctttgtgtttttatttttttgatacagggtctcactctgtcacccaggctggagtgcagtagtgcgatctcggcttgctgcagccttgacctcctgggcttaagcaatcctcccacctcagcactcttgagtagctgggactacaggcacacgccaccacgcccggctaatttttgtattgttttgtagagatagagtttcaccatgttgcccaggctggtctcgaactcttggactcaagtctggcgttcaagtgaact

SEQ ID NO: 33792 - DNA, 1052 bp, Homo sapiens
catatccactgagaccatttgtcactatctgctaaaaacaaatgtgtgcagaagttaggaagtggttaggagggaaggaagacagctctggagacaaaatctgtagtcagtctctgggacaagcatatttctttgggcatatagctgttttttcaagggcgttaaccttcagagaccacaggctggcagcagtgaggtctcttcctgcctaaatgtgcaatgattcccctatcacccatcaggcctcctcttacacagaaaataactggcatcagcttatttccgcacttgtacaatgctctacaatttttgagcctcacagttttgtagatgtacatctatgtatcgctatcacattgtaagatgggaggtgaggtggttgaacgcttgggctgtcaccagattgcgtgggttcctattctgccttcactacttactgggatgtaggtactgcgggataatggcaatacctacaccaaaggactgttgtgagagacaagataagatgcaaagcattcagctggaggacttgttaagcactcaataatgttactcactattagctattatttttgtcttaggacagtgtttcctcaagtggatcccaagcctagtttcataggcaatattttacatcatgaaccggtatacacatatacacttatgtaacaataatgcaaataataaatatgcatatatgctgcttattacatatggactgagtggtgcagagttaggatttgaacctaggggtccggggtcctgtttttctagtgttgtttttttttttcttggaggggggattacaggcacacatcaccacacccggctaattttgtatttttagtagagacggggttttgccatgttggccaggctggtcttgaactcctgacctcgagtgatccacccgccttggcctcccagagtgttgggattacaggcgtgagccaacgtgcccagactctctagtgctctgaaccactactctccactgccttgtggcctggtacttgttatacatggaggagccaaagtttcatcaaacacta

SEQ ID NO: 33793 - DNA, 1024 bp, Homo sapiens
agggagaaacctaatctgaagatggaagcatactaaggacaattttctccactcacatccacatttgaaaagagggacagaaaaacataggtaactctactttcacaaatgaggatagtttaacggatagaagaaacaagcacattattcacctgtgttgtaaaacatctactcttttttgtcactgaataagtgttcccaaagtacagttaatcctaatatgaaaacttagaattgtaaaagattaatgataacgtaaaagtatattgattaaaattccccttacaaagtatattttgatgtttgtttattctacctcaaacagaggcttaagttttgaagtgtaaccagtttatacttcattttatacaaaacttattgctgagaagtctgaatattgtgctttttgttgtttgtaaatagaattgaatttaaatacaccaggataaatcttatttaaaggaagcctgtttgaaaatcaccaactttaacttattgcttatataaatccaagctctgtacctgatctttatgtaaagcaagattcatatgtgtagtatctaatgccctttggtgttacatttgactaaaatacaaatgtctgtattttagtgttgtgcattattctttcaagtgctaggtaaattggaaagagatggtcgattgagacagtgaatattcaaaaattggaaggtcacagatttctcttagataagaatagtctcatcactacatttagcccagttaattgctcctgcacttgtgaaagggcttggagtcttataccagatacaatacactttacagtgaaataaattattcattcatatttgatttagggcagtttggttataatttttactttgcatcttggccatttttttcttcagagaaaagcattccctttaaaaatttatcctgctttccaacaactagtgctaggagagatggatatccacatgcaaaaaaattcactcaaaatgaagcaaacacctaaatagaagaggtaaggctatacaacttt

SEQ ID NO: 33794 - DNA, 1064 bp, Homo sapiens
ctctactaaaaatacaaaaattagccggatgtggtggagtgtgcctgtagtctcagctccttgggaagctgaggcaggagaatcacttagtgagttgagatcacgccactgcactccagcctgggtgacagagtgaaactgcatctcaaaaaaaaaaaaagttaagatggtaaattttgtgttatgtatatcttaccacaattttttaaaaataagttttttaaaagaactacatgatgaggccaggcgcggtggctcatgcctgtaatcctagcactttgggaggctgaggtgggcggattagctgaggttaggagttcgagaccagcctggccaacatggtgaaaccccgtctccactaaaaatacaaaaaattagccgggcatagtggcaggcacctgtaatcccagctattcaggaggctgagacaggagaatcacttgaacccaggaggcggatgttgcagtgagccgagatcgcgccattgcactccagcctgggcaaaaagagcgaaaactccatctaaaaaaaaaaagagagctagatgaacaaaaaaacaaaaaaaactaccatcatgaaaaatcataaggggtatggggagacagacaagaaaaccaagatttataatacagtatgactaatggataactcaaagccagtgtgaaatttaacagaagtttaagataagtacttggtaagtataaccaagttttatggaaataaataggaaatgatcagagaaagagtatctgattaaacctagaagtcaaaaacttccaagatgggtaatctaagagataaaatggatgagtcagccgcaaggaacggcaaagaaaggcattccatgtaaaaggaaccttgccaagacccttagtcctacaacttagtttagatccatatggtgatctcttacaataagttaaatcagtaggtttggagctactattttgaaggtgaaaatcaaaaggcatgcattagatcctaaatgcctttaatgctaagaaagcactggcatttgaacttaatcctgatgggtccaggtgaagaaatgaacaaggccaaga

SEQ ID NO: 33795 - DNA, 1013 bp, Homo sapiens
attagattggatgagatgcccaaaggagagaatgtagataggcaaaaggactgagtatagtgaggcctggagcacttcaacgttaagaggttgggaccaggggaagatgtagcaaatgagaaggattatccattgaggtaagaaggaaatcagaataatgtggagggtggtgtcctagaagccaaatgaggaaaatgtatcaagggccaggtggtgagctatggcattgataggtcaagtaagataaggagtacaggttaactgttggcattagtagtgtagaggccactgataaccttaaccagctgagttttgtgaaatgatagtgaaagcctgattgcatggtttaagagagaatgggaagagaagatgtggagatagtgagtatgggctaccctgtgggggagttttcaaaaaaggtaggaagaaaaacagggtagacgatgacagcagacgttaggctaagggattagtttttcttttatgatccagtagaaagcaaaaatttgatataggggaattggggagaggattcttgcaggagtagacaagagaggaaggaatctagcagagggataggctttagataggaatatgggtagttcatctgtgtcagagattctcagcctcagcactactggcgttttcggctagatactttgttgtgggggctgtcctgtgtattgcaggaggttttagcagcaccactcctctgattgctggatgccaatagtactgctgttcctagttgtgacaagaaaaatgtctgtagacatattagtgatatagtggtggaatttgtgtaagtactctttcattgcattgctccagtattctttttttgttggctttttggttttgagagagggtctggctctgtcaaccaagctgtagtgcagtggtgtgatctcagctcacttcagtgtccgtctcctagcatcccaagtagttgggactacaggtgcacaccactacgcctggctaatttttgtatttttagtagaaacggggtt

SEQ ID NO: 33796 - DNA, 1050 bp, Homo sapiens
tgaatggactcagcatgtaaacttggcagcattaaggacttgttgaagatcataatgattaaaattagatcagtcatactgggcacagtggcttcatgcttgtagtcctggctacaagcctcagtcccagcggaggtgggaggatcttgtgagcccagaaatttgagcccagactgggcaacacactaagaccccatctctaaaaaaaatttgatttggtgctttttcccatcacatttcagctacatgagtacgggaaaggagtgagcaaacaattaggtttaaccacagttgcaatttttgcctaacaagtatgacagcaagagagggacaagggagatgagtacctatgcggttcaatgatgataagttattacaatgagtgaccataggagttaggctaggtaaagagggaagtgaggcctttatggagaaaggcagtgacatgtaagggataagtggtttggagggcacagtgggttcaaggattgttgggtttgagatactagagaaaatgaggtagaaaaacaattttaaaaaattaagatggcagggcgtggtagctcacgcctgtaatcccagcacattgggaggctgaggtgggcagatcacctgaggtcgggagcttgagatcagcctggccaacatggtgaaaccttgtttctactaaaaatacaaaaattagccggtgtggtctcatgtgcctgtaatcccagctactggggaggctgaagcacaagaatcatttgaacccgggatgtggaggttgcagtgagccgagattgcaccactgcactccagcctgggtgacagagtaagactctgtctcaaaaaaaaaaaaagatggtttataactcttactcaaccaatcttacctcttgatgtatatgttttttaaaatttatagttctttatgaaacatttctcctaagtatattgcacgagaaggatgaaaggtatgagactattgcttattgtattgaaaacacttcctcttccagttggcaagtataaaacggtaccaactgtgaaggacttaaaaatatcttt

SEQ ID NO: 33797 - DNA, 1031 bp, Homo sapiens
caataaaactttttagtttttgtgtaatgcagtaaaaagtttgattcccggccgggggcagtggctcacgcctgtaatcccagcactttgggaggccgaggcgggtggatcatgaggtcaggagatcgaaaccatcctggctaacacgatgaaaccccgtctctactaaaaaatacaaaaaattagctgggcgtggtggctgccgcctgtagtcccagctacttgggaggctgaggcaggagaatggcgtgaacccgggagggggagtttgcagtgagccaatattgcaccactgcactccagcctgggcgacagagcaagactccatctcaaaaaaaaagtttgattcccttacggtaccagaatatatatcaggaaaaaacaacatatcttctattattcctaaaattttcttgacaaaatgttgagtcattatgtgtttttctgttacatcctagacagtacaatgtagattataaactggagacttacttgaagattgctaggctatatctggaggatgatgatccagtccaggcagaggcttacataaatcgagcatcgttgcttcagaatgaatcaaccaatgaacaattacagatacattataaggtaacagatgagttgatttggaattacttttgtattggagaattgtaacatactaagatgttccaggacatctgatagatgctcttaaatattagaaattgtttctctgttttgttttgttttgtttaactcttgctttttaatttgtcccctaattgaaatattttccctctgttaggtatgctatgcacgtgttcttgattatagaagaaaattcattgaagctgcacaaaggtacaatgagctctcttacaagacaatagtccacgaaagtgaaagactagaggccttaaaacatgctttgcactgtacgatcttagcatcagcaggtaaacacgtaataatttatacttaaatgaacagttatctttgcttaataactttaggttggttactgttggaaaatttagcaaggaact

SEQ ID NO: 33798 - DNA, 1020 bp, Homo sapiens
gtaggacgcagggtaacactgatgacttgttcattggtggaaatgcctctgctgaaggcccttagggcaaaggtgcctcccaaagtgctgggattacaggtgtgagctaccgtgcccggccaggtctaaatatttgtaacgaactgttaaataaaatatgttctaccctcacatcttgacaaatacacttttataataacctggaagggcaggttcctatttagaattctcagacttcttggggtctccagattatggagacagctggctccctggctgcccatccctggtctgagggcatttcctcttttatttctacctatgccccatcctacactacaaagggctttgtggacacatgtgtggacacctgatgctgcatagctaagctctaaccacacccacttcataaaatgtgtgtcccctgggcatccttagccattagggttgtgtactccagctgtgcagtctgcccttaggaggacttaatcaggaaagagaatgtactagccctgtaaataggctccaagtggtttgggcagataattctgcagtctaaggcacccagacgtagatgaatagtattccattgtatagatcactttgggtaatatggacgttttaacaactttaatccttccagtccatgagcatgagctatctttccatttatttgtgtcttctatttttctaattattttttaaatagttttcagtgtactgatttttgtgtgttgattttggatcctacaactttactgtatttgtttatcttaacagttttttggtggagtctctggggttttctatatataaggacacgttattggcaaacaggtgtaatttaacttctccctttcctatttggggaatgtcttttatttctttctcttgcctaattgctgtagctaggatttccaatactatgttgaatagaggtggcaagaatggacatctctgcgttgttctgatcttagaagaaaggctttccattttcactgtagtgtataatattagctg

SEQ ID NO: 33799 - DNA, 1074 bp, Homo sapiens
aattgcataatttttgcaattttatcttctctgtgcttctctataaattctttctgggacgggtctgttactttctttttggtatgacagtgcctttctgttgcttctcctataagaatttgcattaagaattttctctaaccatggaatgaagggaaaataaatgtcagaaagagcaggtatgggcgggaaaatatgttcttttccccctaagccctggaaagcacacccatgttgagtcttactctgtcccaaatataaaagtttttaaccattctgaatataatacaaaacctttctttaatatcgtgtcccttaattcatcctgtctccataaaaacaaaaatctttagctattcagctaagaaaaagaaatggttaattgctgtttctgtttaatcgcagtgctttggagaagaggttgttcacaacaggtatccagcaatgaggacctggtaagaatttttttttctattagtaaggcctttgcaaatatgaccaaaatgtttttctttttaaaacgagatctggtattagactctaacatcttttattttagctacttgaatagagttctgccgtaggacaaaacaatttgataattactctgagttcagaaatgatgatgaattgattgtagtcatgtagtcagctgagttttgaagtaggggaattcctagattagaagcaaagctgctataataccatatttttcttcctagatcttaaatttaaggatatgtgatttgggaattgttttttttttttttacatagccctttgtaagcaaatgatatgggaattttaaaaggtagtttgggtgagcagaattttagataactgaaaagagactgtacaaagcttagctataggttggctatagtattaacatggactttctgaaagcacaggttcttgctacatgcaaaggtattttgacactaattagaccatacaaagcacttggcacagagctgaagagtagttacgtgagctgaatgtaaattggaaagtttgaggaattggaaaaaacaaaagaacttgtctagtttctctgagcatctgtcttggtaa

SEQ ID NO: 33800 - DNA, 1076 bp, Homo sapiens
ctgttaaaggaatttaaaatgatgaaaatctccttaaccaaagcaatggaataatatgttgatcttggattttacgtgtttaaacatctgtgataatccaacatttaaaataactggagcaaataccttagagcttagcactgtacctaataccacaatgcagttgctcagtacacatttgcttaattaaatgcctagaactatgttagatactttgggcggcacgctaatttcaattagggaaaaaaaatgctctaagggcttgcttttattttttaatttttaaaaaataatcttgtattgctataaagggcttgcttttaaaactcaagtgtccgaaccaaaaaaaaaaactacagtaaaattataaactacagggttttaatgcttccgggttgccactgcagtggcatttctgactgtgggagcctcagtttcccagtcatctgatgagcctgagcagcagcaaagtaccactgtaagccatgagatgtctcgtctgaactggaaaccctttgtatatgacgccttgcctctatcactgctgagtttggaactttccccatggaccttgccaaaacacgacttcaggtaggttcaaggccaaagcattgatgtccgtttcaaagaaacaaaatatagacggatgtttcatgctttgttttggatctataaagcggaaggtgtattggctctgtattcaggaattgctcctgttttgcaaagacaagcatcatatggcaccattaaaattgggatttaccaaagcttgaagcaattatctgtagaacgtttagaagatgaaactcttttaatcaacatgatctgtggggtagtgtcaggggtgatattttccactatagccaatcccaccgatgttctaaagattcgaatgcaggctcaaggaagtttgttccaagggagcatgattggcagcttcatcgatatataccaacaggaaggcaccaggggtctgtggaggagtgtggttccaactgctcagcatgctgccatcgttgtgggagtagagctaccagtctatgattttactaagaagcacttaatattgtcaggaa

SEQ ID NO: 33801 - DNA, 1046 bp, Homo sapiens
catcaggaacccaccctgtctgctgagactaagttattaggtcaaagagatgcttgatatatgtggaatttgaatacagattcattgtgtgagccagctctgatttgttggttgcggctgcctggaactcctatgtttgggagcatctgagctcatcaggaaagagagctgtgatcccatagtgatttctgctttaggtgcaggagaacagtaacccaggatcctctatccttcaactagaacagtgttagatgtttcaaagacatttctgttagactggggttaatacggtggattgcttttctcaactataggaataattccttaagggattatgctgatgtttagcattagaacatcttcagtgctggccaaataccctgcctttctgtagattgcattcaaggcctagcccttgtatcactccttggtaaattcttaattgatttagttgtatttttctttacatttcattcccaagaatattctttgggctctgatcataattggatatttctcaagtttctttgcttataatttatgtaccatttaaaaagatcatttagttttgtctattatatgtttactttgacaagttttactgtcaatgggtgactttctcatgacaataaactcaaattctagaagttgaaatgtgtgtagggtaccctctaaattgctgattttggtaattgttacttgttaactcactgaactttatgctcttctctgactccttcttaacccactggttcaagtaattatcatttattgagcacctacttctattttcttctgcattgctgggtatctctagatgtatgcgtaagtcactgatatggcaagatacttgaggataagccttgaatacttagcttggaataagtttagtgattctccaagccagtgattttcaagggatatatgataatttgttggatacgtatgttaatattacagctttatagtcgagaaaattgttttaggaatacaaattatgaagagtaaaacttggccaggtgcggtggctcacgcctgtaatccca

SEQ ID NO: 33802 - DNA, 1031 bp, Homo sapiens
tatcctttgttgcatttttaaccactgctttaccttcatttgtttagagacttccttttggagccatcatctatttttaaaattttgattcttattttaattaatttattttcaggtgggatcttgctatgttgcccagggtggtttctaacttcggggctcaagaggccctcctacctcagcttcctgaatagctggaaatagctgcttgccactgcgcccagctcttttttacttcaactgacataatagttgtatatgtttatggagtacagtgtcatattttgaaacctgtgtacagtgtgtaatgatggaatcatcctcttgatgaactatatcctttgttccctgagccccttgtccttgttcttgtcctttttgtcctcagtattgggaagcacctcagttctctttcctggactgctctttaagagtccccatgaactataaatgatactcactaaattgagtacacttaaagtgctatcttagctcaagatgttataatgaaaatactgtagcctaaacaacaggaattgatttcttataaatctggaggctggacattcaagataaacatgctggccaatttggttcctgctgggagccctttgcagacagataacttgctgtgtcctcccgtggtggagagattatttcttgtgcctctttataagggcaccaaacccatttgtgagtctccaccctaattacctaattgacttcattatcttacaaaggttacctccagataacattacattggaaaattgcacttcattgtataatttgttttttggcagggacagaaacattcattccatagcaaatataatttggcaaattttgacacacacacacatatatatatatatatatatatatatatatatatatatatatatatgcctatgaagccatcattataatcaagataatgagctagtctatcaccactaaaagtttgcccctttttgtagttcttccctcatccttagacacgtactaatctgctttctggcactatagat

SEQ ID NO: 33803 - DNA, 1035 bp, Homo sapiens
aagagctgattatgtatttacagtgagatgccacctgatgacattttggtcagtgatagacaactatacgacagaggtcctataagattataatggagccaaaaaattcctgttgcctcatgattttattccagttgccaacggtattcagtaaagtaacatgttgtacaaatttatagcctaggaccaataggctataccatatagactagatgtataagaggccataccatctaggttttgtaagtatactctatgatgttggcacaacaacgaaattgcctaacgatgcatttctcagaacatacccccttgttaagcaacacatgactatatataattacaaactacaataagcatttgagaaaaagaataatactaagagagcaaagacggagctgggagactttccagaggcacagtgccaagcacgtgggctgcaatctgaaggttgagtgggaatcaacaaggtaaaggatggagtcttggggaggaccatcacaggcagaggatttctgtgggcaaaagcccagatatttaaagcatgaaacatttgaagcccacaagtgttggaaccgaggagaaatgcatttgttcaatgcattcatcaagcacttaggcagtgctgagcatggtttgacagcacacagtgagagcctgccctccggggtgccctgtggccttctttattggtattatcattgttattactttttctcattccttttcagttaatccaggttcttcttatgtactcatctccttcatctctgatttctcttgcccacttagaaatgtgtttatccattttgccaatctccctccatattcaattctattcatagctcataagcttatgagctatatgatatggttttccttttattttataaaagaataagttttgatgtgaaattagacatgatgaaaaaaaattccatcagctcttgaagccacttaaagtggcttttataagcacctcaaagcctctttcacttctctttttgtcctctcattaatttttcacttccttgg

SEQ ID NO: 33804 - DNA, 1043 bp, Homo sapiens
accagtgtgtgcagggcagtggggagacaggttgaattacctcttctttctttccctcctaatcttcctgaggacaggtggggatttgtcttaggacttctactattaaaaagcattagagctgtgagtagttacgagttaattttcattatgaacttaatccctcaatatatacacccacacattatacatacatacaaagtattaaaatcatacacacacacaaacatacacacattatacatacacacaaagtattaaatttatacacacacacacacacacacacacacacacacacacacacactgctcccgcctcccaagggtgagggattgtgtgtgtgtagtattttctacattgtttcctaattatctctggcattagattttcagctaaataaaggtatgaactatgtttggtaaatttttgctaatcaataaatttgaaattaagtttaaaacaggaaaatagcattttggtaaaatatatcttgaattggtcttctgaactttgttttgatctttgtgtcatcagaatgtagaaaataattttgttgagtttgaggggaaggaaagcttcaaatatagaaaagctaattgtttttaaattataggtactttctattgtgtgtaaactactttttctatggagagactgtagctgattattttgctacatttgttcaaagagaagaacaacttcagttcctcattcgctaccatagatttatatcatttgccctctatctggcaggtaagttaaggaatattctgtattgatatatagttaacatattttccatgtttatttttatttctgttattttaattagtaattttttggttaaattttattccagcctctctttttcattgtttcttgtgtataaagctatttctttcatcatgttcttaaatagcaattactcccttatagtgggtttaaaaagtgcttgttaagaatcactccaggccgggtgcggtggctcactcctgtaatcccagcactttggaaggctgaggcaggtggaacatctgaag

SEQ ID NO: 33805 - DNA, 1032 bp, Homo sapiens
attttcgaataattttccaccttttacattcaggttttttgttactttttaaaattttaaatttcattttattttcccagagattaggtctccccatgtggcccaggctggtctcgaactcctgggctcaagggatccttccgccttggcctcccaaagtgctgggattacaggcacaagccactgcacccagcctttcattcaggtttattgttcagttcagctttccaaatttgttccttcatttaaaaaaacttttcactgctatatctatagaaagtacattcctagaaataggtattgaaaaatttctactcttttactggtactcatatgatggtagttggtccattttaaattctgaccagttggaaggattatgatcatggagagattatgattgttatcagctaagaagaccatactaaaattttggagagtaaaacacttgactctgattctgtgtttatcaaagcacatttgtgcattttcttggtattctttgtagaaactttgagtattttctctcatttaccaaaccagtaagcttgatttattttgttaaaggtaaggtagattctggaatggattctttttttattatgggagagaagaatgtagtaccttctcagtttatatttaaggtaacaagacttctggcattttgagttttgatgataataccaacagtcaaagagtctatggtatcttctgttattgaacccaacacttttgtttcatgtgattattcttgtaattatttaaaacaactgcgggccaggtgcggtggctcacacctgtaatcccagcactttgggaggctgaggcaggtggatcccttgaggtcaggagtttgagaccagcctggccaacatggcgaaacccgatctctactaaaaatacaaaaaaaaattagccgggtgcggtggcaggtgcctgtaatcccagctatctgggaggctgaggcaagagaatcgctgtaacctgggaggcagaagctgcagtgagctgaaatcatgccgctgcactcca

SEQ ID NO: 33806 - DNA, 1055 bp, Homo sapiens
agaagaacctttggctatgtaactgtccattctgctaagtcaggtgtcatcacactctttctgtaaagggcaaacaatacatttattaggatgtgcagaccatatattctatcaaagcttctcaaccctgaaccctgctgttacagtgagaaagccccccgtggacaatatgtcaatgaatgggcatggctggatttaataaaactttatttataaaaataggttgtggcctggatctgatctgtgggacatacttttctgacccctgttccagagacctaaaattatccctgtgtattaggttagatcatcataaagtgacatgttatctcagcaatttcatctcagcttccctcacatggctgaggcaccatctggggttagaaagtggctatggaagttggggtggtcagggaaagcctttctgaggaggtggcacttaagtagagatttgagaaaagaactcctccagagaaaactaagaagagagttccagagtgtacagaggagtggaagaggttaattagcctgttagaaggtgagcaagaacagtgtggctgtggttgagagtaggagatgagaccgcagagtttggtgggaccagatcacacgcggcctacggggtcagggaataagtgaactcagcgagcatttgccagtgggaagctactatgtaaggtgcaatgcagtatacaaaaatatacaagatgttgttcctgttctaaagatgctcaccacctactagggcagacaatacacttccccagagaactacagcaacagctgtgcaggataagtatcttgcgaaggctgtaatagcagagtggcattgagttactgtggctcttttatgctttgactagtaaggaagagaaagagagaaatgggttggcaaaaattaaccaaagactttttcagtaattattttaaaaagaaaaatgttatatttagaatggtattttctttaatggtctccaatccaagattttttgttaaatggtgagttttttttgcatgttggaaaccaaacagctattgctgttgtagtttagata

SEQ ID NO: 33807 - DNA, 1058 bp, Homo sapiens
tttccagtattatatcttctttaacacatgggttatttagaagcatattcattagttttcaaacaaatggagattttttcactttcctcccttaattccactgtggtcggaaaacatactctatgatttgagtattttataatttttgagatctattctgtggtacagcatgttatctattctagtacatgctccatgggcaaaggtgtattctgtagttttgggttgtagttttgtctgtgtcagttaggtgaggtttaattaaatcttctgtactgatttttgtttatttgtttttgtgtttgtttggtccgcttgttctatcagttactaagagagctttgttaaagtctctcattgtgattgtaaatgtatttttttatttgtagttctaccaatttttggtttatatattttgaggttgtattaggtatgtacaaatttaggattgtcatatctctccattgaattgatccttttgtcattatataatgtctgtctttactgcttgccttaaagcgtactgtgttgaatattaaaatagcaatatcagctttcttttggtcagtgtttgcatgttatttctttgtctctccttttatttttaacattcccttttccttatatttaatgtgtttcttttttctagtaagcatatagctgatttttttccctgttttatttataagacagttgataatctttatccttttaatgggactatttaacttatttgcatattatttattgatctatttgggtattagtaattagtggttaaatccttaaaactttgttttcagaatatggcagctttttagggcattaactcatatgctttctttaaaaaaaaaatgctgtcctctcagtagggaggtgtcatgctgagccatgttgtccaccatttgaaagcagctatttagactgttagaagacactgagagtgccaggatgcagctagctgggagcacctgctgacacaattttgcatttagctgaacttgctaaagcagccttccttttctctgttggtctctacttggggtttatgctgtgaa

SEQ ID NO: 33808 - DNA, 1096 bp, Homo sapiens
tatcaccttgattgcagccttgtgagaccttcaaagcagaagaccaagctaagtgatgctcaaactccagatccacagaaattgtgagataacaaatgtgtatagtcctaaaccactacgttagtgatgatattgttatggaacgatagagaactagtacaatgtcctttctagaagaagacctctaacaagagaatgaagagttcaataaaaatgtaaggcatccgaagaggaaaatgtggagataaaagagctcagaaaattaatggaagagctgaaaaatggtaggagaattaatagaagaacacatgattgaatacacaatctaaagaaatcacacaatacacaataaaaaagagtgatataaaaatcatgtttaatatggggaaaaagatatgcatgcctttcatataggcgtaatgaaataaaatagatttgaggaagaggtagaaattaagaaagaaaataaagcaaacaaaaataaatagtaaaaaaaaaaaaaaaaaaaaggacaaaatacattctggaattgaagaccagatttgcagatttaaagagcaaactccgtctaagagaaaaagtgattcagaatcatgttccccaaaacatatcctggtgcaatttggaattttaggaataaaaacagagttttatgaaaattttatgtagaaaagcaagtagcattccattaaaaaagaatcaggttttccttggagttttccatagtaatagtttaatgctagagaacagaaagagtgtctacaacattctgagggaaataaaatgtgactttaaaatttatctgtagacaagttatccttcaactataaaaaccaaaacacatattctcaagggtagagaaattgaggggatacattgcgtgtaagtgctactttaaaaaaagcgtgtcaatggaattcaattaaataagagatgtgtagaaacaaaatacaagaataaagaaactgtggaaaaagaatgataatgaatacaatccctttaagtataaaaccacaactaaaacatgtcaagaattttgattgtaaaataaaatgtaaatgttattaatcttgacattatgaacttaataagtaat

SEQ ID NO: 33809 - DNA, 1013 bp, Homo sapiens
acaatttgaccatacagaatttaatctccccatttaagattatataatatttgataccaactattatgttttgtgatctttgaaagaggaaaccacaaatgttatgatcataccgtgaacattcgagcagttatcatctgacaatagttgtttttaccagtttattatttaccatgcacattctgccatttcatgatcttgctgcatgaaaacaaactctgttctatgaccattctaatcctgtcactgctaggaagtcacagcaaatccttaatgtataaactgcttttatactgtccactgctttttgtcagtgatggaaagcttctgagttccttagttcattctattcactgatcaatgcagctctcaataggcaaaagccaattctgtcaacaaactgtgctgacttgggagaagaaacctgtctgctaagaccatggggtgacacctggaacaaagtcatcttcaaggacatcttcaaggctgttagttttactttcaacgtatgagaggtcataaaagcctaaatagattgttgtaggggacattctgagataaaatatatagtgggaatatttggtggagagtttaaaaagacaagtggctactcattatgtaagtctgcaggcttatggtgataaacctcaagggaaatgtttcctatcaattgaaaaacctctgtataaactttgggacatcatcttgaaggaggggacagtttatctttctgtaattgttgttaattttgtccataaagaaatctcctagttttcaagctagataagtatactttggtgaaatgcatccaatattttttagacatttgcctttttattatttttacttttgatcttaaacttacattattctgtcagtcaaattatattgtctttatagtctattttacttgacatgcattcagcaatcaaagtatggatgaaaatattgtctaatatgaattctctcatattccatgcctttgggaatgtagtttaaagtgtttcattagc

SEQ ID NO: 33810 - DNA, 1041 bp, Homo sapiens
tttcaatgagctaatactttgtttcccaagtcattgaatttgcctatgaaatttgcattgcaatatccaaagatattttggaaatgagacactcgatctttagagtatcctatgggaaaatgagcagtaattccattttcaacctatgagaagatttgtaaatattctgttttctatcttagcctgaattttgaatattgaagtaaaaatcttgaagccagttttagtcattaccacaaataatgacactatggcttatctaaaatacattttcaaaaatgactctttaaagaatcatcattttacatgcaattttgataaatatagtgtttatttaagatgttatctccgtttttgactctttaaactgcttgagaatattttaaagatatggacaatcagactgctccctttaaagccctttccatccaaaattatgagatacaaaacgcatgagatagaaaacttggctggatttttaaaacattagactgtagtttactgcttgaaattgtatgagtaattcatttttcaatgaattatgtttacaaagatatgcctacagagactgtaacactctttatgtcaatatccaaaaagtgtacaatggggttgatttaaatgtcagatactttaatcgttcaactcttactattacacaacctagtattaccgggggaaaaaaacctgcaaaaacatttatggatctcaggtaatggtctgaattgaaaagtttcaacatatttttcactaagctatttcaaattatataatttgattttatcttagaagtaataatttaagaagcaatatttgttgtctttccaagtttatgtgtctctgattactttatgtggctggtcggaaactgcacttttgtttctgacctgttgtttcctttaatattctggattgagaaacaggagttgtgcggtgcttccctggggacttacattatgttgcattccacacagctgatactcttctagctttcctgttttgatgtctgtcaaaaaatttgaaaatttttgattttttcta

SEQ ID NO: 33811 - DNA, 1051 bp, Homo sapiens
accccctcaggaaccatcttcatctcccttcttcccactggagttatttcaaagactttcagcaagtggaaaattacaacatttatgtcatgggtggtattctcagttattcagattcagatgcaaaaaaatgttttgaatacctactatgtgccaaacaccttatgaaatatcttcagtctttggggcatcagacctcaaaggggcatttaggatttccatagataaaggaaaagataggccaggccgggcgcggtggctcacgcctgtaatcccagcactttggaaggccaaggcgggcagatcatgaggtcatgagatcgagaccatcctggctaacacagcgaaaccctgtctctactaaaatacaaaaaaattgactgggcgtggttgcgggtgcctgtagtcccagctactcgggaggctgaggcaggagaatggcgtgaactcaggatggggagcttgtagtgagccgagatcgggccactgcactccagcctgggcgacagagcgagactccatttcaaaaaaaaaaaaggaaaagaaaaaggataagataaagattttttaagatcgaagtatagtctagaatctactaccaattagctttgtaacttacttgaacaagttacactcttctgagcccttatatttactcatttattcaatatttattcattcagcaaatattgggtaagtatgaactaactgacaggcactattccaagccccagggatagaccagtgaacaactcaaagtcactcttctcactgtagtcaagtgagactgacattatataaatacataaatgtgtaatgttctagatagagttaagtgctatggtgaaaacttaaaccagcaagggaataagaaaggctggagccagggaagaaaataattgctgctttatgaagaattgccagagaaagactgatcagatgacatttaagaaaagacttgaagagtttgagagacaataataatacagaccttacttccttcatggattgctagaactttatgaaagggctttgcaaatgtggaagggta

SEQ ID NO: 33812 - DNA, 1046 bp, Homo sapiens
aaaaatgatctttcttttgactttgcctggtacattacaataaatgagggaaaattatagatttctatacctatactgatcttgagtttagggttgcaagcatgaactgagttaaaccttttactcctcacctccatcaactcttaactctctcagtgtgtgggggggtggggggggggtgcgggggctgtaaaaaggtggcagtgagatttagtaaatattgataataacaaaaacatggcagttcttataaatatgaaacatggggtttgttgaggagcatggtagggaaagggaatgtattatttccattatcaacctttccatctgtcagcacaggtttacataaattctctcacacgttgtaatggtgtggtatgattaaattctatcctagcccatgaaggggagcacagctattgatacagagaaaactgctcttaaaagccccactttatacatggatctataaaaagaccataaactttgaattgtttgattgctcatttaactcttaactcacctacttatttaaaaaagtatttgaactaatttatgataaaaacatgctttccattagattagctgcccttgattattttaacatattttgaagttgtaatactttgtgattttaaaacatattagatttttattatgtattttattgtgataacagacacataacatgagatctaccctcttaaattttaaatatataatacattgttgtacagcagatctctagagctttctcatcttgcatgactaagacttatactcactgaatagcacttgccattcctttcccaacctccaacccccagctcctggcaaccatctctctaccttggcttctctgagtttgactatttttgatacctcgtgtaagtggaataatgcaatattgtcctctgtgactggcttatttaacttagcataatgtcctccaggttgcatcatatagtagtatataacagaatttcctttaaggctgaatgatattccattgtatatatatatactgcattttctcagttcatatg

SEQ ID NO: 33813 - DNA, 1035 bp, Homo sapiens
agttttttaaaatatcactagctagcctgtacgtttcttaggaggcaaaaacaattgccttaaattttgttatattttagtgccattttgcacataggttataagcaacagataatttctgtaatctttagaatatcgattaaacttgttaaaatgtagatattttgaaatctcacacaggacacctaaattatgtaaaatgttataaactttatgatttacaggggccctggagatggaagttctgaaaaaatgttgcctttattcagtattagtgcattatcagggactccagatctcagttaaaatgagagaatctgaatctctaggcaatgatgagtgtttctgaaattcagattcaccagaaagaaattgaaagcaaagagaagacagtgttgtcaaattatcatataattcagctaaaaaaaaaatcatggtacttaagtgggagctagagcacatcactgcctttaagaagatatttaggggaataaaagaggtctgggacctcggaggtgaaactgagagaaagacaaagggacttcaaatcaagcatttgaaagagccaatgaggggccagatgtggtgactcactcctgtaatcccagcactttaagacgccaaggcgggatcccatctcaaaaaaaaaaaaaaaaaaaaaaaaaaaaaaaaaaaaaaaaaggctgggcatgttagtcccagctgtttgggagggtgaggcaggaggatcacttgagcccagaaggctgagtcagcagtgagccatgattgcaccactgtactctagcctacgtgacagggcgagatcctgtctcaaaaacaaaacaaaacaaaaacagaaaagaaagagccaatgaaacaaaacccacagagaagagaagcagaactgttgtaccaaagtaacagttctcaaatctttattttctttcttttgtgataagacacacaggccaaataagactgactgcaagttagcacaagagtgcaacgactctatgttatcctggctccctcattcaaggaaacacgccaaaa

SEQ ID NO: 33814 - DNA, 1023 bp, Homo sapiens
tgcttaaccagagtggtcgggaaatcttctttctgaggaggtggcatttggtagcatcatcctgaatgatgagaagatcattctgtgaaaatatgagggaggagcatcccacacagatgtgatagcaggttaggaaattcggtaggtgtattagtccattttcatgctgctgataaagacttacctgagactgggtaatttataaagaaaaagaggtttaatggactcacagttccattggctagggaggcctcacaatcatgacggaaggttaaaggcacatcttacatggcagcaggcaagatagaatgagaaccaagtgaaaggggttcccccttataaaaccatcagatctcgtgagacttgttcactaccatgagaacagtatgggggaaactgtccccatgattcagttatctcccactgggtccctcccacaacacctgggaattatggagctacaattcaagatgagatttggttggggacacagccaaaccatatcagtaggaaagataaactgaagctaaatcatgtagtacataggaggccatggttaggcatttggatttatactgagggcaatgggagattgtagtagggctgaagcaggggaattatgggaaatcactggacaatgcaaagcaagagaataatggaaaaccactggaaggaatgaaggagagtaatcatgggaaattgttcaacagtgaagcaggggaatgatgggaaagatgagaaatcatgggtataaggaggggaatgatgattctggttctctgaggagaatgaactgtgagaggtgtacgtatgtgctggaattggcttaagagagttgatgcttgagatttttatgtgtgtcagtttcttaaaactgttaaaaacttccatgcatgaaatctgcccccaagcatagaatattagaatctagtagctgttcatgcagtcactacccttcactgctatcaccaaagagctctctgggatttcttagtaaaagccttcttctagtgttactataaa

SEQ ID NO: 33815 - DNA, 1073 bp, Homo sapiens
ttattaagccatgtactttctgctcttctttaattatactgtatactcttttttccagttctgaagttcaagtttgatacttttatataggcatgactcattgttcctacggttatgacatattcccacatactccttggccagtgaattttgtgagaaagggcgttctcattgacctgaaagaatttgtattctttcagttcctgtcaactgtaaaaacaaacaaacaaaagaaaacagatatcatagtttctaaccattcttgtctttattctttctatttagaaatgaaaacaaattaaaacataactttttatattaaacttccaagttttgaggggacaaaaatgaaatctagaatgtgtaaaatcaaattagatattgaatattattttgttaccaaagccctccagatggtatcagctgttcaagaagatacattttggaagcgttgggaaggtagggtcaagaatggcagtgtggtcaccatcctagcattaactgctgggcaacagaatacgctcttaacaacacagtgttcaggagcaaggacagaggcttcatgaagccagtaattttacacattctgtccaagaatcctgtaaaacaactgctgtttcaggtcccccagctgcccacccacatactcagttcacacttcccttgttcctctttctgctattctcccctttcacttatttttcaaatttgttttggtgactaaataaactgcaagtccacagagataaaatgaaaaaataaaagcctaaaatttaggagacagaaaagccagacatattttaatttaatcctctgggaaggaatttaggtctgggaattactgaactgagttatgaaaaagtgaacttgaaagtagggagtactacagacataggagagatttttcagtatcagtatgtgtaagaatgacttagagaaataccttaagattcagaaacccagaccccacttgctctcattctgatttaaatggttggagaatgcctaggaatctgcatggtaaatccacaggcgatttttttttttttaatctgcctgtgctgcccagaggc

SEQ ID NO: 33816 - DNA, 1073 bp, Homo sapiens
ccagtgcatttagtagttactcctgtcaacatattcttgttttggaatatgctttgggagaactctgtgtagttcaaagtattctcctgtttgcctctgatgcaaccaagtacgactcatttgagttaatatcactttacaaggtaggggcctgagaaaggagaaaagataatgggccttaggatagaagaatcagtgctgatggaaatgacgagaatcttttgggctgggcttccttttttttttttttccctgaaaaactctcttttaatttgaaaattaaaatgggtcaaataacttaggaactaaatgttttaaagatagcttttaagatagggtctctgttgcccagtttggaatgcagtggctcgatcatggctcactgctgcctcaacttaccaggctcaagcaatcctcctaactcagcccccaaagtagcaggtaccacaggtgtacaacaccacacctagctaattttgtttattttatttttttaaatagagacaatgtctcgctgtattgaccaaggctaaaagatagcttttaatgagtacattaatgtaggacttttaatggcttaagttaaagttgaaagtttcatactagctgtaaatgtcccatcaaaactcccgtctgtaaactgctttgggaggtggagttctaataatcctttgagtttgggaagaaaatgaaaacacctttaagacccttattcttgtttagtgtcaggcactgtgaataagcaccctgctctatcctgcccaaccctgttcccaagaatgtgtgactgtcactaatagtaaggcagtaggtgggccatttcttaggataaaaagagaagaattcctaaataatcttgtatagaggctggtgtagatttaaaccataaacttcacatgtttttcccagagtttgctatcaaatgcatgggaaatacaggaacagggtctggttcaagtgcttgtttagatgtgtttgccttatcctgtgctctgccattgaatcctgcttttttaatttttgttttgttttgatttgttttcacactggaaaagtatgaaaattctctgaaa

SEQ ID NO: 33817 - DNA, 1055 bp, Homo sapiens
acatttatttttttaatatcctttgtttcttgtgtaaactaattatactactgtaacatatttgaccactctatgttcagaattattttccgtattttgagaaatattgaaaaataaaagtggttgctaccaaaaaacttaaaatcttgcttgaaacacacagagaaaagacaggaagccattatatattgtaaaataatgattaactgcaatgaaagctttaaggaagaaagtgtggtctgatttaatcaggattcacttggggagtagagtgtgagctgagtcttgaagacattaaatgtctgtagatgggaatggtatgtcatggagtaaaacaaaagataagagtaagtgaattcatgagggaagtgtttacaaagaaatgctgaagatgacctgtcaaagtgagaaaaggatgaggacagagaagggagtgcctaagaaactaggaaaatgttatgttaaagaaagtgccttaggagagtggagggtaaaggaccaatagttccagatgccacagggagccaaagagagaaggctaaagaaaagtagaacattgtgatcagttgaatattgcagggatagaaaggaaattgaaatgggggatgatatttggtttcaaaacagatgaaagttggatgatctgatctatgaggattcatagggtcagaacatttttcctttttaagatcaaaggtggtgaaagaacagattgattctgtgagattaagagatttaaaatggcagagtgagaaagaatcatctccttttatgaggattgtctggatggtaaagaatgagtcctaggtagaggtattcattttagtcagggggaaacaactttttcctgtaagattgaaggaaaggctacaaagatagatgtgggcctattgatgaatagaaataaaaataagattttatagataatttacacttaatgatagtatcttcagaaagtgctgtcataggaggcaagattatctcttggcatataaaatctaaaaataagattttatagataatttacacttagtgatagtatcttcagaaagtgc

SEQ ID NO: 33818 - DNA, 1113 bp, Homo sapiens
gcctccttgagctggggtgggctccactcagttcgagcttcctggctgctttgtttacctactcaagcctcagcaatggcaggcgcccatccccgagcctcgctgccgccttgcagtttgatctcagactgctgtgctagcagtgagcgaggctctgtgggcgtgggagcctccaagccaggagcaggatattatctcttggtgtgccgtttgctaagaccgttggaaaagtgcagtattagggtgggagtgacccaattttccaggtgccatctgtcacagcttcccttggctaggaaagggaattccccgaccccttgcacttccctgggtaaggtgatgcctcgtcctgcttcggctcatgctcggtgggctgcacccactgtcctgcacccactgtctgacaagccccagtgagatgatcccggtacctcagttggaaatgtctctgcattttctgcgtcgctcacgctgggagctatagactggagctgttcctattcggccatcttggaactgccctcactgcaactcttgcagacccctaaatacactgccttggtgaacttggataagataaggaagattccctaggttagcaggcaaagtcacttgctctcttttctctcttttccccagtcagaaggaacctctctctgtactaggctgcctggagttgagggagaggtgacacagactttcctgtgatcaccacagctgacactacagagtctcacctgaaggcttgcagaccagcacagtactggagttcaccagtactggtagccactaccgcctagctgctgctgatgtttattcaaggaccatgaccactttagtcagcaggtggtgaatcctgctgggactgagtctcttccatcaggacagtgcattttcttctggcccagaatgggtctagaaacaccatctaggagcaaagacttggaattgggggcttcgggaatctgctaagctggtgcccaagttgcaagacaaagtcctctgtgctcttcccactccatcctccacatagaagatgtctccccaagagctgcactgcctggaactggggaggggtgatacaggcactcccttagctgccacagttggttt

SEQ ID NO: 33819 - DNA, 1072 bp, Homo sapiens
atataaattttttataatgctcagtgaccagcactcttgatacatgacaatgttctcttcattcagagggacttacacttaaaagtctttcataaactgtacatgtttgtatgaaaaaactcccttactatcaactatgtaaacaggcattttcatttatttaccttaaaactttacttttcaagataacatccctttaaatgagtagacaggtttatacaggctacactaagctttttatcctctggcttttctcttttattgggtaattttctacttcctgcttgcttggcagaaggtgtacttatttgacaattcctttgaaatcggtttgatgggatggaatttgaatcaagttcctgttgtgctttctgttcaaaaatattgatgtgcaccagagatttgtactatgtctctgataaattaatcttgattattgccactaatttgtagtctaaatatcaagaattattgctctctgtgctttttgaaaatcaaggatcatctttagaaagacaataatagtaaatctatttacccaagcttagcagaagcctcaaccgaacttgaccaaaaaacaacgaaatgcccttaatcacactataccgtacatactttgtattaaatcttgttaatccattctctgtcccgttttcattcattcataaatttgacaaatgtttgttatatgccaggaccctgtgccactgaagaagaaattctaggattgtctagtgacacagtccaatatgtaatcatataattaaattgaaaatgttaaatgttgggcttgtagggatactatctcacatccattacaatggctactatcaaaagaacaggatataacaactgttggcgaggatgcagagaaattggaacccttgtgtgttgttggtgagaatgtaaaattgtacagtcacaatggaaagcagtataaaggtttcttaaaaaattaaaaatagaattaccatatggtccagcaactccacttctgagtatatatatccaaaataattcacagcaggaactcaaagagatatttgcacacccatgttcatagcagtgttat

SEQ ID NO: 33820 - DNA, 1051 bp, Homo sapiens
gttaataatagtacttaccttgtagggtcattagaaagtgaaataaggtaatacttgtaaagtgcttgggacagtacccagcatgtagtaagcatccaagaaatagtaactatcactattatatgtcaaatgctgtgctaggtctagggatagagtggtaaacgggacaaaatccctctgtgcatggagtttatattccagtatgttataactgtatagacagaaatgtatttctgtcctacaggacttatattaatgagcttccttgactctcatctttccatgtcacattttcctttctatctatctctatctatctatctatctatctatctatctatctatctatctatctatctatctctatctctatctctgtctccatctctggttcctcccttttcacatatgtacttaattgcctgaatttctcaagtctgctaagtttagcccttctaattctttcctcttcagccctattgctggcactatggtgaagttctcatttctcttctctcggacttttgtcatatctcctaactcttattcctgcttcctgactgttccctctgccactgtcagattaatacccctgatcatgagggtcttttcccctcaaaaaccttcattgagttgctccttttttacccaatgaagtacagattccttaaccaaacatgaaaatctctccagagtctggtcccaactaccttatgactcctcttttttagatgcacaggctgtagccagtgattattagacagatcttgtgcttctgggcttcacttctttgcatggcaatgcctttctccctgttttcaggtttccacatcctgtgtaccatccattctttcagggagcatctactgaggacttataatatgtccaacactataaaaggtcaaggagatacaaagatgaataaggagtggaccttactctcaaaggaccaggaggctgagagacaaagaaaagatgatgattttgatgatggtgatgatgatgatgatgtgcagggaatatgcacaatgataatagatctatacagaat

SEQ ID NO: 33821 - DNA, 1087 bp, Homo sapiens
ctgaaacaaaagtttcagaaaacgtttttcttactgcactctgatattttttatcatatttctttttttttttaaatgctagtaataactcactaaatagattttatcatggagttatcaaatactaccttaggtcatgtgatacttagtaaataaaaactaatgatgagtagtgattttgctatttgtcaatagcattatataattctgtatcctatgataagtattaaatttatttttttgaaagaaatgaatggaaatttcaggccaggcgtggtggctcacgcctgtaatcccagtgctttgggaggctgaggtgggcggatcacctgaggtcaggagttcgagaccagcctggccaacatagtgaaatcccatctctctaaaaatacaaaaattagccgggcatggtggcaggcacctgtaatcccagctactcgggaggctgagacaggagaatcttgaaccggggaggcagaggttgcagttagccgagatcacaccactgtgctccagcctgggcaacaaagagtgaacttctgtctcaaaaaaaaaaaaaaaaaaaaaaaaagaatggaaatttcaaacacttgaaataaaagtaaatataattttatgtgacaatttatttttcattgctactttcaggcatggcttatttataaaataaacttttgattttgttgattatctttgttctcttcttatcaagcagttttgagaatcatgataatctaaacattaacagaaatacttttttagatcttgtcctagatcttggggctaggtagaagtaaatgtacagattgcttaaatatattctaacaaaatatattctaattgatatagcttaataaaatagattaaaaagttaagattttaatttaatcagagcatcagagaaacctgtcttacttaaaacctatgagcaactctaattgtgaaaaataaatgtagaccttgactatctggaccaaatgttttacagagtcagaactctcatatctgagaggaaggaatgtgtaagttaaagaaaagcagtaaaattgtttctaagggagtgattttgtaatggtacagttaagta

SEQ ID NO: 33822 - DNA, 1046 bp, Homo sapiens
attttaaggacagaaccaatataaatatactaattatagccattaccaggcagaagcattcagcagctaatagtcaactgcatagactaattttaaaagtttaagattgaaaaaaaaattatctcttgaagaagtaattcttctaagacacctaggacacttggcagtgccagttcttaactgtcagtggtcaattgcagcaaagcaaccttgtgatacattattaataaaacattttcttcagtgtgcaccaacctaaaatctgtatgtggtgatagcattagtttattaggctcctgactacaggagtagtctttaataaagaaaatgttaagatggacagggagatacagaattagatggaaagatgtatgcaaatttggggataatgccttatacctagtgatttaattgttcagctcaaatgtaataaagatttttatctataagtaaatgaccttaaaaggtctcttcttatatcttacctccaagatctgtcacagaagctaaagcctaaactagtgggctctctgaccctactttgttacctaatactgccagtgctgattaaatagcttcactgagcagaaagaaatcaaacatttcctgccaagcttaaggtggaaacttacactattattcagatcaacatggtggtgctttagaacttacgcatattagtaatatcatgtttctttcttttgaaacgcacttggacacatttgtgaggatacatggggacttggggagcctcttttaatattgaaatgccatttcgaagtttacttctaagagatgtgaatttttgagtctgggtgaattgaaaggtaaatgatgatatccagtgtaggataatgttaatcacatataacaaaaatagttaaaacacaatgtaatttacaaggaagttttttctaaaatttaactaaaataaatgggatgtgttctattacaaagactttttatattcttgaaatcttacccaaggaatacaaatatgaaatcttttatttgtaaataaagtatatttattgtttgccatttaa

SEQ ID NO: 33823 - DNA, 1021 bp, Homo sapiens
tgtcacccaggatggagtgcagtaataccatcccagctcactgcagcctcaacccccttacccccaggctcaatcaattctacacctcagcctcctgagtagccaggactacaggtgtgtgccaccatggccagctaatttgttgtatttttttgtagagacagggtttcaccatgttgcccaggctggtctcgaactcctggactcaagcgatccaaccgccttcacctcccaaagtgctgggattgcaggcatgagccaccatgcccagcctatatatttcttcataccatactgtgtaatgtaaagattcttctgagatgggaaaataaaatttgtttaaactcttgcaaccttacttaaaatgaaatttgcttgattagccttaaaacaattgttttcctcccaatcctcacctgtctcctcttttctatatagcagacaatatgaaacaccctttgaaggcaacttaattaatcaagagatcatgctaaaacggcaagaggaagaactgatgcagctacaagccaaaatggcccttagacagtctcggttgagcctatatccaggagacacaatcaaagcgtccatgcttgacatcaccagggatccgttaagagaaattgccctagaaacagccatgactcaaagaaaactgagggtaagttgattctcaggttactacacatctaaacctgctctcacagggaactcttgggcaaagtacttttaaaaattgctacaggtatccatctaaagttacctgtagatgaaactgaaatcccatattcatttccactgggattaaatatctttttggttgattttaaaataaacatttagctattttcattattttatctaaaaaataacttagatgaatttagagtgtcctaactatatactttaaaagtatattcataatccttaaagttaactagctatcttcattattgtgggggattattttttcatattaagaaatttattattccatatattgagaagatcagacatggaa

SEQ ID NO: 33824 - DNA, 1051 bp, Homo sapiens
gttgtatatatagatataacaggtttacccccaggatcacaacagctatgtatccttgccctcaaaagtgaaagcactttaagatggtgtgatctatatttttccccttggcttataagtaactgtctgcctgtttatttgtactacaagtgaaaacaactggtgttatctgtgggcggttaatgggctaacaaatgtatgctgcttctttagagtcatagaatattgatgctagaaagaaccttacaggtcattaagttcaaaattttactaatggcaaaacaggttcagagaagatagtgttttgccctcatgtcatatatagaggtctcttaattcctaatccagggtactttctgtttgatgagtttcccaagaactgatttgcatggatttaagattaatcaattattgagcatttactatttataagtgcacactactatgggataagagaataaatgaagtccctctcataaaaagagaatatgattaagctggagatataaggaagcacaaaatggtaccagggactgaacaatagcagaaacagattaggaagtatggattgcagacagtgtggagctagcgagcctttgtgttcaaatttgaaacattagtattaggatacaggctcattctaatctatgttggagttctttccaggtaaaaggcagtaggaaagaccagataaatggttggtttatgatcccatcccatatccaagagtaggctacaaatggatttgaatagcatactccctaatatgttcacaaaactgactaaactgagcctgctatccttattcctgccaaagtttggtccacattttctttaaggatggagaaacctattgggtgtaaaggcatttccttctgaagactttattttgcttctttgattacaggctactcgtaaagtaaatgaaaatagaatagcattatttgctctaataaaaactatattttgaggtaaagatgattatggaaatttttttttttaatgtagtatcgctctgttgctcaggctggagtgcagtggcgcgatctca

SEQ ID NO: 33825 - DNA, 1028 bp, Homo sapiens
agtcttactaagactgtcatgtgccattactttggattaccttttttggcttttcctttcaagccgatgtgaatgaactctggtaatgctatagttttggagaagcatttacttagaatgctttcagcttagcaggaacaaaattgtctctaaaaccttagataattttatgaaatgtgctatggttgataggtagaagtttttaagttgatttcagtttcttcaaattctcccagatagcagggcatattatttaagtgaaattgtatgtatgtgtgtgtgtgtgtgtgtgtgcatgcacatgtgcatatatatctatatatatgcaccttttaagatgcttaccttttatacatgctaccttttaagataaatagttcaggtttcctgttgccttgtgcaacttaaaagggaaacgcactggagtcgatctttgaaaagaatggatgtttaagcacagagatctgaactactactcaaaatatgaaacagcgtgggaaacaaaagggaaatgaggactgtttcccttctgttgtcttacgaaatactactaaactctcttcttaggctcaaggtttgttaatttatctctaattacccaaagtttaaaagctttttttattctataattggattcagggtatgtcgagtaaatgaagacaaaagacaattctgcattataatacataaatatttatggaagcaacattactttattaatgtaggctttcgcaactttcagagactatactatcaatttaatttcagtcagttaaaaaaacttagataaaaggcaagatttcattctataggtaactctgtgttgaaaataggctaagagattgatttgatcttttaggaaatacttttcaaagtgttcacatataacggggcctcatacattctaaactattttcattaagaaggctttggtctacatgaaaattcattacatatccgaaggaaaatagtaaatactctatagaaaacataaaacactcttaaaggaaatttttctgcattttgta

SEQ ID NO: 33826 - DNA, 1055 bp, Homo sapiens
accttactgagatagtcttggacctaacaatgaagagtcttgagttccatgcctaggatttgatcttacattgaagttaaaggagagttgtatttttcagcatcataatgatgtaatgggacctctgatttaggctaatgttgatgaaatgacaaattagagataaggacactaattgggaagctaagataatagttcaggtgggagataatttctattaaaaagagttttaactgaggcagttattttaaagggatgctggagctgaattttagagggaaaggaggattcattcagacggaacaataaagataagcattccagatcaagggcatagcatggtcagagacatggaatcatgagaaaagaaatttagggaactgcaggagtctcagtatggtggcatgtgggggccagggtaaagtttgagaactaagtagggaccagtttttaatcttatgctaaatattatgaggatattttgaagactttaaatgctgagattatagtttagaaggaatctaagaaacaaaatcgtaggcagaagaccagaaatgtccagtgacttgaacatcactggctttaaaatttttagaatttagattgcaaagtattttcatatacattatcttatttgatctttctaacaactttcatgagtagaaaataatgttttattactatccatacactactttcctccaaaaatgtttcagtcttggactcttaaagttgaaataattaaaagcctgatgagaaagaagccattatgttaattaaaattattaatacagctaaacttgatgaagttgtaaatttagtttcaatattcctgtagccagggtaaaacagaaggcataagactgaactatatagaattgctgggtatttttaggtcaaaactgtcaaacaccagagtgctattttgtatgattctcattctctaataaaaatacacatactaattctttaagacagaaaaaattttcttggaattaaaattgcttttaaaagtaaaactacacacaatgtcttaaatactcatagcaaatcaa

SEQ ID NO: 33827 - DNA, 1036 bp, Homo sapiens
aatcccatctctactaaaaatacaaaaattagttgggcatggtggcacacacttgtaatcccagctacttgggtggctgcggcaggagaatcacttgatcctgggaggcagaggctgcagtgagccgagatttcaccactgcactccagcctgggcaacagagtgagaccgtgtctcaacaacaacaacaaaaaaaacctagacagagaataaattattgttaattttaacatttaacagatatggagtaaattcatagtccagagtcatacaaaaagtaactaggatctcaatcaaaatcagacatgaatatttgttaagtgttttctgtttctggcacaaactaaccatattgacattgaaatgtatttaaaaatagtcttacttctttgtctctgtagtaatccttcccctctaccaccggatatggctcctgggcagagttatcaaccccaatcagaatctgcttcctctagttcgatggataagtatcatatacatcacatttctgaaccaactagacaagaaaactggacacctttgaaaaatgacttggaaaatcaccttgaagactttgaactggtaagttgttttctctatatttaaaaaaaaatccatattttttaaaagaaggtgtgttcataaagtttccctttagggaaaaagctatctttaaaatagcttcatatgtgtgtctaataaatggataacatatctggtatgtttctgtgctgagaaattaggaaataaggcaaaaagacctgagtataaatcctgactctaccactgacttgctacaatttggcagactcctatggaccaatcacttaattcttctgagtcttggtaactttgactataaaatggagcaagtaacctcacagggttgtggtgaagattaaatgaaataacatatgtaaagcacgtagtatagtatctgctacagagtagacccttagtaaatattatttttgtctgcttctcaaattctgatgagttacctatttgatttttaaccaagtttgaatgtaatttt

SEQ ID NO: 33828 - DNA, 1023 bp, Homo sapiens
tagttaaattgcccaggagtgccggtattctgttttgatctgggtgttggttacaagagtatatcattttgtgaaaatttatatgtgagctctacactttaaaaaatgtgtgttatttttaattttaaaagtttacattaaaaaaagaaacctctttattgtgttgggtcccttcctctttttgtctgctacttcacacttcttaaatagttgaataaatctttaaagcctcactcccttttaaagttccttaatactcttttttttttttttttcccaatgtgagagactggtagagatgggggaaaaaatgggtgccttttgaactcattgttgggatggttgagtgtctgttagggaagtcagagtgctggtactttccttgctctgcagaaaattgcagagttgccctaagggagggacacctaaacgataagtaacgttaggccacttgggttttgtgtaaagctgaaaggagaaagtcattccagatgggatggtttgaaagcagaggttggctttcatgagctgtggaatttgggaaaggggcattctgggctgaaagaaccagggaaggtaaggaatgcattaggggtgtgctgggaaccttttcttgagcgatgtcttaaagccagcttctcttctctgtctctgataaataattggaaggaaaggcaatgaatttttttctgacagttggttctaactgggggccagggcctcgtttgcaaatgaaaggactgctgttggagtagttgaaatcacaatgggccctgactcttttcacatcaaagtgtaaaagaatctccaggggtgataaatgggggctgctggactcattacttgtaaacaaagctgagggatgacctctacatttttttttaattaaaggaaaacagggtttcctagtggtgagcatggggctgctcttcgtttgaattttgactgttcacactggaaaagatctttctttaaggttacaagggagctgccgctgttacccaggatttaccctgaatctca

SEQ ID NO: 33829 - DNA, 1033 bp, Homo sapiens
ccagtgggctctggatgatttttttttttttgtaaacaatgagaaaagataggtaggttggatgcatgaaacagaagactcaagaacaattcttaatcattggttttgtcactgggagatgctgaaagatgggaaagactgagagtggtacaagttcctttttgagtagtccaggtttgaaatgcctgtgaaaatcctggcaagtggagatgttaagtgggcaattggttctctaagtctagagttcattggggaaggtctgggcttaagacacaatttattcagtagaaaatgaatcacagttgtgcatgagatttcccaacagatgagagtgctcaggaacttgaactacgtagcaacttagtgggaactaagtagcagagaaggcttagtaaggaggttgagatggagctgataaagaagctgacaaaacccaggagagtgctctcttggccaagggaagagcaggtggggagaagaggttcagaacatcaaatgctgttaaactgtggattcagtcacctcttccgtgaaacctcctctcttaccctcaggcagtaatggtctcccatttctcaaagatacaaccttttattatggcatttaaattgtttttgtttttatcttccttacaagattctgtcattggacagctgattatgagctagcagacacagtagaaattcaatcaattaatacattaaataatttatagaagaatgattattggcctctgccaccaagaaatggttatgtcttcttagtgatttgcctgctttttgtctccctggatttaggatgtagttttgaaaataacattgacgttccttcatagacgttcgtacagttttcagtattcacaatggcagaagtatgatatttcgactgtgccctatttttatgctgggcaaggacctcaagaacaaaactcctgtgaccttacataggggtcttacactgaaggagtatgggaaatagcaactcttgtaaaaataagctggtcagtgggtggtaggtaagctgagggaaaaga

SEQ ID NO: 33830 - DNA, 1049 bp, Homo sapiens
taggaagaatcagtatcgtgaaaatggccatactgcccaaagtaatttatagattcaatgctgtccccatcaagctaccatcagctttcttcacagaattagaaaaaactactttaaatttcatatggaaccagaaaagagcctatataacgaagacaatcctaagcaaaaacaacaaagctggaggcatcatgctgacttcaaactatactacaaggctacggtaaccaaaacagcatgattctggtaccaaaacagatacatagaccaatggaacagatcagaggcctcaaaaataacaccacacatctccaaccatcttatctttgacaaacctgacaaaaacaagcaatggggaaaggattccctatttaataaatggtttgggaaaactggctagccatatgcagaatactgaaactggaccccttccttacaccttatacaaaaattaactcaagatggattaaagacttaaacataagacctaaaaccataaaaaccctagaagaaaatctaggcaataccattcaggacatagaattgggcaaagacttcatgactaaaacaacaaaagcaatggcaacaaaagccaaaattgacaaataggatgtaattaaactaaagagcttctgcacagcaaaagaaactaccatcagagtgaacaggcagtctgcagaatgggagaaaatttttgcaatctatccatctgacaaagggctaatatccagaatctacaaataaacaaatttacaagaaacaaacaacaccatccaaaggtgggtgaaggatatgaatagagacttctcaaaagaagacatttatgcggccaacaaacatgaaaagcagctcatcatcactggtcattagagaaatgcaaatcaaaaccacaatgagataccatctcacaccacttagaatgatgatcattaaaaagtcaggaaacaacatgctggagaggatgtggagaaataggaaagcttttacactgttggtgggagtgtaaattagttcaaccattgtggaagacagtgtggtgattcctcaag

SEQ ID NO: 33831 - DNA, 1022 bp, Homo sapiens
gatgaacagtatgcttgggagtcttctgctggaggttccttcactgtgcatgctgatcatggtgagcccattggcaggggtaccaaagtgatcctccatcttaaagaagatcagacagagtacttagaagagaggcgggtcaaagaagtagtgaagaagcattctcagttcataggctatcccatcaccctttatttggagaaggaacaagacaaggaaattagtgatgatgaggcagaagaagagaaaggtgagaaagaagaggaagataaagatgacgaagaaaagcccaagatcaaagatgtgggttcagatgaggaggatgacagcagtaaggataagaagaagaaaactaagaagatcaaagagaaatacattgactaggaagaactaaacaagaccaagcctatttggaccagaaaccatgatgacatcacccaagaggagtatggagaattctataagagcctcaccagtgactgggaagaccacttggcagtcaagcacttttctgtagaaggtcagttggaattcagggcattgctattcagtcctcgtcgggctccctttgacctttttgagaacaagaagaaaaagaacaacatcaaactgtatgtccgccgtgtgttcatcatggacagctgtgatgagttgataccagagtatctcaattttatccatggtgtggttgactctgaggatctgcccctgaacatctcccgagaaatgctccagcagagcaaaatcttgaaagtcattcgcaaaaacattgttaagaagtgccttgagctcttctctgagctggcagaagacaaggagattataagaaattctatgaggcattttctaaaaatctcaagcttggaatccacgaagactccactaaccgccaccgcctgtctgagctgctgcgctgtcacacctcccagtctggagatgagatgacatctctgtcgtagtatgtttctcacatgaaggagacacagaagtccacctattacatcactggtgagagcaaagag

SEQ ID NO: 33832 - DNA, 1049 bp, Homo sapiens
gatagcactgtgctagctgctatgaataaactagaatagcatatcactgttttcctatggacaaaaacccagaaatgtaaaataaatagccatgaatgggttgagattccccctgccccctttggatactgatgacagaaatcttatatgcactatgtaagcagtgccctaggatcagaacagaaagtaacttgcaatttttaaaggtgggagaaatgactgaagtttggagtggtcaggagtttccctggaagtctcttgcctttgtgactttgtatagctccctcaaactacctgagcctgagctcctcatttataaaatggaagaattgaacctagcttccaaggtcctttctagcttcaccatgctctggtctgttgtttaatgacatgaatccaagatggacaacaaatggtcgattttgctccttctacagtaaatagatctatcttcttagcagaagtaaaatagtaaagaaagaagacatgtttgaggcctgttgaggcctgtttgctgtatgcattgtatctaatcaaggaattgagaatgtagccctaaatattaggaaggagttgaaagtttctgagcaggaacagaacatgctgaaaggaaattgtgtcagcagcatggtgtacaggagagcttggcagagagaaaggaggcaagaagacctgtgggaggcagccagtaaggaggtgaagagggcctggaccaaaggaagccaaggatgaccgaaagatttaaagatgaagcccagatttaaaagtatcctcaagtatttgtttattcttttcttagcaaattctttttagtacaaagataaaatatggcactctgagtcataaaattttctgaatttcagaagttgaatgtttttctgaatgtatcaacctgttaaagtcagttcctgtttgttattttaggcgtatattcttgggcttttttttttttttcctagagaaactatgaagtactagctgtgcaagtcagggtgggctaagctgctaaaacagatacctccctccccttcaataccctgaagaacaag

SEQ ID NO: 33833 - DNA, 1031 bp, Homo sapiens
tgaccaagaggaggaggggtgacgagggctggaactaaggcatatgagctgggatggaaagaagctagatagaaaggaaacaaaaaccatcagaactgtggaaccaactccatgggagggataagaagagggcctattctagggtgaaacccaaatttctggcatggtaccattaacccaaacagaaagaggagatttccagagaaagaaaagcaaattttgcgggaggtgagtgtgagctgtctagagaatatgcaggtagaactacatgttaactgtaacatatacttgtctgcacctcaggagatggctgattaagaattcaggattcaggccaggcacggtggcacacgcctttaatcccagctgcttaagagactggggcgggaggattgcttgagcctgggaatccgagatcagcctgggcaacatagcaagacactgtctctaaaaaaaaaaaaaaattcaagattctggagtcaatattacttaaggtagcaactgtctattctatagaaaatggacaaatatagataaaaagccacttccctttctaaaagtgtccctgcaattcaagtgaatactaggaaggattgtgttcattcttctaaacaagactcacatgtatcttagcacaaaaagaggattcttttatgatacaaatgcactgagaatttggtcaggctatcacaatgaactgatagttcagatggatttgagtctttataccactctggaatctggaccaactgggcctcctaaggccattttgcagatctgggcttgtttctgaagctacagacaggcctcttccaagcactctaagtgctccacaaataatatttctgtttcccagaacaaccccacaaaaaggtactcttactccatttttagatgaggaagtggaggctcatgatgtcaggtaagctttctcagctcccaagtggttaagccctcagtttaatgtcatttgactccagagccctatgttgcaccatgccttgataataggccatatgggtttcatgtat

SEQ ID NO: 33834 - DNA, 1026 bp, Homo sapiens
tgaactttttaatttgtgctttattttcccttttgccattcatgagatttcttaaataaaatgatatcttttcttttcttcattattattttaaaggtctctggggaacaagactcatggaggaaagcagcactaaccgagagaaataccttaaaagtgttttacgggaactggtcacatacctcctttttctcatagtcttgtgcatctgtaagtagaatatttccttgcactaatgggaaagttttgaaaagatttgacctatccaaatcataattaaaaggaagtgtgtatgcaccagaggggcaactgggaagttaccttcttacctttgtttttaattctaatatttttatttgggcatttgtttattgactatcttcctatggtagaatgcaagctttataagagaagggacgtgatttgttctctgctgtacccccatttcccaaaactgcagatggcaacagaaggctctgaaaaatatataagaaagaatttttctaattgtgactaaattgtgaccaaatgctaagtgactgtggacttgcgtttaacacaggacgggagaggcaaagagttcaattccaatttagaatttggtcaagttctcttctgcactctggtaaacattaattaaaaatcagcattatctgaccagccagttcatcgtcagtggtggtgattttcactatgagatacgcgtggcaacttgccagacaccaagaaaccaagttagaggatttttgtattagattccttaacaatgaatacagtatcaccattattacagtatcatcattattgtcatactattattatatcagttaacataaagtctgcataagaattgtttccagaaaaatgactttccaaatttaactttcaggaaatacaaataatgctactaatattgcttttattggcgtatacatgtaatatccccttcttttggatttggatatgttgtgtcattgcctcattttaattcattatttcttctcaatctttaataattgctggact

SEQ ID NO: 33835 - DNA, 1043 bp, Homo sapiens
ctggtaggagatgattggatcatggggatggtttcccctctgctgttctcatgatagtgagtgagttctcatgaaatctggttgtttggtaggtgtctgtcacttaccccttctttttctctctcctgctgccttgtgaagaaggtacttccttctcctttgccttccaccatgattataagtttcctgaggccttcccagccatttggaactgtaagtcaattaaacctctttcctttataaattaccgagtctcaggcagttttttatagaagtgtgaaaatggtctaatacagagacttggtaccaggagtggggtactgctataaaaaataacctgaagatatggaagcgactctggaactgggtaacaggcagcaattggaacagtttggagggctcagaagaagacaggaagatgtgggaaagtttggaatttcctagagacttgttgaatggctttgaccaatacactgatagtgatatggacaatgaagtccaggctgagatggtctcaggtggagatgaggaacttattgggaactggagtaaacgtcactcttacatgttttagcgaagagactggcagcatttttcccctgccctagagatctgtggaactttgaacttgagagacatgatttagagtatctggcagaagatatttctaagcaccaaagcattcgagaggtgacctggcttttcctgaaagcatacagttatatgtgctcacaaagagatggtttgaaattggaacttatgtttaaaggggaagcagagtgcaacaaaagtttagggagtttgcagcctgaccatgtggtagaaaagaaaaacccattttctggggagaaattcaagctggctggagaaatttgcataagtaacgaggagctgaatgtgagttgccaagacaatggggtaaatgtctccagggcgtttcagaaaatcttcagggcagaccctcacaacacaagcctggaggcctagaagggaaaaatggtgtgagccaggcccaggcccaggccccagctgttctgtgcagc

SEQ ID NO: 33836 - DNA, 1049 bp, Homo sapiens
tggcaggcattagttaacagccacttggaagcaaaaatagaacattagatccctgagttggaagagagaaggtagaaggtgttacttggactgcaattatctgcacttggaattgagcatttagtcaaaaacttatatgtattctatattctattctcatttctgctacagaattgtaaacaatattcttccttaatacagaaattcatagcccactaaaataagagcgttctcatttgttcatttctcaatcatttaataagtatttactaagccactatatccatatatatatatatatcatatatactgtataatacacactgtagtgttttttgtggattgtgtactatgaggtagtatgttagatactgccagtactggggtaaggaaaacagcctgattaggcccttacgaagattcctcagacttgtggggaaaacagacattatcaaatagaaatacttgcaaaccacagttatgtgttaaaaaggaaaaacaaagtaaaaaaaaagttggtgggggggaacctgatctcctggatacagtgcttcgagaaagtttgttgttggaaatgcaaaccattactactgtggaagggaaaggtcagaaaaatgaactcaccattactgaatagtaatagtagctatcaattaggtggcacttacctgcatcaggacctgtcctgagcactttacatagattgtctcactaaccagcccaacaaatatgtaagggagatactattatttttcccattttattaatgtaaaacaattaaataattctttaaaattagacttagaaaagtggagcaacaatcttagcagtgctaggactgaaatccaagtttgcttgactccaaagtctatctctcttccagaaactttttctttactatctgcctagtaggcctgctgtattcctatttgcaacagccttttaaactctttaaaaatgtgtcctgtaaatttcatatatgattatacaaaaaaacttggaataagcatacaattctacttatctgtgttaactgttgaaatttgaag

SEQ ID NO: 33837 - DNA, 1022 bp, Homo sapiens
atatatatagagagagagagagagagagagagagaaagagagagagagagagacagggagacagggtctcactccatcacccaggctggagtacagtggtgtaatcatggctctctacagcctgaacacctgggctcaaatgatcctcctgcctcaacctcccaagtagctaggactatgggcacatgctgccatgcctggctaatttttaaaaaaaaatttgtagagatggcatcttgttatgttgcccaggttggtctcaaactcccggcctcaagtgatccttccgcctcggcctcccaaagtgctggggtcacaggtatgagccaccgcacttagcctgaattttttatttattatacttttcaactccagaatttctatttggttctttttagcaatctctgtctctttattctgtatttgatgatatcctgtatttgatgagacaatgtcatcataacttccttttttttttaagagatagggtctctctctgtcacccaggctagagtgcagtggcatgatcctagctcactgcagcctcgaactcctgaactcaagcaatcctcccacctcagcctcctaagtacctgacactacaggcatgagccactgtacccagctaatttttattttttgtagagatggggtctaagttgcccaggctggtctcaaactcctgggctcaagtgatcctccctgctcaggctcccaaagtgctgggattacaggcatgaaccactggacccagcctcctttatttctttaaccatggtggggttttttattatttgtttgtttgttttaacctgtttgaatatatttataataggtaccttcaggtctttgtctgctaagtctgacatctgggccctctcaaagacagtttcagttgtctttttttttttcttcttgtgtatgggaacattttcctgtttttttgttttgttttttgttgttttgttttgttgttgttgttgttgttaaagattggacatgttagataatatattgtagga

SEQ ID NO: 33838 - DNA, 1046 bp, Homo sapiens
taatttcctcacgcttcattccaaataaagtccattcacttgagaagagttctatattcctatgacctgtgtctccccatgagcaaaactgctactgctttacagagccagggacagtggcccacctctctgtggcatcctgctttatgaacaagtcactgggctcagatggcagtctctgattttctcaccttgcttcttctggcatggaaactccaccctacaagtgggaactgagtggaagaagagagccccattccccttagccactcttaacaggattagaacctctgcaacatgcatttaagaatgggaacaggctgggcacagtggctcacgcctgtaatcctagcactttgggaggtcaaggcaggaggattgcttgagccaggagttcaggaccagcctgtgcaacatggtgagaccctcatctctacaagaaatagaaaaattaactggtgggttgtgtatacctgtaatcccagctactcgggagcctgaagtgggaggattgcttgaacctggaggcagaggttgcagtgagtcaagattacaccattgcacgccagcctgggcaacagagtgagactctgtctcaaaaaaaaaaaaaaaaaaagagtaggaacattgaggctgggcatggtggctcatgcctgtaatcctagcactatgggaggccaaggcaggagtatcacttgacgctaggagttcaagaccaacctgggtaacatagcgagactttgtctctattaaaaaaaaaaaaaaaaaaggtgtaaaaaacttttgtaacaagagtgggaaagccgggcacagtggctcacacctgtaatcccagcactttggaaggccaaggcaggcaggcggatcacctgaggtcaggagtttgagaccagcctggccaacgtggtgaaaccccatctctactaaaaaatagaaaaattatctgggcatggtggtgcacacctgtagtcccagctactcgggaggctgaggcaggagaatcacttgaacctacgaggcagaagttgcagtaagccaagatcacg

SEQ ID NO: 33839 - DNA, 1032 bp, Homo sapiens
ccaaagctcctcccaccaaatgctaccacccaagagggcagggcctatttaccacccatgccaggtgatttactgtataatttactactgaacgtgtgtgtgttcctgatcattcttgtttcttccttccctgaaggatactagttccacacgtgctcccgggaaaaccctgccagaaataagccgaattagccagtccatggcagaaaaatggatagcagtgaaaagaagaagtactgaacatgaaatggctaaaaggtggctctgtctgataaattataagccacttttatctggttctggggctttggtcattttatcctaagatagaggttttggttttgttgtgaaggtatttgcattttgaccatgattctcttctacagcctcttagtgtgactaggtcatcagtgtactcatttacagatatatggaggacatgtgatatcccaggtgacttactaggtgagggagttgcaggagtgaatcaaaaaagctcacaaagcctttaataaggtggactgttttcatatcttcatagtttacccctttggagttttatgagttttggtcttcacagggataggttttatttaaacctacgtgacttgaacaaatcaactataaagggttttggtgagatttagaaataatatgaacaaagtatacccaggatttgggagactcttaagagagtagttattttcattaataattattccacgtcatcatttacttattcagacataataagattttcaaaaggcatgctttattatatgttgtgacttaccccttgttattacttttacagtgaaattagaatgatattttcatctcctgcttgtctgactgcaagttttttaaagaaaaggtaatacttacataagatttaccttcatttaaaacactggaaaatatttaaaatgaaatgtttcaagtaagtttaatttgtgaattttgttattcttgcccacaaagtccaacacagagaactctgtaggttgttatagaattctttcattttatgaa

SEQ ID NO: 33840 - DNA, 1035 bp, Homo sapiens
aataggaaaatcagtgtggtaaaggtctttgagaaattaagtgggaactcaactgagtcttccaggatggaaagtgaagggactcagagatggtttccaagaggtggtgactcaaactgatgttgaaaaatgagcagagggcaaggggaggtgcttgtttcaacaaagggaacaccatttgccaaagtatgacatcatggtcttgagtggcctttgggttccaaagtcttttcaggtacatgttgatttcttggtttccagatgattttcatcctctaagagatgtttagtttcactctcactgggtaacatagttttggcaatttactgtattgctaaacactctcatcattgtggataattaagaattgaccatatgtgcttttatttaataggtggcacacacttgcctatgtttctgatttgggaaaggtcttttcctttggttctggaaaagatggacaactgggaaatggtggaacacgtgaccagctgatgccgcttccagtgaaagtatcatcaagtgaagaactcaaacttggtaaattctataggaacatagggtttggcatagtatctttttagagaaaatgatttttctaactaggtaatgtggcaaagaaagcaacatatgactatgaagggagtttctctaaatactggtttcattttttactggtaaacaattcaagagtcagtctaatttactgaggcaaaataattattctatattactccttcagattaggattaatgtgaatttaaatgataaaatagacaatggattcagaggcatatgcagctctcattccagtttgcaagagacttactaattcttgtaattagttgtttactaattcttgtaattggctggttgccctggttaagttgatccacagtcatataaaaccctcagaataatgagcaatcaacgtatacctggcactgaactgtgctcagcacttacttgtgttatctcaccaatccttgtaacagttcctgggaggtgtattctgtcactcctcttttactgga

SEQ ID NO: 33841 - DNA, 1031 bp, Homo sapiens
gccacctccacctcctgggttcaagcgattctcctgcctcagcctcctgagtagctgggattacaggtgcccgccaccatacctggctaacttttgtacttttagtagagacagggttttgccatgttggccaggctggtctcaaactcctgacctcaggtgatcaacccacttggcctctcaaaatgctgggattacaggtgtgagccaccgtgcctggcctcagtaagtattttttggataaatgaatgattatattgtgaaacaaaaactttctaattaaggagtatagaatcttttttgtttgttttacaaataaaatcaagcccaaactctattttatagaattattttcctttaatttttccttcctatgtctggtatgtggaattcatttctagacaggatcacacagtttttgctgtcaggcatttgcttgatggcctgtagtgatctgcatgtcttacatatgtgaagctgaggagaaagaaaggtcacccctagaaattctgcctgcattactgcagcaggtttgtctgatttgtgaaattggttggaattatgccagtggtgctagggacacaaatatgttgaatattgacatcctacagtgtgttaattcccttacctaaatatgtataaagtttcttttataaccctaaaactgtaagtattctgaaattagaagcaatgtgactatatctgcagtagatagttgtacttgcatggccatgacagcctgtgcactcaagtttggacccatcctccactgtgacacatttttgttttataataacagttattgagatacaatttgcataccacatgatttacccatttaacatgtacaattcaatggtttttagtatattcacggagttgtataatcatcaccacaatcaattttagaacattttcatctcttcaaaaagaaaccacccatacacattagcagtcacttacctttccccttcagccctggacaaccattaatctactttctgtttctatagatttgcttattttgaaca

SEQ ID NO: 33842 - DNA, 1032 bp, Homo sapiens
gcctatagaacattcaccaagatagaccatattttgagtcataatacaaacatgaacaaattttaaaggattgcaataattaaaagtatgttctctcactatactggaattcaactagaaattaataggagaaaaataacaagaaagtcttcaaactcttagattaaaattaagcagcagccttataaataatcaatgagtcaaagaggaagtctcaagggaaatctaaaaatattttgaactgaacgaaaatgaaaatatggtttatcaaaatttgtgggatatagcttaaagcagtgcttagagagaactttgtggcattaaaagcttatttagaaagaaaagtattcaatcaataatttaagccttcacttatgaaatgagaaaaatattaagagcataataaatggaagataagtacaaggaaagaaatagtgatgaaagtagaaattagtgttattgaagatagaagaacaatagagaaaatcaatggaaccaaaagctagctctttgaaaagatcaataaaatgataaacctttagcaagagagtcaaagagaacaaaagaaaacataagttcccagtatcagtgaaacagaggatatcattaccctgcaggccctgcagacattaaaagctttgtaatggaatctgacaacagttctctctatatacatttaacagcttggatcaaatggacaattcttccaaaaccacaaactgtcaaaactcaaccaagatgcaatagataatctaaataggttatctataactataaagaatggaattcatggtttaaagccttaaaaagaagttccccttggccgggcacggtgctcatgcctgtaatcccagcactttgggaggctgaggtgggcaggacacttgagaccaggagttcaagaccaggctggccaacatattgtatttttagtgaaactccatctctactaaaaataaaaaaaattaacttgggcatgctggtgcatgcctgtaatctctgctactcgggaggctgaggaaggagaattac

SEQ ID NO: 33843 - DNA, 1027 bp, Homo sapiens
tggcctctcctcctctgcctaattatcgtcccctttaaagaacagcatattcttcttcctcttcttttttgcccttgttagatttttgtctctttaatcaaaagttgtgttaaataagaggaccatggaggtaagagtgatttgattcagttcttgatttaggacaggtaatgtcttagattcatttcttccaaaaattaatttaattttgtggggagaggaagagtggcagtaagaaaaaagaagtgctagatgttatgttgtgtgtaatactagggaaaatgtttataacattaatggcaaaaatatttcatttgttgatgaccaaaacacaattaaggtttttaacggcatttcatttttaaaaatgaagtaatctgttctacagtaatagcttaatattcattattcatgttcaaattatggatgacttccaagactttgatttgtatatagttttctattataagttaattgaaataaattcactaatttatacctttgtattgtggaaagtaacatagctttgatgtcaaacaagccttggattccaatactggctcttttacttgtaaggtgaatgaccttgggcaggttaacttttctaagcctcagtttcctaacttaaaaattacttactatgtaccttacagggttatggggaggatagaaggagacaagtaggtaaaatacagtatgtgcttgcactgtatggactccctcttccccacctcaagggtacaatttctctattatctgtctttgttcttctgacctgcttcttttctacaactgattgtgacaagagtaatggtgatggggaattgttgaagcaattctctgcctcagcctcccgagtagctgggattacaggcatgtgccacaacgcccggctgattttttttgtatttttagtagagatggggtttcatcatattggccaggctggtctcgaactcctgacctcaggtgataagcccaccttggcctcccaaagtgctgagattacaggcgtgaaccactgtgc

SEQ ID NO: 33844 - DNA, 1048 bp, Homo sapiens
gtcaagtacctgtggatgatcaacatatagctcttgtaacattcatcccactatgcattatgaataactgtttcactgcgactgccttggatataaattattgaggtgtttatgaatgtggactcaaatttactcaatgcacacagtaaacagctgagtaaactcctgtttaagcagtgagggaaaaatgtgaaaaagtagtggaatatagttaaaacatatctagtcatcatttcagtcattaataacaactggattctagattacctggactatttaaagtgtttcaagaatacagtataataatcaaataggaatttttgctttcacaattacatgcagcgaatttcagatattcagactatgtagtattttatgcattatgggaaaatttttatgtaaattattttattctaatgcttaggttcctctttgtgagttcaaatgccccatttattcattttgataattgtttactttttgtattatccactattaatctgttattatgtaatattctgaaaaccaaccaaagagatcagctcatctaaattaattactgctgagtattatttctacaaaattttacgaccattattttcgtttcaataagcaatctattttctggctacctatagtttaattttgattataaaagcatgatggcccgtaaacttccaggtatcaagtattatgataaaaagtcaaagaatctatttctctttgctttatagatgacatttgaaatgctaattctatttttatgttactttctacctttaaaatattctaatctcataggccccaattagattttaaataaaaatctcagagaaatagggtaccttttcaatttaacaaacaaaatacatcattttttatgcataaggtaactccatgtaagtgattgtggaatgccacataatcaaaataactcataaataattaaagagtcacattataaaattaggaagtgtaaaagaaacaataagtgtactcctgcctgctttttgtgtcatatgttgctgcctttaaaatacaatttcat

SEQ ID NO: 33845 - DNA, 1050 bp, Homo sapiens
taaatagcccaagttcaaagagttagaaagtagtagagcagaaggggccaatccatgcagtagggctctcaaccacctcaccctatatacatggaggctaaccaaagttttgttcatgaacatttgctattttattgttgctgttttcaggcaaagccatttcattgccctttgaagaacaatgggagtctaatattgatgaaattgtccatttctatgcttgacttttatattggaggtagtgccattaatccagcatcaactgggaaattactcaaatcaggtggactagtctgagatttctctaagacaatctcaacattcagttatacttaaaaaatgtgttaatctttgagaaagggaaagcaagtaattgaaattaaaaataaacttacgaatatctttggcctctatatgacaattttggaaaaactgtatataataatctaaaccatgatacttctttaggtagtgtttgaaaatcagaaacagacttgttcttagctgaaaattttattattataaacttagtgctcttgaactttgcttaagatatttaatgatgcaggaaaaatagaaacattcagtaaagaaaaaaagagcaatatatttttcatattcaagttaagtctgcattgtatgtaaaagcaatcatttaatgttttttggagtaaaataataagaaacttttattgacaggtcaatgccataaggaagttggaaatcaccagtgtttatgttgacttcatgagctataaagttgacccttgaacaaaatgggctaactgcatgggtccatttaaatgtggatttttgcaataagtagggttggccctccatataggggataaccacatcctcaaccaaacatggattgaatatattcgtgcaatgaaaaacccacataatagcaagggctgatttttcctatctgctaattctacaggaccaactgaagtaacttgaatatgtgcagattctggtatctgcggggagtcctggaaccaaaccctgtgggtaccaagtgtattcagttttccaaatgagtaa

SEQ ID NO: 33846 - DNA, 1048 bp, Homo sapiens
ataaatgtcttcttttgagaagtgtctgttcatatccttcacccactttttgatgggtttatttttttcttgtaaatttgtttgagttcattgtagattctggatattagccgtttgtcagatgagtaggttgcgaaaattttctcccattttgtaggttgcctattcactctgatggtagtttcttttgctgtgcagaagctctttaattagatcccatttgtcaattttggcttttgttgccattgcttttggtgttttagacatgaagtccttgcccatgcctctgtcctgaatggtactgcctaggttttcttctagggtttttaaggttttaggtctaacgtttaagtctttaatccaccttgacttaatttttgtataaggtgtaaggaagggatccagtttcagctttctacatatggctagccagttttcctagcaccatttattaaatagggaatcctttccccattgcttgtttttctcaggtttgtcaaagatcagatagttttagatatgcggcgtagatttctgagggctctgttctgttccattgatctatatctctgttttggtaccagtaccatgctgttttggttactgtagccttgtagtatagtttgaagtcaggtagcgtgacgcctccagctttgttcttttggcttaggattgacgtggcgatgcgggctcttttttggttccatatgaacttttaagtagtttttttgaattctgtgaagaaagtcattggtagcttgatggggatggcattgaatctataaattaccttgggcagtatggccatgttcacgatattgattcttcctacccatgagcatggaatgttcttccatttgtttgtatcctcttttatttccttgagcagtggtttgtagttctccttgaagaggtccttcacatcccttgtaagttggattcctaggtattttattctctttgaagcaattgtgaatgggagttcactcatgatttggctctctgtttgtctgttattggtgtataagaatgcttgtgatttttgtac

SEQ ID NO: 33847 - DNA, 1025 bp, Homo sapiens
gctatcagtgctgctctcccacagtgcacacacacatgcatgcacacacacactcgtgcaagaatgcatgtgatagtggaacaaataatgaacaatgaactatgttataataactctgaaaaggtactcactcagctatagtctgacttgagctttttctctgactagattttttacctcaaaggcagttgtacagacaacactagtaatcattgtaaattaaattctttctattgtcacaatctggcagtgttaaggacaatttcagttcactgcagaaaatatatttgaaggatattttcccaaatatttgagtgaacttcctttttagagtaattatttgttaatttgagaagtttcatttagattttatctatacaataagttgtcagctaaaggtggacaaataaataaataataccataaaattttagatgtatgttgcttgtgcccccctctacaaagagaaaacagtattatgagaaatatcataaagcatatcaaaatggaaatatctccccagtgactgctgtgtgcttgaagtatctagcactagtctagaaatagcacctaggggaggagattctgttaaattgtgaatatatgtcttgaaacctgtaagacattttgccatggctcgaaagtgacaagtttgtgcctagtttattattacattagttgattgtcatgttacagagtagacaacacaatactgaggtaaaaagaaatagacaagaaggctctcatttgaagcaaaacacagtactggccaatcccatagcatcttgatctgtcagcagcccctgttgggagttggcagaaagatttgcaccaaagagtaagtttctaagtgacaccaaaatgttcggtggggatggctgaagatctgactgacttcttaaaatttttctttagagagttgtacctaggtgtccattaaaaaatattgctggagcatggagggtagggaagctgatagtagaacctcagacaaatgatattttgaagagacagtgcaacagact

SEQ ID NO: 33848 - DNA, 1125 bp, Homo sapiens
ctcttcaaagagaagtgacctgagtgaataagaattaggataggagactattactatgggaatagaaaaaaatctgatgaacctgattaagcattggtaactaatggcaagagaagtttgctacacacaataaagaggacttgaggggtgtagatatgaaaaaatgtagtttctttatatttttgcctagggctagcccaggggctttagaaatggatggctatactgtggctgacagcagggttgcaaaaattaaggtcatttttatgtacaggtctgtattttttaaactctttgactgcgttttcatgtaaaacttaagtcctttagctgccatgttgtcacgagaaggaaggaagtatgtatttagaaggtactcatagaagcccgtcagaccaaggatctgtgaaatatggttttgtcaagaaaggcacctctgagtctattacaagtacaatacaatgtggtctgtaatgaatccccaaccctagagagttctaaatatagaatagatagtcaggtctttggatggtttaagcattaaactgcctaaaggaaaggatctcctcagatgacctctcagtgccccttgcagctctgtaattccaagtctgagacagttggcttatgacgtgcactgagcatatggatgtgcgcaagtatgtttagtgtatatatgtatatatagatgtgtgtatgtatgtatatatatagatgtgtgtatatatgtatgtatatatacatatatataccatagagacgttgtgtttaatattcgtaatgttccttttttcttatcctgttatatcctgcagaatttgtgttttttctacctttctctgtgtatttgccttatatacaaaaacatatacctatttacttttgcagttgaatagccaacacatggagctcttaaacgtttagtttcttcattaagcattcttacaattttatccctgatattttcttaacagaaaagctatgtgtgtctgtttaactttaaatattgtggtaagaggtgaaaggcatattttcaatatagtatgagttttgttgtttactaggagaaagaagtgtaaagcatatagtttagtttggagacccaggatatttacagataccagt

SEQ ID NO: 33849 - DNA, 1047 bp, Homo sapiens
gctgttagcctaattaggctgttagcctaattagtagcacccagttccctaaaacctgaagtcatgatggcatattgtgttatctccttcccagagtacatgtctctggaccatcccacacctgaaatattttctcaaagtaagcagaatcttcctgcctcatatttaattctttctgagactgccctctaaattctactgaggattatgtaattaataatggcttactacattatttttcctagagagcaaaattaatattttaacccagaataataaatgggcacacaaatatcttgatacctgcaagagatatttttccttatttagaggattttttcagctaaaaaaaaatttctaaaaaactttttagaaaatcatacaaaaaaacccagcaaagccctctttgcttatgaacaatggccattctagagctttcagcacttaactgctatgaagttatggtaattccttaggaaacagataagattacggctgttaggattttcagtagcctaaaaaatagatgagtgtattaataaacataatttgacttggcaagggtttttgtttaacatattaccaagagaccttataaagattacctactagtttactatatacataataatatacataatgtatatattatgtgcataatagattgcctactaatctaccttagcatccttaaaaacagtcaacttttgttttttatagattgtcagtacttatatagctcctatgtactatgtataatgatgctttttataaatgtagagatgaataggaaatacttcctgtcttcaagactttcagtatgtgggtgaaatcagcagcattttttatttaacatttatggtatcatatatgcagatatcccaaagagacactccagaaagctttcaaaatagagtccataatgtcttccaaaccttgtccaggaatatgagaagaagagtagacaaaaatccctcaataagccaattcttagagtgcatgcttcacatgcaaatagaattgcagaaacagctttggctgttcctt

SEQ ID NO: 33850 - DNA, 1118 bp, Homo sapiens
attttgcatgaatattacgtaaacttttttgggttctatatatcttgtagacacttgctcttaaagaacatgctgtagtgataggaaaagaaggtagcaaagatattataaaattagcacaagatgttatataattgagtaaaatgcataatgtaggccaagaccattctgtaaaaatatgtgagtcacatgtgtgattttgttatctcatagccatagttttaaaaagttgaacaggtgaaattaattttattaataaatgtattaaatttaatatatctaaaatattataatttaacataatataaaattattgagacatttataatttttatactaaatctttgaaatcctgtgtgtatttacacttacggaacatcttaatttggacaagatgcatttaaaagcaccaatagccatgtgtggctataggctactgtattgaacagttcaggataaggttagaattacagatgttcagagaaagagaagaggtgtatagtatatgcaacacttgttctgggtcatgaaagttgtgtagaatttgtgtagatggagggcaggagtttataatagtaaggaggaatgccagatttgaaacactgtttactgaagattatcatagtagttccagctgttgaacaggttaccagtttatcatatacttcaggttactattaaggaaagttgatacataatttaaggagtgtatagtacccaattagttattcttaatattttttcccaaggacattggacaaaaccataaggttacacagtatttccaaagaggtattaattaagtataatagtaatctttcaagatattatgaaagtctaattctttggtttaaatgtttcaaaaactaactctttttggtgattcataatgaaccctgacatactacattttcttggattcttggatgtactgtaagtaaaactttttttttttttttgagactgagtgtcgctctgtcacccaagctgctggagtgcagtggtgctatcttggctcactgcaacctctgcctcccaggttcaagcgattcttgtgcctcagcctcctgaatagctgggattacaggcacccgtcaccatgcctggctaactttggt

SEQ ID NO: 33851 - DNA, 1046 bp, Homo sapiens
aaggtaaaatttctggttaaataatgatacatgtttatatagatgtgaattaaggcttctagtacaagaattgtgtgtggagtgcttatgcacagttttgacattttaacttattattcaaatatacaggtatttcttatgatgcattgtctgataaagctctggcttttttgacactaaatccttgatcaggaaggccataccaattatgacattgttccagtggaagcacaatttattttaggattatcagccttatagaatggtttctaggattatatgagtacgatagttataaactggccatacaatgaggacaagaaatagtcaaatatttgtggtattcattaagcccattaaaatataatatcttggtcaaatatgggtaagcgaagatttttaaaatccgctgctattttatctagtccagctcacttcgtttcttataagcttatagattcagagttgcctttagaagcaggattgaataaaaatattccattcatttttgtctttctgaactttgagatgagtcattttcatttagaagctgtcacaatttgtatgtttgttgggcaaaattagtaatagtttattcatacacttaactcacttcttaaatgatttaaagatcggtttgagtaatacttagcacctacattgttacctctgtgataacataatttaataattattacaggtacataataggtggatatatttatggggtacatgtgatattttgatacaggaatgcaatttatattaatactaatcacatcaaggtaattgggttatctatcacctcaagcatttatcatttgtttgtgttagggacattccaattccaggtttttgttattttaaaatatacaataaataattttttcactatagttaccctattgtgctataaagtactagatcttattcattctacataactatatttttgcatacattaatgtccccccaaccctccaactctttccagctcctgttacccatcattctattctgtatttctgtgacttcaaatgttttaa

SEQ ID NO: 33852 - DNA, 1050 bp, Homo sapiens
tttgtttgttctattttctgtgaaacagaaagcaaggtcatcagctgagagtgaggatgagataagaggtactggaggtttgagaagagagaaaaaatgaatacccagtggtccaggacaaggtcggcaaactgggcaacatacatatttttccgtagatatgtggtcacagatcattttttaaagttcactttcaaaatcctcttcttcatgatgtcatctctaaaactgatctgcctgagaatggagatgcaatataggcttttctttcccacctctcctttcactgtctctactccataccccactccttttctgggttctactatggtgccttgtctctggttggtaaaatttcttgaattccaagcaaaaaaaaaaaagaaaaaaacagtatcaggaacaaatccttttgaaaatcaaatggtttataaattctttgattttatcaatactgaggaagggcttaatcaatataacatgtgttagataactaggtattacatttgatgatttattgttatgtgatttttggcattcttagtagttcaacagactgacagacatgcctataacaagactccttccattctcttctactttcttattcttatgtctgtaagatggataatgaggatagaaatgacatgaacctatgttaattttagcaataattcaaatgtgaatcagaaaaataactgaaaatatgtttgtatcttacactgtgatatattccaataaaatgatacctttgtacttgataattactaatccaatcacatttagaataattactgatctaatcatatttagaatatgtttatctattttgattaactgtaaactgctaataattgcaataagtcattatagtaggaaacaatacttaaagcttaatggtcacaaaaataatttgtgtaagtaaaacatgtcttcttctggacaaataacacatttatttatcagaaattaaatcatttataattattgaatttatggtaaaattcattgatttcatattaacaaatgttgaagttatagaatttttta

SEQ ID NO: 33853 - DNA, 1060 bp, Homo sapiens
aaaaggcactcagtaaatatcttcaaattataaataataataataatttaaataaaatagaatatcataatgacattttggtgttttttttgtgttatattaaccaaatcatttccagcaaacgacagctacataaataaaactttaatataataatttctccctccaaacatcacaaacttttaatgtctgatgaatgtttttctcccttatcatgcaggaatctacagggaggagccgaaagtatttaatagagacttgtgagaaatttgctcatttagaatttcaagttcttgttttttactattttctctcaaattgttatctactgcctttaagtttttgtctctttatacaccactccctggttcatcactttctccttattccttttgcttttgttcactcgctttttaaatttcatccacgattcaatttagtcatcagttgtcagtgatgtcctcgatgacttagttaattttatgttgctataacaaaattctgcagactgagtaatttataatgaatggaaatttatttgacttaaatttctgaaggctgtgaagtccaagagcatgtcacagggacctggtaggggctttgattctgtgtcattccatagtggaaggtggaaaggcataagagtgtgagggcgagagtaagagatagaaaggaagggaggctaaactcatgcttcatgaggatgcttctcttgagatgacaaacccagtcccttcctcaaaatggggacagaaccctcctgacctcatcacttcttaaaggtcccacttctcacactgttgcattggggattaaatttccaacacaggaacttgagagtacacatttaaaccatagcaccagtcatgctgttagcatgtggaattacatcactgtaataaatacctgaaccaaactttaaatgtaccgtcaatgttacacaagcctctatgtatcatcatttttctctcttttgctttatagaataaaacaaatatttactttcctcaaatttttttttctatttctggttttactcttaattctattcttgtgtgtt

SEQ ID NO: 33854 - DNA, 1025 bp, Homo sapiens
ttcttatgtactgcagtgtgtatcagtaggctatttattctaattgtggagtagtattctattgtatagataacacacactgtatccattgacctgctaatggatatttggattgtttacagtttgaggttactgaaaataaggcttctatgaacatgagtgtaaatagggacgtaggtatttatttctcttgagtaaatacttaggactgaaatgatatggtcaggacaggtttaaatatttaggagacttccaaactgttttcaaacaggttgtagtatttcacatttctaccaggagcatatgagatttcctacccaaaacttggtacagtcagactttttagttttagccttttagatttgtgtgtagtcatttttctttgtggttttaatttgcatttccctattgttgagcatctttttctgagcttatttgctatctgtatatcttctttaatgaagtatcttttcatatctttttcctatttgaaaaatatgtgttaattgagattttagaactctctctatattttggatacatgtcaattattagatatatgctgtgaaagattttcttccagactctggctaatcattttattctctgaatggtgtcttgaaattaagtagcactagtccttcaaatctatgattttttttcaaagacatctagctactttatgtcctttaaattttttttaaattttagaatcaattgatcaatgtctctcaaaaatcctgctaggattttgattgaaatacatgtaattatagatgaatttgagaaaaatttttatcttggcaatatttagtcttagtgtccatgaacataatatatctgtttaggtctttatataagcaatattttttagttttctttcatatttctgtcagatttctatgtattttgtatttttgattttattgttagtgatattattttatttcaaatctatttttttcattgctaatgtattgaatacaatggagttttgaatattgatcttgtacaaactcgttaaa

SEQ ID NO: 33855 - DNA, 1035 bp, Homo sapiens
tactgctttttaaacctaaggctgttttgaaccaaaagccaattttctaatactggaaggctcatttgctccacattattgagaaacatatctattttatttaagtactttagaaatatccttgctagggctgtgtcaaatttaaataccaccggaaagataattgaaaacgctaaataatcttgaattgtttcttctgaatatttctctttacttggttaacatccaagactatgtatcttactgacaaattgtttaatatctgtcaaagttatatttcttttttctagaaaccctcagaagaggaaacaatttttttttggtaatgaattgtggtaaaagagcagtaaatattgccatggatacatataattctctggaccacaggccaaaaaactgctggcgttgattttggggaaaaaaatcagcagataacatctaaatctctgtgcatatagcaaaaataggaattttgggggaaaaataatcatactatatagtaatttgtgtttggatttgagaatattataatagtagagaatgaaagtgataccaggatgcctgaagtgtgtgtatgtgtgtgtgcaggaacatacatgagtgcaagtacacaagtgcctatatgttcattgggtttgagtgtgtgtatttgtatacactggggtttaggaggtagagttggaagggatcttaaaaatagacctaaaaaacaaacaccttaaatgcatagatgacatctattgcttcctctctgtcaggttaaatttgacctcattgaaatttctacccaaccttgcaaaaaaataccaggatgcataaaccaggaagtatgtctgcattcaaacattgcttctgagccatttcttggtatccttattgtcaggtctatcctgcttttcttcactatgttaactgaacttactatttctgtctacttttaggctctgactttgacctttcctgtgtgtgaatttaatttctccctcttagcagtaaagcaatgcatagattacttttaatgacccaccctttcct

SEQ ID NO: 33856 - DNA, 1052 bp, Homo sapiens
atactgcatctctgaaattcattcatattatgcaaatagtgtgataaacatttttattcctctattcctgcctttctcaaactccaaattataacttacctacagaatcccctgtattgaggttggtttttaactgtgcttttaatttattctgtagtttttaaaactgctttagtatttacaatagttggcagtcatgaaggtagtaaattatgacctttattcgttatcataagaaccccagtttgaacagagattgcacatgactttattgtccttctgtgcttcaggagtgtgcagttgcttttctgaaactccaagggagaatttgtgagtgtatttatatatatgctactagaaaagtaattgaagaatagaatagaagaagcaatgtaaaggcttcttagaaaacattaaactagtagagattattcagcctgaagaatagaaggctgaagcgcaatatgcagcgaaatgtttaactatagtgtgagatgatttatgttaactataaaggagaacctccctgggctgaatgatagttattagaccatggtacagattagagaaagagtttatggaataactccaaaatttcctaaaatatcagagtgtcctacttaaatcgtatgctattggtcttactgaaaactataaaaatgcagagattttatacactgtttttgttctttaaaaaaacccagtgtttagtaacatgaaattaaagaaataatggaacacaattccacaagtatcagaaaatgtgctaccttgttgagtaaattgaaaaaggcaggcattacttccattctgcttaagaaaaaaaaaaaatttattttaggtctgctgtgtgatagttgacaagcagtaaggactggcttgtttgtcctataccactctttgtttctttctttcttttttttttttttttgagacttagtctcactctttcacccaggctggagtgcagcagcacagtcttggctcattgcaacctccgcctcccaggttcacgtgattctcctgcctcagcctcccaagtagctgggact

SEQ ID NO: 33857 - DNA, 1077 bp, Homo sapiens
gaagtagatttcctcccaaggaaacactttttctgctcatctgtaagaagcaactcctcatctattcaagttttatcatgatattacagaaattcagtcacatctaattctggttcttttgttatatttccatcacatctgctgttacttcctctcctgaagtctttgaagtcttgaacctttcaaagtcatttatgagggttggaatccaaactcctgttaatgttgatattttgacttcctcccatgaattaagaatgttcttagtggcatctaaaatgctgaatcctttccagaaggtttttaatttattttgcctagattcatcagaggaatcactatctatgagagctatggccttaggaaatgtatttttaaaataataactcttgaaaatcaaaattccttcttgatccatgggctgcagaagatatgttgtattagaagacataaaaacaacattaatctgcttgtccatctccatcagagagtcttagataactagatgcattgttcaacacgtagtaatattttgaaaggaatcttattttctaaggagtaggtctcaacagtgggcttaaagaatattcagtgagccatgtcattaaacagatatgttgttatccatgctttgttgtttcattaattgagcatgggcagagtagatttagcataattcttaaggaccctagaactttaagaagggtaaatgagcattggcttcaacttaaaatcctcagctgtgttagcctccaagagagtcagcctgtccttggaagctttgaagccagcccttgacttctcctccagaaaatctgttatttagcatagccacctttatcaattatcttagctagatcttctggataacttgctgcagcatcttcatcaacacttactgcttcacctttcacttttatgttatggcttctttccttaaacatcatgaatcaacctttgctagcttccagtttttcttctgcagtttcctcacttcttttagccttcatagaattgaagagattaagggccttgttgtggattaggccttggtttaagggaatgttatggctggtt

SEQ ID NO: 33858 - DNA, 1071 bp, Homo sapiens
aatttattgccatattatttaatcctatgtttttcttttagaagaggacggttaaaaataagcttttcaggcatccattataatagatacatcattgagttgaacactttttcctcccgtaatgtaaatatgaactcaagaaagccaggcctcattaaaaaaaatgtttaaaaacatgtatcccttttcgtgttattcaacctactgtgttctcactcaaagcaaatattgaaaattatattcttacttgagtgtaagtaagcatgtaaacaatcatgtttctccaaccttttcaaatgtaatttactttattaactgtaaggcaagttctcggctcatttgttaacaattgaatagcaaaacatgggactgaataaaggcacttgtagaaatgatgatttttgaaaaaaattgaaggcagttgaaaaactgaaagtgtatcattatgtgtaatcaggttactatgcataataaaaagggtgagctaaaaataaaagactaagaaatacatatggctaactagcactttatcagaaatctagagaggagtaattttgatactttcagaattcaaattgaataaaatggtatgcccttgatactttaataacagaataattcctgcatgataagagaaacattctttgtgcatgaaaatcatatcatgaatttatcttaaaagtaattccccacttgctctacattctattataatttatggtattatttcatgctagtcattttagaatagaatattacagctccatggatgatttacatagaaatggacagctgtaagtactttcaaatcctctttctttttcatatttaggaaacattacgaacagaaaagtaatagattaggtatacttaaacattattaaagtgtcaggctactttccttcttttttcaggagaattaattgcatatattccagaaaaggcttatctcagcagtaattactctcctagtcagctctgtaagacagatgtagagtgtgaatgtgacagtatcctatgatacataatggggactgcctccagtttcttacacactccagtaccctgatg

SEQ ID NO: 33859 - DNA, 1070 bp, Homo sapiens
agtaaataggaaagtagtgggaatgtagatgcaaaaatgggtacagaaatgattagtccagggatgaagcaacatctggattatacaggaaactggtctaatttagtcagcactggagtcagaaagggaaggaggaggaaatttgggaatgttcaatagggcatgggtttggatgtgcagaaaagagactgtagtaattgacctgacatgtctgatcattgaagagaaccatcagaaaatgaagcaggaaatagtaagaaatgggcttaatgttaggaaaaatagctccttcaggaaagagatgtataagaaggatgcagttcactggtaaggtataggcagggattctcagggaactaatgcaaagggagtgggtcattcaaagaaccctcatggttagagtaaccgtattctggtttgtccaagacaatgccagttcacaaagtcattcttgcattattaatggttccctttctcccaaaaatttacagtttttatcatgtttgtagtcaatactcaaaaaacatgtgtgaggaggcttttgcttgttagaactatgaaattgcttttaggttggcagagcacatgaaagccatttctagacttagtttgaaggggatgacatctcttgaaaagagtcagcacaggttaataaataacccttaagagctgcactggatggtttaaggcccaacttttcaccacggattatttgcatgaccttgggtaagttacaagttacataacctctcatttcttcagttttctcatctgcagtgcaaaggtaataatagtatctacttcatgtaatgtggtaaggcttaaatgagtcagtgaaaaaaaaaagtgtgtgtaacattgtggctatttactgctaaactggttccattctgcatccagtaaatgtaattcctacggattttcaggtggctctttgatctgctgcattaaaatgtggttacaggagaaactggtaataaactaagagttaggcctcaaatagtttaaagcacttttcaaatgcaaaatattcttaacctgcattaatttatgagttgggtatcattttg

SEQ ID NO: 33860 - DNA, 1073 bp, Homo sapiens
agaaagatcaaaatgaaatgtgaatgcctaatttcactagtctaatgtttgaagtgacagaagtgaccagtgaccaggacaaattcatatgtagcacacagaaactgatcccattctagtcttacttctgacacacattgttgtttggcacaatggaattaactaatttctctttccctgaatctcatctgtcatgtcaggctaaaggaataataggggaaacataattttagttactgtaaataaagtttatgaatttcacattgtggaaaaaatgttattgtccactcaatatatgtattttgaaggaatattgactgcatatttaattaatttctctttcaaaatcatgatacaactacagtaattgctctctttatgggaaaaaggctctttctctagcgaagctttatgattcataaacactgacaaaagattcaaggaattctggcttatgtaattaccgggcatgtatttaattgttttccttggaatacttgtttataggatgatagaattaaaaaataattgaatcctaaaatctgaacttcaaatttctatttctctctgatattatgattaatatagctatttatttgcaacagttctcagatcattgtttttctttataagacaattttgtggtgcaagtattacttaatacaaaatacattaataaataaagttaagtgtaccaaagcagatgctgctactaaacacatgtttctttgctagaatcaagatatatttaaggactgttatgagattaggaatcaaagtgaataattttggatctttgccgttgttgaatgaatttattgttttttaacacagattttatttcatatgtatggcttagtcctcaaataggtaagacttcactgagacagttgtatttaaaaatttgatataatttttatcaaacagatttgaatttgaacaataagtactagatttgaggtatgaaaatgtgagcctttgtgtcaaaattaaaaactttttggcattaaagatgactatcaagaaagtgaagacaaccaatacaatgaaactgtttgaaaatcatgtatctg

SEQ ID NO: 33861 - DNA, 1018 bp, Homo sapiens
atttctttttcagattgttcactcttagcatcaagaaatgcacagattcttgtatgttgatttttgtatcctagaagtttactgagtttatcagtttgattgtttttagtggaatcttcaggatttttcaaatataagatcatattatctgcaaacaaggataatttgacttcttcatttccaatttggatgtactttatttctttctcttgtctgattgctctagctaggacttccagtactatgttgaataacagtggtgaaagtgtactcttgttgtgttccagatcttagaggaaaggcttttagtttttctctgttcactatgataactagctgtgggtctgttatatatagcttaaattgtattgaagtatgtttcttatttacccagtttttttaggactttttaatcatgaaataatattgagttttattaaattctttttccgtgtcagttgaaatgatcacgattttgtccttcattttgtttttatgatgtatcacatcgatttgcatttgatgaaccatttttgcatcctggagataaacccacttgctcatgatgaatgatctttttaatgtgttgttgtgttctgtttgccagcattttgttgaggttttttacatcaatgtttttcagagatattggcctgtagttttcttttttgatgtgtctttgtctggtttggtatcagggtaatactagcttcactgaatgcatgtagaagtacttcctcctcctctatttttcttagttgtttaagaaggattggtgttagctctttaaatgtctgataaaatttagcagtaaagccaccaggtccttggctttttttttttttttttttaccgggagactatttattatggcttaaatctcattacttgttatggtctattcagattttggttttctttatggctaaattttttgggttgaatatcctcaaaatatatttattttttctattttttccttttttaatgtatgtttgctcgtttctaatgatctttt

SEQ ID NO: 33862 - DNA, 1035 bp, Homo sapiens
tgtacctggaggtatcaccattgaaggcacttcgctgggctggggaggttactttgtctctgtgtcatgcctgcgtgggccgtcatcctgcctggcttttctccattctccatgggttgagttgtttcctctattagtcccaatgcaagtacttagatgtttcagttgaaggtgctgaatttacctgccccttttgcccctctccgagagagccacgcacactagctgcttctagtcgaccatcttggccacctccctaaaaattaaaaaaaaaaaaaatgcttaagtgtttttagtaaacataagtatgatttcttatatgagtttttaaaaatttttaaaaagaaaaagaaaacatcatgtttcttaaaaacctaaagtttatactttcactatacaattttacactcttaaatatcaacctcaaactcgtttccacaatgccatctttctcatcttaaaatactttgaaagtataaacatacacacacatgcaggagaggagagaggcagagactgagacagacagacagacagagagagagagaggggggaaagagattttaaaagtgaactagaaaacagtaattcacatttagtttggggaatagaaagaaaactcccaaacagattactttgagataactccaagaccttttggtccttatgattatcctcaatttaaagaaaaacatatgtacacacactgccagatgtggtggcttgcacctgtaatcccagcactttaggaggccaaggcgggtggactgtctgagctcaggagtttgagaccagcctgggcaatgtggtgaaaccccatctctaccaaaaatgcaacaacaacaacaaaaaattggccaggcttggtggcacacgcctgtggtcctggctactgaggaggccgaggtgggaggattgcttgagcctgggaggcagaggtttcagtgagccaagatcatattactgcactccaagctgggtgacagagtaagaccatgtctcaaaaagaaaaagaaaaacatacacaaaaaacac

SEQ ID NO: 33863 - DNA, 1031 bp, Homo sapiens
tacacacacacctcgggctctctccgtggtaactgtattttacctatagaatgcgaattgtcttatttttctgactcacagtggaagtgtcttcatagaaagggatatattttctttttttcccttagtgtcccctcccctctaagcaataaccataatatgcatttaataaaaagttataaaatacaaatatattcctatcatgaaggtgaaatttctgtatactgaaataaactgataataattttagtcaagactttaatcattatatcaaatcaatgtgaaactgaaaatacatgatgatactttgtttctatatctctgataaaatatatatatttatgaaattaatatagatagatttattgtataagaaatcaaaattatctgcaattctaccctctagtaatagctacttttgtggtacattttctgtttaattatctataaaactctttttgtacatattaaatttatcaatttataaatttccatctaccatttagaaatacaagagctccatcaagaatcatctcctgaaagctatgtattctttctttaatcttctaagtgtatgtgatagacatttgtcataaactttcatatgtttacggccttctattaagctaaaaatatttaattcttaattattgtacctaagtctataggaaacttagattttattctctacatctgaatatggcacacgtgcatacgtaataccataataaataattcaaacacatcatttgttgtgattaatgcctacaagagggagtaacaatgacatcccttgaaatgtctgtgttttatttaagttccaaagataactgttccttatttaaagtttttatttgtttgtttgttcttgttttggttagtatattggttaataaagttgtttggaattttatttatcattatttgaattttctaagtcttataactcagagcagtaatccagaagttaccaacaatttccaactcctatcctcaggatgaaagcccttgaaatagaaatgtgagctgtg

SEQ ID NO: 33864 - DNA, 1048 bp, Homo sapiens
atattctatgcttcttgcaaattatacttcttttcatatatattaccagcacaaaatgaagtctctttttgtaaaaagggtgacatattttgaaatgtcttgtatttcttattacttaaaattgcaataaagtttagagactaaaatataataataagataataattgttgcagattagcaaaattctgttgaaactttgtgtttatttagtactttggatggtgactacgggttgcaaaaatactaggacagccacgtgagacttatgtagtgcttaattatttaattttcttgcagttttctttaagatggaagaatacataaagaaaaaaagtttattagaacttgtttttgtactctaattataaaaccaagggaatgaaaatatttgctaattaatcttccctctttaatctcatgtttggtaatagagcatgtttaattggaagttgggagcctataagcattactaatatatttgttataaatgttaagagcaatttttgattgagaaaatcataaatagaaccgttttatgttggtctgtgtttgttaaaagtgtgtgaacatttaaaatattcatattaagtaaaatttcattttattttattgatttcattcatttctttttgttttcttcttttcaaggccctgtggaatcctacatgcactgaaggtttatttaaaccagtacttatttcaacttaggttaaatcattatctgacaataagaaatgcatcactaatctgtgacatgtaaaatattgagtaaaatcaattttttcatcatttcatattttaagtatgtaatatagaaaaattttcagttcaattacttcacaatttttgcatttgcaaaaatcatataaaatattgatgaattaagattcaactaacatatttctgctttattctcattgtatttttaaaacaaaaatagattttgtttaaaaaattctttctatatgtaaatattctaaaatgtaatattccacttggcactaagtatttttgttcactcttctcatccatgtcattggtctccct

SEQ ID NO: 33865 - DNA, 1068 bp, Homo sapiens
aaaataaaactattatatccattgcatctcttttaaagataaacattgacactctttctacagtcagacttagtatcttagtctgtacacagtcagacttagtatcttagtgaattattctttatttcattatgtcgtttaccaaaatatccctattgatgtgttttgtcttaaattccactgtctgacttatttccagacactgcccccaacttccatctcccttggctaagtgaagctgaaggctctggccagcaggaaaggcgaaggcagaataattgcctgacaggttttggattggaaaggaactggggagggaatggaggaggtagctttcaacctctctctgtcgttttattttaggtgtatatctggtgagtaatataacaccaaaaaattattttaaatataatttcataaattatctgttaataagtgagtttttgtttgtattttttgtaattgtaattaattatatttggacagatctacatcttattttgtgttgtttcttgcctcttttctctgcctctttttattcttctttcttacctctgttgaagtgataggcttttattccttatttttacctttactgtttagaaagccatcagattttttttttcttctttagcggttactcttaaatatttaataaaatatttggctaactttttaagataagaaaacaaaactgtaaagggctaatgttactttcttaaaatcacacagttaatattggcaaaagtgaaattccaaattaagtctgtcttcaacaccaatataataatgcctcccttaaatatttgttcattgtcttcagctctgttatctgccatacaataggtgcttctaatttttttattttggcaatgaaagagattcctgtgtactctcagtattagtaatacatacattttctttttattatacgtcatctgaatggcatgtctctttgctgccattcatttctatttaactgataaaattttaattcgctggctaattttctccctgcaactaatgaccgcccacttgtattttaggaatgtgttaattgaagaaaaa

SEQ ID NO: 33866 - DNA, 1049 bp, Homo sapiens
ttttaaagctggtgattcaagtgaattttaaagcatgtttatgctgttgcattatggggcaaactcagctggttaaattacccgttatcctttgtcaaaattaaattatacaaggtctgcagacactcatcacttttatctaatgtgaccaccttgaactgtaattcccttttgaataaataaggctgattcaggtggaaagaagattaactgattgcctgaagttatgtaatgcatgtggatttagtacataggttttaaaatgacattgttaaatggtatttaaactaatgtgtaataattaaggaaggacactctttaaaatgacacaaaagtgatatatgaatatgaggaccaagaaactgtgcattggcatatagaaaatattagtcattggacaatacaattaattgatagaacaagtatttttcataatttctgctaacataggaggtgacataaaagggagtaatttgaattttaaaaataaaataaagattgtatatattttaggaggtcataaatttgtaggtattaagtagcatgaataactcttcttttccatcctgaaaactctaccaatgtagagttaatactctataattcatgaggtagtctgtaataataaaacattaaaccaactgggctcttttcccgggaatcactgaagcaagaaatactgtatcaggagaaaggaaaagagaaaaagagagaaagaagaagacaataaaacagaaaaaaaaaaaaaaggaaagaaaactagatggccaaatttaatagggtaaatggaaaagctgtccattttatatgcagtcaaataaaattttctttctaaccttggaagggctactcttaaagcataaaccagttttatgttatgaaaggacattcaaatatgccttatttcatgtaactgtggggaaagcactttatagctctgcctttaaaccttaaagtcagctttaacgtgtttctaaaagttatattccggtattgctgagatattcctatcacaaagctatttccaaagccatgtttgtggtctaagc

SEQ ID NO: 33867 - DNA, 1068 bp, Homo sapiens
actcatatgtctcagctccttttaagggcttgtgtggtttatgactaagtatctgattttttttaaaaaagtgttacatatagtgagagaagtaattaccaactgttccactatcaggaaggaaataaccaattatcttacataaaatgcaatgttaataataacgagttcaagatctgtacataagacaaattttgaattactttcacttatttttaattaaatatattatttaggttaaaatatttgtatatgtattttttcccattactacatctaaaactttgatacctagtaaaaacagctataggagttcacatactatatttataaaaataataaaaacatataattcatgtggatctgtatatgtttgcatgtatattagagaaaacttaaaaatataattctgtggatctcaatatgtatacacagattttagagaaaacagtgttccagagacacttattatttttgttctaaaaaacaattgtgtaaataatagatgactgatatctaatatgctacccatatttacattttcccaactgttctgaaaatgtcattcatagatggttttattttattttattccttcaatataggatcaaattaagggtgatgtactgtctttagttttcaggtaattttgtctcctttaatctagaacagttctcccctctttttttttttttttgattctatgatgttaatattttgcaagattccacactgttgttgtatagaacacacactgacctggttgtatctgatagtttcctcattgcttcaatcaggctaaacatttgtagcaagactgctacatgggtgatgtgtgtacaagcagtatataatacctttgtgatcaggagacacatactgcattatttaattgtgaagtgtcaaatgtgtaaaactaatttcagatagttcattaaaagaaaaaatctatgtgtatacatatttatatatattaatctattcatcaatctgttgatctagataggtagatagatagatagatagatcttgcattataaaaagaaacagatgcagagaaacagataa

SEQ ID NO: 33868 - DNA, 1064 bp, Homo sapiens
acacacaaacgtgcaggcaaacgcacatgcacgcacacacacacggccttgtaagactttagttttgttcactaagggtctcagtaagtctagtttgcacctcaaagtggaacagtgacttccttatttctggctcaatcaggtgaatcacacaaaataacaaataccattgaaacaatgaattggagagtcagaagataattaggacataggcattaccagaagcgaatccatattggcttgctatctcaaaaacatcactccctttaaacatcttaccaaaagtacagcttttaacttttcttattgcctccttattctctcactctaggtcttcctgcaatttaagctttctacagtacagctcggatcatatttctcccctccttaagatttccagtgatttcccattgctcattaaattaaggacttatctgaattttaacatttgagatgttactaacatgcccctcactatctttaattttgtctttttccccacatgttctccgggcttcagcaacttatagttttcatactttggataatactatttcttctgattagaatgagtcctcttataactccgtctgtcaaaatctcaaccattgttaatgcctatattaaatcaatgccatgctgaaaacttttgaccccagtagattggaaaccatattaattatttcattctgtgttccatattgacacttgccttactctcctatattcttgtcatagtgttttccgataaaaatatctccaaaaattagataaatgccagtattaaaaacaagatggcattatgtctgttagtagtatacatgtccttttaagataaatttggaaacataaatattaattattaatatacattaggtattattggatcacagttgagaagcatttttgtcctttaagagtggaaggattcttcccattaatattattttctaattgggaataaatattttccttacattctttagtagtttgtcagaaagaatgtgcagcagataattatttttaaaaattagaatcagtgaatacattcagaaatttactgt

SEQ ID NO: 33869 - DNA, 1050 bp, Homo sapiens
ataaaggggagtttattaaggagcattgactcacatgatcacaaggtgaggtcccacaatagtctgtctgcaagctaaagagcaagatagccagtctgagtcccatagctgaagaacttggagtcccatgttcaagggtaggaagcaaccagcacaggagagagatggaggccagcagactaagccagcctaatctttccatgttctactgcctgctttattctagctgtgctggcagctgattagatggtgccacgcagatttgagggtgggtctgcctttcacagtccactgacccaaatgttaatttcctttggcaacatcctcaaagacacacccaggaacaatactttgcatccttcaatccaatcaaattgacactcaatatcaaccatcatattaagtacattaattctgaagaacccaatgatgatctatgctattattaaaatccaatgataagtaaaaaacaggatttttgtgtgtgtgccttgaggatctgcaaagtggccaaactccctgaggacttgaaaactgcttaattttcccaccaccaaaatttcaaatatgagttcatctgttttgatcctctccctcttgtaacaaaagcggtctgtgttctgaatctcatacactttgtccttctcaaaacttttgcttattgggttaccaacctttatttgacatctcacctcattcccagattttctgcttgaatatttcaaacaagatgtcaacactgagcttcccaactgatgtaatttgtcagacctgcagctggtcaagaagaacctcccatacctgcctcctccaggcctgcctctgggagctggctctcttgtcagtttatcacagtgcgcataaaatgttaatcactttcttatgagtaacatgatgcattaagtagggaaacactgactttatagcatttttttgtttgtttgagacagagtctcgctctgtcgcccagtctggagtgcagtggcacgatctcggctcactgcaagctctgcctcctgggttcacgccattctcctgcctcagcctccc

SEQ ID NO: 33870 - DNA, 1031 bp, Homo sapiens
gaaaaatgtttctctctgcttttacagaaaaaagagtcctcaatagacattgcttagtattaacttattttccctgcttctgtagtgtggagtactgacatttaaaagactttaatttctattgataataaatgaatgcacagccagagaagagaactctaaaataattagagggatgcatgtcaagtctttcaggccctcatattaatacacagtgcatgctgcttcttattgttgcaaatgtcaaccttcttttagataagtgtcttttgggaaatggtttactacacttcaaagggatataataaaagaaaagggcttggggcaatatttaagcaatgaaagaaacacaggacatttatgactagctgagaggaactgattgcctttggctgtgccttgggaaatccccaggaaacacagtaagttgtgattactattgtaagttaaaatgatataaagcatgcagaggaatttgtgtttttcttatgggtgatactgcatttcatattctcagcataccatcagagttcatatctacctctgtgtttcttactgaagtactagcaggagatgtattattgaaaattgccaaagaataattttcaagaggatcaatttaagaaaatgaaaagaatgtaaagctaagtctatctcagaaaacatatgtgttttcgcatacctcaattaaatgtttctcattaaactagacattttgaaattaatcataccaaaatttgtactgagaatgtttgttaaaatttgcatggtaaatttctactatgtgtataactatggcaaataacattagaggtaaataaaaaagaagggcatacatttaattttatcagtgcatgttcacagtggttatttccttaatagacatagaaatgtttagatctggcagcattattggggggatgtgaggatgtgatttattattacccttataggttttcacttctgagtttctaccaggctgttgagaatataaaggaaattatctcacaaatctgttatttttttcttta

SEQ ID NO: 33871 - DNA, 1035 bp, Homo sapiens
ttacacagtagtggaatatggcaaaccctttaatttccaaaaagctagcaatgttatctcaatataatgacagtgagaaaatatgatttaagctatctaatgaaatatatgaccaatactacctttttggttagagatttttctgtattgtttataattttgaaaatggcaaaatgaaataattcaagtaaatgcagtggatcttagtttttataggatataaatagaattacaaatttcttcttgtatcagaaagtgagatagacaaaatatacaagaaattaatttttaaagaaatacagtattgtttgtaaagaggcaaaatttttactacagttagtctccaaaaataccataaagattttgagtacaaaatttattagaaagtaagtctgttatctaaatggttatatatttttttctgaagaaacgttaatatttaattactgaaatatgggaaagtaaatattttgaaaaattaaaatatcaattttattattttacaaagatcatgaacaattattttagaaaacatagaaatctgagagttataaagatgtatttatattcatgcatatgtgatattgcataatgcatacaaagagaaacctctaggtttgtttgttctggttgttgctctttttgtcattattctagagaagagtggctcatgatgatagcacatcacagttttcctatttgctctttggtgttacgcatcataccatgaatcagcctcctgtgtttttatgtatgtctcagtaatttgatataaatagctgttttaaaagccatttgagtatattttgtattaggatattttatgcagaaaaaaatacaaattaaaacaaaaaatctttaacctagggactttatagtaactaaataaagatgtatgccttctataagtatagcggtctatcaaagtatttccatgataatgtggctttttgaaatgaaatattgaagtcattcctcaaaatcttaatttgaaatcagatttgaagtcacacaaattttcaggtagtttgtctc

SEQ ID NO: 33872 - DNA, 1063 bp, Homo sapiens
ttcttattttagtggtattggtaaagcaattccaaaattctacgtgtatttttggaagaagggagatacaaatgtagaatttaggaaggcaagggaaaaccccatgagatagattggaattaatgttatcagtaagaagtcatgatttcggatacatatgtgtatgtttgtttttacatacatataaatatacgtgtatatccatgtgtatttatacatacacacacacacatacatatatatgtatatgtacactcacacacacaaatgcatacatatatgcttctaggccctcttagtaaacagatattcaagctctgacacccaagaataatgagcacttttagtgccctgaatcctgttttttttttaaataccattccccagtgaatggacccagggttccaccaagaaatggctgattacagaactggggcaacaagagtccaaggtaagcctggagaaacttttgatgtcagataataaatgttgaaaaaattataggagtttatcaaaaggtcacaggggatatcttgaaggagctctcactgtaaaatctgagataatttaatctccaaataattaaggatagcaaggaataataaattgtttaacaacagaattcatgagtctatattagtattaaagagatggcaaatagatggattatttaattgaataaatacataactgtggaagaagagagggctttcccttatagtagaatatcaattgataaatgtgtagatggtactagagttggaaaatcatcactttgcaaccaccataataaaggttagtcaagagtaaggatcatcaatggatgataagtctatgggaaattatgatgcggagcatggtttaaagtgtcctcctacagactgccaataagttggaaaagaaaaaatagtaactctagactggggaagctggacggcactttatccaggtgattgtaaatgaaagcaatgaactttgtttctgcatgtgacagcctacaaagcacacagcgtctcttatgtattagccttcccacatatatacatgtatatatagcctgcat

SEQ ID NO: 33873 - DNA, 1052 bp, Homo sapiens
tgagtaatgtaatttagcaaagttttacataggcaagttgctacttcataaggcaatgatctacctgaggataaaagcatgaattgaaattggatcattctctgcattctggtccaaattaatcggtctcattttgtattaatgctctacctttccttttagtattatcaacttatattaatgtttgtctttcaaattttcaaatatttctatttgacagactaatttctctgttcttgcttttctataaatttaattttcagcacacacacattattcttcacactttctgtaaattctcctgttcttctttaaatgtatgaagcttgattgtgtaactcagggaatttcattcaataaaatatcttagctcaataaaccatttaattacttaaataatagttcaaattgcttaaaacatatttatcaaaaacaaccaattacatatttggatagataatgttacctgaaggtgttatttgaaataatcctaactcattcagtgtgtggtcttagatagagttgcttattttgagtgttaagagtgtttctatatttttatctgatatccatgtatccatgcaaaaattcagggtccttggaataatttggcgttttaccataataaaataaagctaataatgattattatgatgataaaaagttgttcacaattttactgaacatttatgatatgccatatattatgtgccaagattaattaatcttgtgtgcttaattaatttattcattcaacaaatgtttatgtatcattgtaggaactggtaatacaacaggggaaaaaaatgcatgaagttactgcccttgcagaacttgcattctagtagggagaggcagacaacaaaggaattacaagtgaatatacagaactatagacagtgataagagttttgaaacaaataagagggaataagaatagtgatggggtagggggtaggtatggtttactgttttacatggggtggtcagggaaagactcactactaatgtcacatacatgtagagacttgtaagatggaagggagtgggcc

SEQ ID NO: 33874 - DNA, 1041 bp, Homo sapiens
tgtggctttccaaaggtgaaagagaaatcaataaaaattcttacattattaatgccatttaaaacaacacaccaaatcaacaatggcttgggtagtatatatgcatcaaattcttcttgttgataaacataaagatatctttgagctagagggcatatggttcctactgtcattttacaaatagaaaagaaatcaaaagcccagatagtaaatgactgattcaaggtcatagaatgaagtattacgactatattccagtcttcttgaccactagacaataatcttaattcatcaggtggcaaatacccaaatcatatttattggtttataagtttgtagccattgcttacgatcattaaaaggaatatagaagtcattgttcaatgtttcctgaaaagtctttcaaaaaaatcttactgatcccaagcttttctaaagtattaataacttgctggactaactgatttcaattatttctataaaatataattactggttattcctgctgactgtaaattagaactattcaactacattttagctgctgggcaattacattatttctacaagtaaattattttattttcaagagtctgtttttattaatcttaaatatgaattattacccaattgttcttgttatagaaacaatatgtcatttagttaaatattgtagaaaattgtttaaaatataattacgtgatttttatttaaaaactaagttgaatacttgagacagtctcaataaggatcagtcactaaaaaagatgaaaaaatcgtaacagtctcagagattctgcattcagattgataggcaaatgtattaaattctagtggtgctttaaaaatgccaaagctagacatcagaaacaattagtggatatatagtatgacatctgcaaaaaagtgtagttaaacatgattttttttaaatgtcaaagttcgaaatggtataactatgggcagactttgaagctataaatatttcagttgatcatatagatgacattacttatatttctatacctactttatatatac

SEQ ID NO: 33875 - DNA, 1062 bp, Homo sapiens
gagctgaaagaggctgtagagatcattaaaaaaaaaacttagatattagaaaaatgatgcctggagagatgttgtatgacttttccaaggtaaagtacttaattaaaaaaactaaaaatttaaggggattttaagtcatcacccccagccctgtagattaacttaaattttatcaaaagattagacatattaaactattaagtattgcttcaaaccactctcagagatttattttaaaatttgtgcactgtatatgtggttgtcatataaaggattgacaacacttttttgtgtatgtaaatgaaaattgtattggtttagtgctggatttacagtttaaggattgtatttaatgaaagcctctcaattggtatgtccttgacataataaaaattttcataatttaggttttaattttcacattatgttgaaaattcaaattatttccaaatatcctgtgtttatatttactatattaattcaatcaaaaatatactagttgaaatttggactattccctatcttgagcacacaacatgcacacaccccacacactttacccattaacatggtgtacacaaagaatcttagatattttattcttttcaaagttgagaaatgcttgttaatttttaatcaagttgagctattattcaaccatttaaatttaccatcaacatattgtggaataggataccttatgcctaattaacaacataagtaagaatcaaaatatttcatttgctacctgttaatgctgtcttatgattttgctcatgtttactaatctcaattataaaatatatttttatgtgcacaaaccagtatattttatttattttgccttcatctaccttaaatgttaaaatttttaaaataaacctttatatatttatttacacataatttaataattaagtttatcaatatttctatttttgtaaaggaaattactccaggacccatttatatgactatttaggctaaaattgtattttccatttttttaaacaaatatttggtaccagaataacaaggtatgcaaaatgacaactaaattta

SEQ ID NO: 33876 - DNA, 1046 bp, Homo sapiens
atgagccaagctgcctggccctcacactgaagttttttttaatgtaaattctctgtcagttactacacaacttaaaaggtaaatgagaacagttctttttgtttttttcagttccatcatttactttttcatatggctagtttccaaatgctgcaccttttacatgatcagctctgagagctttatcttttattaattttatttatatttattaatcatggttatttaaattatttgtttgttgagtgctctgtatgtgttaagatctgtacggactgttttatatttattaatttagtaaatacctgctgagttcattctatatatctggtacttgaattcagtacagtggaacaatggatgtgttataggaattagaccttatacaattgtgggaggagctgaggaaatacagatggaaaaaggagaaagtttgagaaaagatcaccagtcagtcttcccaaagcactgtcacctttggcatgagaatgctgagaacccaagcacatttggttgctgaagtgggactgcaaatgaaagtttgtagaaaagtcagttagaagcttttgaccctgtaagatctatctgctgtaggcccactgctaagagtctggtagtgggtccaaggctgctgttattcaaacaggactaatagatgagaataagaattagacacaaagcagaagagagtaaaaacaagctagagtttgctgggcgctctgtttcagtcactctctgtgtctgatgtaggtttagagagtaatgcccactgcttcactttcctatcccaaatcttgcacaagttccttttctgttcaactctaatccagaactatacaaagaaaagaacactgggtagtatagttaatagcttaactattagagagccaatagttcaaatctgcaagggatgcttgggattcagtggtgaaaagacagaaaaagttcctcgcttcttgcagttacattctagtggtagagtcagaaaataataaatattttatttaatgtcaagcagtggaagttcaggaaaaataattaagcag

SEQ ID NO: 33877 - DNA, 1033 bp, Homo sapiens
ttctctcaactaggagtttgataattattgcaaaggaaagagttattctttcttcaaaggacctgtacttctttctcttcctgttcatatgtgggaaacatatgataccatgtattatatttttctatattccttgggatgttaaacttacaactggacaatactccaagttccctgtgatcgtagttgatatgacaggatgaccaactcctttggataaaataaattggatttttaaattaagttccaaacttttgggagtgagaaatattttggtagtcaagaaatgctcatgatgatgactacagtgataaactggaagtaatattttatgaacaatgacacataagccaccaacatgtggtagttaggaataactataaaacatctataaaagaactaaaatttacaaaaccctcagtgtaatgaatatgagaaataaaaatctcaacatcaataagtgagtcaatttaacaatatttctcactatttctatagggtaataataggcttttgaactgaaaaaaaaaaaccacaaggacaagcttctagtttcttctgatatttcaataaaaattgtctatttacaacagcagtcctaacaacaaaaaatactactttttatactcctctgattaaacaaaaattcaaaagttgcttgtaaccagaggagctaataatcattattaagtatttactaggataaaataatttaatgaatggaaaaaacatagttctcatgactatctaaattatatttcaaatgttaaaattaagtcttgtattgttattaaacatttttaaggcagttaaatttttaattgtgttgaattcagcagaatcttttaggttattataataattataagatgaattttcttgactaccaagccaaaagaattatttcaaatagtttaaatacaattttctgtagaaagagaagtaaggaagatgatttttttccacatgagtatcattattaagtagacgacagcaaatacaaccaagaaaatccatctttgaagtgtgctaa

SEQ ID NO: 33878 - DNA, 1028 bp, Homo sapiens
atttgattgattaattacagtgatttttctcttttacaaaagacaaactgctgccacttgttgcattttttaaatgagcagtttgcaaagattgtatcttttatgtaggttgcttatttcatatatttggaaacgggttatatcagttggtggacgatatgtcaaaaatttagaactttctcccatctttccaagttgctaaattatatttcagtgaaaagctttctctctaaagtgctaaaggtatttctcaatggaagcaataaaatgaacttttttggcagctttcccagaaaaaaaaaaatccctctagcatttttggaaatgagtaggggaaaattataaataatgtaaaataaactcacataagaggcttatatgaactattatacaatatatattaggaactaaattttcttccattattcctttaggatcttgtggctctagtagaatgggaaaatgcactcccatgagaaatttgacaataacagccaattctgcacggaaaaaaatattgaatggtttatatataagtttaaaatctattttaaaagtaagacttgatacgtgagagactagtcaagtttggtgattaggaagtctctttttctactaaattcaaacctacagtgttggtgttcactgaatacactaggtagtgtagaggatgcagaactcaggggaaaaggtctcaataccaacctacataatgaaaaagaaaagatatgtgtgaggtgtggctttaaaacaaaagatctaatctaaaaagatctaatctatgtatcacttttgggatctatatgatatgacagttatgccttatgtttggaataataagcaatatgtaaattacagcaatatacaagctactgtatattagtagggaacacaggttccatttctccttacttcttcctggcatgctatgataacaacttaactatgttatgataacaactactagtcatcctgcttcctgtatccctttcttgtgtaccttagacacacgtgcatttttcttctta

SEQ ID NO: 33879 - DNA, 1062 bp, Homo sapiens
atttatatatatctatatttatatatatactatggaatactacacagccataaaaaaacagtgaaatcatgtcctttgtagcaacatggatggagctgaaggcaataatcctaagcaaaataacacaggaatagaaaaccaaatattgcatgtcctcacttatatgtgggtgctaaactttgagaacacatggacataaacttgggaacaatgggagcaatagacactgtggactacttagagggcagagggaggaaggaggacatgggttgaaaaactacttattgggtactatgctcactaccggggtgcaatatacccatgtaacaaaccttcacctgtacccctgcatctaacttaaaagttaaattaaaaaatataaaatgaaataaaaataattattctattcttgcaccttctccttctggttgaattggtcaaaggcaaataagaatataatttgactccatttagttatgttaactgttttagaaaatacaatagttacccaattaaaatctactttttttaagacgagattaatttaagtcagaatatgagcctatttgttaatttggtcttatcaaatcatatcacagggcagattgttgctcaattctggcttgtgattgacttgtctctggctgaaagaatctagagacgcataacttaaaaactctaacggaagaagatgttactaattaattcttcaaactcagtatacatcacttaaacaatgtattattttacaatattaaatgcttatttttattattaacattattctctaaattctatgtctatcattgttttagaaatttatttttaatagcaacatctgtgaactataaatactaataatatgttgcaacataggattgtatccatacatggaatattttgacagaatacactagacacatctagacaaacttgttgttcaactgacatagttggtcaaaagtacaagcttggctgggcgcagtggctcacgcttgtaatctcagcagtttgggaggctgaggtgggcggatcacaaggtcaggagttagaaaccagcct

SEQ ID NO: 33880 - DNA, 1075 bp, Homo sapiens
catacacaatagcaacatagattccctgttatacaatgaagaaataaggtagaggatctcttgtataaacaggtagaatgaaataattttaggtggctaagaggatcacaggcagagatgctgataattttaggttgccatagagacaattagcaggattgacacaattatactgttcaggcataagagtagaatgttggaagttatacagaaattaagggaactaacagaaatgtaggcaagattgaatgagatccgggtacataagcatcatggaggctgaatgaataatcacagcagcttaatgtaccatttaaaggggatattgattgtttagaattataaaaatataatgtaatataaataaaacattacaaaatatatgaccatatttagagttagttctaaattaaaattcaaagtaattgtgtagggtggtcattttctgatctgagaacctcctgataggtgagttgtggagaggaaggaacatcagaacatattcctatgcttctctagtgagatcggaaagattttagatagtattcaactccatgacattggcaactatacccagacatgcaaacttttgatgcaactatgagccatctttatggctaaataagttatagaggctttaaagtaaatatgtatgaactgaatttgtatttcctcaagacagaaaaaaactactattcctttagcaaaaattattctgcactgattattattttcaaataagtaaagcttaccatgtaagcaccatgtcctttaaattaatgttgaatattttgaaaatgatcctttacaaaatgaattgcaaatttttatttattttaaaaaactgatatttatcctaatttcagaatgactgacacacaatttcaatatatgtacacactctcctttaccttgtattccttctttgtggatgtcagaaatcagtttctaaccctccttctagttataccctacctttgaagatttcagtttactggaatctgaaaacaaaacaaaacaaaacagacagccatacttcttagatcttgtataaatgagcagtaaagaaggtctg

SEQ ID NO: 33881 - DNA, 1044 bp, Homo sapiens
atgttttacctgaacttccagaataagacattgatatatacatttacagtatatagagccactgattttaccatgcatagaagtggatggaatatcaaaatgctttgttccagtactttgtgattataatgaagacttatggttttttaaattttgacaacttttaggcaacagtaaatatgaacacatagattatattttttgtttgtagagtatttattaactatataagcaacatctgtgaagtatagaataatttccatctacaaaaggaaaatgttgtaatacatatttagtttataatagtatgttaagaaccatcaacttattcttttaattccatattccacagatgttcattagacacctaccattaaatgttaacaaaatttcttcatgggtgaattgaatacacttagaggcaacccattttttaaaaaagtatgagtataatctggattcctgtgagtataaatgtagctcatatttattaatgattgtttactctaaaaatattcagactggtttggcaggctctctgtctgaggcttgaagagcttgctctgggatccttgttttctcagcctctctaattgagggcaccttcacagtttcagggtactttacagcacggagaagaacctaaaaacaaaacgaaaacatgatgggtcataactatgaggaaataaaaagaactgtataaattgcaaagtctgaaaatcaaaaatgtaatacttgaactaaattcattttaagataatattaatgtggaaaggaatgcatctgattgatataaaaagtgtaagaacacttgcagtttaatgttaagcagttacattgcaaagactagtctcaaattttagaacttcattgaaaaatcagtcataaattgtttctccataaacaattaaaaaccagttttctgattctggttaattgtttctttttcattaaatttgttaaatggggatcactaaaagtaaggtctcacaagatagtgtgcatattgctttacattttaaacttccatatggcagatctttc

SEQ ID NO: 33882 - DNA, 1050 bp, Homo sapiens
tcagccttgcatcctggagatttgtgtatgttgaaccatccttgcatcctacttgatcatggcagataaactttttgatgtgctgttggattcggtttagcagtgttttgttgagtattttcacatagatgttcaccaaggatattggcctgaagttttctttttttcttgtatctgtcagattttggtatcagaatgatgatggcctcatagaatgagttaaggaggagtccttctttttcatttttttttggaatagtatcagtaggaatggtactggcttttctttgtacctctggtagaattcacccatgaatctatctggccctgggctttttttggttattaggctatttattactgcctcagtttcagaactcattattgccctgttcaagcattccgtttcttcctggttcagtcttgggagagtgtacgtttccaggaatttgttcatttcttctagattgtccagtttatgtgcacagacgtgtttatagtatcctctgatggttgtctgtatttctttggggtcagtggtgatatctcccttatcatttctgattgcatttatttgaatattatttcttttcttctttattattctagtgaggagtctattttatttttttcaaaaaaacagcttctggatttcagttttcgaagggtttttcatgtctctatctccttcagttctgctctgatcttgattatttcttatcttctgctagcattggggtttgtttgctcttggttctctagttcttttgttgtgatgttagagtgtcaatttgagatctttctagctgtttgatgtgggcagttagtgctataaatttccctcttgacactgctttagctgcatcccagttaatctggtatgttgtttctctgttgtcattagttacaaagaacttgtttgtttctaccttaatttcattatttacccaaaagtcattcaggagcaggttgttcaatttccatgtagttgtatggttttgagtgaacttctgaatcttgagttctaattttattgcactgtggtctgag

SEQ ID NO: 33883 - DNA, 1028 bp, Homo sapiens
tgtgtgtatatatatatatatatatatatatatatatatatatatatatatttctcagaatgtattttaggggagggtgtaggtggggaagcagttgacaaatcaaagtcagaaacaatcttagtatagagaatattcttgaatagtattaccttgaatgctaagaaatatttttgtatttttgaatgtatacttatacaaacagaaagttctgaagtggtctcatgtactcattcatgttattaaacctgagcaaggtatagagggctcaggtgagagagggtaactagaggattaaaaattaatacacaaaacagaaaaggtcacattcttacaggtcaagggatgagaagttgtcatattagcctcattctacctgctcagaaatcctgcttttattatgttatatttatttgttcagtaagctttagtgtttagaattgtgttgcacagttcaaagttttatctctatattaactccaagaactacgggattgtgtaaaaagactgaaatgatgactgactatggggactttttcgttgatgctgttgttgctgccttctgttgtttgtttttcttttaaagtcaggcccctcttctgtagggctgctgtggtttgctcggggtccacttcagaccctattcacttgggcccctcccatacctggaggtgtcatcagtggaggctgcagaacagcaaagatggctgcctgctccttcctccgggatctccgtcgcagagggaaaccgacctgatgctagcaggaatgctcctgtaaaaggtatctggtgacccctgttggagagtctcacccagtcaggaggcataagatgcaggacctcttaacaaagcactctggctgccccttggtagaggaagtgcactgtgctgggggcactcccatacatctggactgcctagattcctcagagccaccaggaaggactaagtctgttgatccatggagaccacagccgtccctcccccaaagggcttaaccccagagagaccagagctctgtcccta

SEQ ID NO: 33884 - DNA, 1035 bp, Homo sapiens
tgccctggctggactgctatgagtaagagaaaggcatctctgtcttatttaatacccactttatgtgtgtgatattgttccacttttaaccctaaacataacgatcatacctgtctctaaatatttcactacatgtaacagaagtatcattctgcccaccttagtaaggatatccaattctgagaactcagatgctccacttctgttttttaccattttcttcttttcctttcccttccccctccttttccacttcctcgtccttcacgctgtactgagacatcatttagttcatcttattaaaatgtacaattaaactattaatagtaagtttacagagttatatggccatcaccaaaatccatttgtagaacttttccatcacccaacaagctctctcaagtccaatcaattgacagttccatactaccttcaagccaaccacgaattgtttctatagattagcctcttctgggcatttcattaaatggaattagataatacaaaatcttttgtgtctggcatcttagaatgagtttttgatgtttatctatgttgtagcaagtgacaagatttttttcttttaatgatgaatagtgttctattatagggatatatcattttgtttttccagtcaataattgaagaaacttagtttccagcttctcttaggaaaagtgctgtaatgaatatttattgaatagtctgtgtgtgtgtgtgtgtgtgtgtgtagctgtatatatatatgtgtgtgtgtatatatatatgtgtgtatatatatgtgtgtgtgtatatgtgtgtgtatgtgtgtgtgtgtgcatgtgtgtgtgtgcatgtgtgtgtgtgtgtgtgtgttttagcctgcttaggctgcataataaaatacaacagactgggtgtcttaaacaacagaaatttattttcttacagttctggagtctgagaagtccaagatcaaggtgccagccaggttgaagtctgttgaggactctccacttaggtttcagagggccaccctctttatatgtactcata

SEQ ID NO: 33885 - DNA, 1025 bp, Homo sapiens
gaaagacaccatcttcaaaaacccatcacattgaagcttagggcttcaacatataaatttgagaggaaacaattcagttcataatatcagtgtagctacactaattcttttatggttaccattgcatgcagttcatcgttataccatccacctatttgtatttgtgttttaaagtgtttctcttacagacagcataagattagatcttttttcttaatccagtctcaaaatttatgccatttactataggtgtttaaattatttatattattgtaatatttcatatcattggatttttgcctgaattgtgctttttattgctatacctcatcatattattctggctattcttttttactgtgatctttttgttaaatatataaattgaaatgtgtcattttaattccttattagtttttgtactatatatttatgaattattttctatttgtgctaggtatacaatatgtgccttaatgtatcacagtctacttcaggttaatattaacttgattccagtaagatatacaatattgctcgaataacttctacccactgttgttatttctactcactgttattatgctgttattgtctttatatgttgtatgttcaacaacacagttttgtaattgtgatttatgcatttcttttaaatcagttaaagaaaagagaaaataaactatgtacactatcttcatatttgcccacataattatcttttccatttctttcatttgtttgagtggattcaaattagtgtctgatttcatttcctttcagaatgagtgctgctgtagtgtttattggaagaaaaatctgctagcaatagattctctcagtattttaaaatgtggtaatattgtgatttcaccttcaattttgaaggatagttttcctggatgtaggattcttggttgacagattttttttttatttgtttaagcagtgtctttccactgccttctggcctcctttgtttcttgtaaaacatcagctgctaatttattatggtttcattgtaa

SEQ ID NO: 33886 - DNA, 1034 bp, Homo sapiens
taaatacatataaatatataaaaatatatttataaatacatataaatatatatttataaatacatataaatatatataaacatatatttataaatatatataaacatatttataaatacatataaatatatataaatatatataaatacatatatatacttttttttttctaagttggcgtctcactctgtcactccagtccagtggcacgatcactgcaacctccacctcccaggttcaagcaattctctgcctcagcctctcaagtagctgggattacaggcacttgccaccacacccggctaatttttttgtatttttagtagagatggggtgtcaccatcttggccaggctggtcttgaactcctgatctcgtgatccagccccgctcggcctcccaaagtgctaggattacaggtgtgagccatcgcgcctggccaaaattacacacacacacacacatgtgtctgtgtgtgtgtgtgtgtgtgtttgtgtgtttgtaattgttttcaggagctagagaaatttcggttacatacacacaaacattcacttatcttttttctgagtaactgcaatgaatttatcatgaaatatggtaaacttctgtaccactagtttctacttttgttcatcgtctggttttcccctattatcttgggcacatttcctttaagccccatgaaaatagagaatctgttattattgtgttaaactatgtcttacttttctatcaaatatattttggtaaaactaaaaaatgaatttaaatgttcattgattttaatgaggacctattgtatgctgtacttgctggatgttccacagctataaaacaatagtgagccagcagatttgggtgggaacaacatcttcactatttcagacaagtcactaggggcatagcttccattcttacagttcctaaaattatcagtgtgggctcatgcccaagcatattatgaaagctgccctttgtaatatatttgtgacatcttatgtggtcataaattcttgaatactttttggctat

SEQ ID NO: 33887 - DNA, 1001 bp, Homo sapiens
gtaaagcaattcctcaaaaaaaaagtaccatgtgattcagcaatttcacttctggctatacagccaaaataagtgaaatcatggcctcaaatagatgcttatacacctgtgttcagagcagcactattctcaataaccaaaaggtggaagcaaccccagtgtcaatcagcagatgactggacaagcaaaatgtgctatatgcatataatgcaatattatccagcttaaaaagtgaggaaattctgacacatgctaaaatacgaattaatcttgaagacattatgctaaataaaaaaaaatcacagaaagacaaatattatatgtttctacttatatgaggtacctaaagtgtacaaattcatagagacaaaacagattggtggctgccaggggttgggaagagaggaggttggggaaataatgtttaatgtgtacagtttcagtaggggaagatggaacagttctgaagatggatggtggtgatgattacacacagtgtgaatgtacttaattccacaatgttgcacacttagaaatggattaaagagcaaattttaagttatatgtattttaccacataaaaaagagattaaaaaataatatagttcagtaggttcttggctagtaagttagacaaaagatcagaggaataagacaacttggcaggaaccttatgaaaaggattctgctactgaaatggttaaatttaataactcttaggtggtaagaaaatgaccctgtgtctatgtattaattcttattactggtatatccactggcctctttctcatttctccttgcatgtgaaaaaagtttttctaattcatgccccaaattgaactcttgatctcctttataaaacaccacaaaaagctgctcttgctgcattacattccgtctcagtgggtgacaactccatcattctgattgatcatgccaaaatgttggaggcattttccctttctctctcatgatatatccagtcgtacaagaaaatttac

SEQ ID NO: 33888 - DNA, 1073 bp, Homo sapiens
tttatcaatattgtgggtgtggatcatgaacctatgcactgttcaaaacccatagaactcattgttcaattcccacctatgagtgagaacatgtggtgtttggttttttgtccttgcgatagtttgctgagaatgatggtttctagcttcttccacgtccctacaaagggcatgaactcatcattttttatggctgcacaggaaggggaacattacacactggggcctattgtggggtggggagaagggggagggatagcattaagagatatacctaatgttaaatgatgagttaatgggtgcagcacaccaacatggcacatgtatacatatgtaacaaacctgcacattgtgcacatgtaccctagaacttaaagtataatttaaaaaaacccacggaattgtacacaagaaagagtgattttaccaattgtaaatttttctaaaaattaagtaacagaaaaagagaaaaacaatagagtcattggtttgttgatttaaaaatgtatattcagaatgtggaagatgaagggtatatggtaaagaaatggaagccatatgcattctgttttcaaaacgtttcccagttaagaagaaaaaaaaagaaggtagcttcaggacatacctcagttgattaaagaaaggttatttaaagagaggaaacttggagatgtcttttatagaggttaaaaaagaacatacatattcaaaggagagtaaataattaataaagaaaatctttgaggccattggaggtaacggaaagagagaaagagtctttttttttttaatatacttaaaagagggcaaaaggaatagagaatgaatatagatagaatcattttaagggatcatcacttcaacatgaatcttgttaaaagattgttcactggaatttgagatggaactatagcaaaatcttgtttagccaggtctaagacacctttcttattaatagagtccaaatattcaggtttcttaacctcccaaatgccctgccctcttatgagtcccaaagtgcaagtgttgattggtctaaaccaatggctctctgtatggtccgtagaccagca

SEQ ID NO: 33889 - DNA, 1062 bp, Homo sapiens
gctttattttgtctgaaagtttgccaacagtgttgtaccattttaaagaactatattactaattccagtcatcatttttagtcaccaattcgacatactatatcatttttatagccatcacattcatggtgattatacatttacaaacataggaccacttaattttacacagaattaaaaatctaaatacttacgctagaattactttcctcttaattcttctgtaaatgttagatagggagttatattgattttttaaaaaatcagctaagttacatgtctataagctgaatctcaaatagtaaaaggaaaataaaaagtacattataaaaagaatctgagtcttctgaaatttgaaattattgatttacatatatgggaggtctggctttttgactatagagccaagcacaaatgctgtatccaaacggtgggcacatttctttggtagaaatatatagattctgaaaacactcttgacacattcagacctataaatggatagcaaaattttgacataaagatctgaaaataaattctaaagttggcataatagattctcttcaagcagttcaaatacaaatatattaaatgcctcattatgcaagacaccttgataaatgcttggatgacaaagacaaatatgaaataattcactcctctagagagttgatattctagtgggagagacagaaaaatatctaaagaatgctaatgcaatgttaacgtggaaagatttattttatacagttctataaaagaatgaaagaggcatttgagaggaagcctggtatgagatgtagcttttgagctatgctatggcgtatgttgtagagtgcctaaaatattgtgcgaaaataacattgcaaggaaagagacaaaaataaaataccattttaaacaagaaaataacagcaagaaaacttttctcagatggttctgtgtttgaaggaagttcgactgtgttgtaacagaaaacatttgatggtccctgatgggtttcttggaagaatagagtgatgaattctgtgagagaaagaaaaatcagaattattctgcaga

SEQ ID NO: 33890 - DNA, 1096 bp, Homo sapiens
tgatttgtttaactttgttcagttaatatatgttaaagtaaacacagtatgtctatacttaaatgaagcacacattttttgagtaatgtaataaatgtattttggatcaaatgtgttcacttaaagtcacagatgtaactgcattaaaaagaatatgcagttgtcattaaaacaaaatgtattttcttgttcaatgaattgaactacaagaaaatagtgttttattgaataaccactaatcaagcaaattgacttctaatatggcacaattcattcattcacatacttccagagtgttgctgccatgctccagaattacacttgttttccaaaaagcaaaatatcccaatgtttctatgtgacaaatgacatagataatttacaaaatattaaatacaatgaatgattgttttaacattaaatttttatagagaaatataaggatcccatttttcatacaaaattatagtatatttactaaatttatgtttgtctaaaaatatatattactcatttgtagaaaacctgtgagaaaatttgttacagtatgcatggcagtataaattgaaaagattttaatcacatgtgtaatcaaccttaaatgtgcccacaaatacaatctcataaggaaaaatttgagactattttgcaagaaaatattccccaaatcaggaaaaaattatatagtttagataactctataatagcaaatgtgaagaaacataggaaaaagctgagaaatgacctaaatatccaaaaatattggaaaatttgaagaaattatgaactgtgtacttgtttacatggtgttttgccagtaaaagggtaattatggaaatacagaaaactccttttgcttcagctgtaaattttaaaagatacaaaattttaaatatagtttatttatagatgcacacatttattatataaaagtatatatttttaaaaatttcaggccaggaatggtggctaatgcctataatcccaatttgggaggctgaggcaggacgattatttgaggccaggagctcaagaccagcttaggcaacatagagagaccccgtctctgcaatttttttttaaacagctagacatg

SEQ ID NO: 33891 - DNA, 1058 bp, Homo sapiens
agacttttttttaccctctcagctaggtaggctacagggaaacatcagcttttacttttgctattgtaacaatctataatgagctagagtgaacttaataaagatcttttatttctgtgttcaacaaatatttataaattaacttctaggctttagtcacttttatcctaagtgctgggtatacattgaaaaactatgcacaaagcccttatcctgatggagcttacaactgaatgataggacaagggaaaaatgcacatatatgtattttcccataaatatacataatatttatacagtctgtcctccatatccccaggttctgcatcccaggattcaaccaaatgtggctcaaacatatttttgaaaaacaataaaaaataatacaacaatttaaaacaatacacatttaaaaatatagtttggcaactattacacaacattaggtattgcaagtaatctaaagatgatttaaagtgaacagccatatgtgcataggttatatgcaaatactatgatattttgtacccatataagtgacttgagcactgctggacagagtaatatgtggagcgtaattttttgtaggatgatcatagaatgcactttatgctttaaatgagtggggatacgaattaagtgacagagttagctatagggttatttgaggttaatagtatttcaagagaacacagtgaaagagggagagagttagtagatgaggctaaatcacaaagggccttgaagggccagaagactttgtattttactctgagtgagactagaaatcatttaggggtctaaacaaagaacagatataatctcatttaaattttgaaagcatcactttggttgctgggtggagaatggaatataactgctaaagaaaaatttatttatgttaaaaaaaacgttaaaggcaggaagtccagcacaggaagagtagactcatcaggaaccagcctacttccatctggttccctctttattctccacctcatggtctaagatggttgtctgtgctctagcgattccatccataatctaaccttttcttt

SEQ ID NO: 33892 - DNA, 1031 bp, Homo sapiens
gctatgtctcccacttctgcataatgaggttgaaaaaagttactatattttaatttttttgagtgggagtactaaactaattgagtattcataatgccagtctacgatctgtaaagttaaaaaatatttttgaaatatttaattccaggaccagcgactcataatatccattttttttttttttttgtcattttgcactttcttaaagcttctggacataaataacttgttggtaaatctagtatcttggctttccctttgtcctcctacattaccttcttagatattccagaatcataacattttgcgtaaagagagtaattaagattttttatattttaaagaaaagaaatttgtttctgtgttcatttatgcaccagttccatataccaggtcagtggcagagctgagcagtaagacagttttctccgttttgaatcttggacgttttctgcctttgtatcctgtactacactgcttgtcactttcacatcctatggttgtgtcttgtttgattattttgcctagaatgttcatttttttgcctaatttttatgccaaaggaagtctcccttccttaaatattccaatggatttgctcaactggttaatatactcaatagcaaaaataggtacttcagtaacagttgaagtgtttgggactttctgagggtggagggtcggaacagggagaagatcaggaaaaataactaatgggtactaggcttaacacctgggagatgaaataatttgtaccacaaacccccatgacacaagtttacctatgtaacaaatctgcacttttacccctgaacataaaataaaaattaaaaaaaaaaagaaaatagttgaagtaggaatgaatgtctgtagggccaatcaggcttacttactttgaatatgttatgcatttaatttattttagaattattaatgaaaataagccttctgttagtagaatatgtgttttgggagtatttgagctgaaagttggctctctactttctcttgggcatgctctaccactttct

SEQ ID NO: 33893 - DNA, 1034 bp, Homo sapiens
ctgccagttcatgaccctgagattggagaaattaataagaaaaatataaacataattttaaaaataactgatagaaaatccacttgggaacacataatttttaaaatctaaaatcatttaatgataaaatagtatgtggtcttgccaaatgatctactcttctactgtgaaaaccatagattattacagatttgtaaagttgttgacactttaaaattaattttatttgttaaaggaaacaatttactaacattaaactgtttagcataaaataaaacagcatgcagcatttcattacagcaaacatgaaatatgaattctaaagaaataaaatatgaaagaaatgcattctttttatagcctgaaaagacaatattaatcaaaataaccaaaatactttgaaaatcaatgttgaatgtgaatgtttctggttttctttttcttggacttgtatttacttttgtcaaggtaacataaagctacagtatatatcctctgtaacagtaaaactcagaatgtagattttttttctgagtatagtgcctaccctagtgcttaccctacttatctttataccccatagagtttaaacccgtgactagcagaagtgagtgctcactgatggaaattaaaatgaatatatgcctgaatggatgaataaataaagttaaccatctgctccttcttgttcgttccttcagaactctttattccatattggttagattatcacttttcaacccaggggcatggtggggaaataggaaggtatctggattgacataaatcctgagcccttgtcctggctctgaccctttctagttatcagacattaggcaaatcactgaacttctctgagcctgtgttctcacctgcaagatgaaagggttagaatagcatgatcccaaaagtatgcttctatattataacatagtagcccatgtgtaactttttttttcctcttaatctttacagtttgtcaaatctctgctccatgcttttcttgggtgtaaagagataattaattatttctg

SEQ ID NO: 33894 - DNA, 1027 bp, Homo sapiens
aagacaaactccatcataggtcatatttcttgcctctcccgccattctaaccttgcaccactctctaccatgctctttgcactccagccacttggctcctctttctgcctttctggtatttcattgtctctgtgtcacaggatctttgcacattctatttcttcttttggaaacattttctttactctttttcgtcaaggtaacctccatccacttaattagttcctacttacccttcaaattgcagctctatagtcacttctgtagcaaaggcttccccaatctctagttgaggaaaaatgtttttgggctatcatagaataacgttctcttttggcctggaacctactcagtatgtcattaaacattcatatgaatatcttctgtctcacccattatactcttgcctattttgggccattttgcaccctgagtacctggtacttgcctgatatagaaatacattttatatatataatatacaggtatatatatgcacatatatatgtgttctttgaagaattgttactaaaataaaaagataaaaagataggagattgatctgaatttccttaaatcgggagctatgaaatctatcattgaaaaattataaagtaaatatgctaaatataattatattagtaaatatctgtatatttagtaaatatactaaatataattatatttatatactgtatatactaaatataattatatttatatactgtatatactaaatataattatattatatttatatactgtatatactaaatataattatatttatgtactatatatactaaatataattatatttagtatatttactaatttttgtaattatatcatataattgtattttgtatatttactaatttttgtcttgtattttaaattttatatataaattttataaaacttatgaaaatatataaattatatataaatatacatagtaaatatcaaaaaatatgtgttccagccttgtctctactacttaatagcaatgtaaacataagcctca

SEQ ID NO: 33895 - DNA, 1023 bp, Homo sapiens
caaggcttttttgatattggcataaggattgacaaatagattcatgggacataattaggagtccagaaatcaacccacaggcatagagtggggttgattgttaaccaacatgccaatcaattcagtggtgaaatgtttaagcaacattgctgaaccaattgggtccctgtatggaatcaaaacaaaaataaattttactctcatctctcactacacacaaaaattaattcaagatttatcacatactaaaactaaaaccttagaattagaactcttttagaggaaaacataagacattatcttcataacttcaggatatataaagatttcttaggtaccaaaaagaacattttggactttctcaaaattaaaacgttctgctcattaacatacaacattaagaaatagacaaactatgaactgtgcaataaattctaaaacatagatccgaaaaacgtataaatatgtgaaatatgtaaagtgttcaaagaatacacatatttaaaaactcttaaaaagcaccagtatgaaaccaaaaacaattttaaatgggtgaaagccttgtccagaccattcacataagaagatatataaatggcaaataaactgtgcaactttattagtccacagaaaaatgcaaatttaaattacaaggagatgccaatctgcatccactagattggctgaaggcaaagactgacaatccaattgcacctctgatactttgctggttggaatgtaaaacatacagccacttaggagagctgtttggcaattttttaccaagttaaatatctacttaccttgtatacctcacctatttcactccagaaaaatgagaatgtatagccacacgaattcttgtacaagaatattcatagcagcattattcctcatatccaaaactggaagcaactctaatgcccatcattttgagaatggttaaattaattttcatacagtagaatactattgagcaaaataagtaatgaactattgaaatatgaagaaacactgagttaa

SEQ ID NO: 33896 - DNA, 1029 bp, Homo sapiens
aatagctaaacaaatataattttgttagtcttaccttattagcccaaatccaatttctttgagtgatgacaatgctaaaaaattgtgttttcagtgaaattggtgttctgtgtcctccaagtccccctctacctttgctttttggcaaggttcctttcccctctcctctgcgaaatcatagcactcaaaaagatactggagcaatctccttaggaagatcccattccgctgtctacaattaggacacttgttagccctctttaatgggataaaatatgggttcattctgtatcgtgtaggcatttctctaatagagctgttattagtaaattgtgggctcataagtaaattgatattagtgtggatcataagccagtagtatcactgtcacctgggaactagctagaaatgcatattcttaggcaccaagctgatctactgaacctgaatctgcattttaacaagatttttatatgcattaaaatttgacaacactttgtctacaccagaatggtattaacactgaatgatggccaagaaaaaataaaatgtccagttgcaaaactgcctcagtctaaagaaatgatgtatatggtgacagtactaggctccatgtcagggcaggtgaagctaatggctgtttaggactgtagcggtagcatatcatacagtcatcattttctcagtctttgacaaaagttattccttattttactggaaaaagtttacatcataatgcaaatttaaaaaggatttaaggaacagtacatatatttgcaatgacagagaaagggaaagagagagattctgagaaacttttatttaagccctagcagaattttgacctcttagaaatcaagcaatagaagtatggctttgcctttaacttctgaggtttgagcagaaatgtaattttccagcctctcatcatttctgtgacctttctgaatttcttcacattcttcattattactggagtttagaactgagtatatctcactactttcttaggaaaggccttaattaata

SEQ ID NO: 33897 - DNA, 1037 bp, Homo sapiens
acctatacatttgcaggtctcagtttctttgctttgtaaacataggcttcttgtaaggattgggattatacactgaaaaagcttagcacagtattattactattatgctatctacattatattataggtgaaacactacagattataatacatacaatatatactaattgtattatatattgttattttttgtcattatgctatttactattgttctatttaataactctctagataatttaacaggacaaaggtacagaacaatctggcccttacaagccggcggagacgggtacgaattaccatgacaacagcgcgcgcctcgacattgtcggctcgcgcgttgtttgggaagaaaaagcctaggctgcgtgttgcgtcatcattacgcgctcttaaggtttctccgtggtgttttggaaggtcccggcacggctaccgtcgccccacgctaggaaattttttttttattttcaacctttgttacatagcactgaggctacaagatcgtaagtactgagggaagaaagaacaagcgagcgattgaacgttaaaaagatgccttagcatgcactccacctctgaaccttcctgtgtgttcttaatcctatcagcttcctctcagctgggatcgcgccgcgtcaacttccgggcggatgcccgccagcacggcctccgccgctccccttctttggcccctttgtgtccccgcagtgtcgaggcgcgggccctggcaggtcctttctcgaggcagggggcacggtagcacagggagcttctctttgtgggcgggcgcgaggcccgctagggggttatactggggaacgtgcctgcgcgtgcttgggtaagaggaggttgcatgagggtcagctcgtggtttcagtaaggaggggcgggcgggggaggcggacgaaggggagtgaaaagcaatggaaaattttaaaagatacccccgtccaccttctaattgttgcggcctaacaatgaagcgcagccataacagtcctgagccactggcatgtttgcgggccctttat

SEQ ID NO: 33898 - DNA, 1050 bp, Homo sapiens
tttggaaggccaaggcgggcggatcgcttgagcctaggagttcaagacaagcctggcagaaactctggcagtagataaaatctcctgggaaacatggcaaaaccctgtctgtacaaaaaacacaaaaataggtgtggtggcaagcacctgtggtctcagctactcaggaggctgaggtgggaggattgctagagcctgtaagacaaaggttgccgtgagccaagatggcaccactgcacaccagtctgggtgacagagtggaaccccgtctcaaaaaaagaaaaaacacacatattctgttctttggaaatttgcttttagatgttcttaggcatcacatgttgtgccataaaggacacaacagaaataacatgagtacatatagagaaattgcatattctagatatgtgtctaagagagctattcagaaatagaattagcagcatagcaaagtctgagttcactaatgttaagattatacctaagtatagtcccatcttgctttcattctctgatctctataacttacattcatttgttactgttctagttctgatctctagagtgcctaccatgtttgaaaaccaaaatttcaaaatgagatttttttgtttagggaataaatgagtaaaatttgactcaaaatgtcttttataaaggataaacatatgaagttaaatagaacaggaataaagttagttgttggagaataaaccctcatatgaaataaatattccctgtttgctgaggaaatgttttgtttctggcagagattcctatattcaatgggaccattctgattttagcagttagatcctgatcacacctaggtaggcctgaaaattactttatctttgtatccatttaatcttcataatttcttaggagtagcataacttcgtctgacatagagagtattggtgaaagaagatgagtaaagaggaagtgggcatgcaataaatgcgtgtgagtcctaacaaaataaatgctaggaagttccttttgttcgtttccatcccagctcagggttgagattttttcagtgtatac

SEQ ID NO: 33899 - DNA, 1032 bp, Homo sapiens
ataagtagcatatgtagctctagtttgttttcttccagtcacgacaatatgcagatttcctgttactgctgtactctatgttatattctcttgtttttacattaaaagcatttgttgcttaagctctctgtatctctatcctcctcatttgtgaaataaaaatgttacctactttgtaggtttgtgtgtgaaaagtaaatgaaacaatagtttataaaagaccttgtgcaaggcctggtacatagtagactcagaaattgctggtttctgtgatggtattcagataacttacacttggtgggggtcagctttatttcactgctcaacactcagccacttggaagaatccctccctcctaatgttgctctgtagaattactcatcaatttagagatgtatatttttagattaaataatgtgatggtttatgaatatagtattacagtgatttctacttctgaaagactgcaaagaatgtttactttttttttcaattcagtcatatgtagaacaacaaacactgggcctgatatcaagagaactgtctagtattcattataatacatttttgcctttgttttacattaaattgattttttgctatttctgtgcaaagtttgagtgtgctgctctgctttaaaaggtggtgggcccaggaaaagaaaattatcttcttcttcagagccatatgaggaagatgaatttaatgatgatcaatctataaaaaagacaagactggatcatgtaagtttacatttgaattacagtatcaaaattggctgcttaaggttaggatatgtggagtttgtggatattattagacctgaaaatccacctaaatgaattcctttctatcacaactaagggaatttacgtctacatttaatttgtgactgtttttgctttttaatttatccagtatgaagcctgcttaagcacagactattttgtgtctgtggatatcagacctgaaaatttgtctaaatgaatcattctttcttttctttcacagctaagccagataatttgtgc

SEQ ID NO: 33900 - DNA, 1040 bp, Homo sapiens
tttgtatttttagtagaaacggtgtttcactgtgttggccaggctggtctcaaactcctgacctcgtgatccacccgcctcagcctcccagagtgctgggattacaagcgtgagccagcgtgcccagccataactgacaatcttaagaggtattttataaaatgaatcaagcagtacacaccctaatgaagtatatcttgcctccagtgtgcagtgagctcccaatgtccagtctaaagaggcagataggtgcggcctttcttttttcttaagagtggagtttgcaacatgctccagactacactcccacgaaagtggtgggcctcagagtgaggatggttattccttcaccctgatatgtggcatgtacgtatctgaccagtaccattgaaaatacccactacctgtatcaagtccagtcaacatgatgtcagtatagtggatcaagtgatactctctagactgtgcaaaaccatctaagtccatgagtactgtattatttgagagagccaggaaagttactctaactctgaagactgaaggtatatcattaaacctgccaagataaaaacggattgtttctgtttgatctaattgggaaaggggaaaaagcaagtacttgattgataactgcatagccatattgatttgctccagcaaaaataccacatcctgtaaagcagctgcagctggagtttgattgtttatgatactcttaaatacttgcaagactcatctactttttgtataggtcaaggaggcatcttacattgggatgggatggtggtgtcaatatctgcagttcctttaggactgtagtaattgcttattgttttgattgagagggacaattctagggacttggatttggtgtttcctataatagtagcccatacatcatgggtcagggaactgatatagtatgggatttctgccagtgccaaatatgtctgttccaactatgattctggagatggaaaaataagcactgggtcgaatcatatcccttgggcccgctgagacagatacagtcccaaatt

SEQ ID NO: 33901 - DNA, 1043 bp, Homo sapiens
gtagtttaatatatgtagtattctgtgttagcaagttttttctgtaaaagggaagatagtaaatatttcacactttatggactagatggcctctgtcacgtattctttgattttgttttttaacaaccctttaaaaaattattaggtcataagccataatttacctgttctatatgttaaactatttataaataatctttcatcatctcataaaggtgatacgaggacacaagttacctacttataaaagaagaccaatggttttcgtattcattgctgttgataatagcggacgtcaattatttaaattactatatcatttatcacagaatgttaaattattaataatggttttaatttatctctcctcccttcacctttcactggggaggatagacatgaaaggagtggctctttaagaaaaagctaatataaattttaccttcattcacaggcaaataaccgtttgctgctcacaggcacacctgtacagaacaatctgttagaactcatgtcgctgttgaattttgttatgccacacatgtttagtagtagcaccagtgaaatacgaagaatgttttcctctaagacagtaagcataaatgcatattttctcccaaatatgttatttgtgttttatctgggccattcttctgttaggtctcttttgttgttttcatagtgcatatgctctatgaagtaactttaagtaggtgataactctatatttggattggtttggaaaccagccaaaatataatgggaaagaaaatagcaatttccctaatcaatggccagaagtcttggttaatatcctaattttctgaaggatgacgattttaaattgatgaagagctcagatatatagtatgtgcggaaagtttgatcattacatcatctgtatcaaaattggctacgtaaattagtaacatttctttatgggtaaactataaaactagacaaagctagaatatccagaaaatgcctatgctgagaaatatattctgaaataaaagttcataaaaccaaagtcacaactaaaa

SEQ ID NO: 33902 - DNA, 1047 bp, Homo sapiens
tatatgaccatgcatctaattagtcagtgcaagaggatgacaaagatggctaccttaactagcttacagtttagggatgatgtgtgatgtgggagaaggtaagcatgtttatttcaaaatactaaaataatttttttgaagtttcttaagttcaaaatttttatttttgtatatgtttttgaaaagaatatgttcaaaactcagaaatgaaagaacagacgcctcctagtcgccccatctcccaacttccccaatagaggtgacaagtgttagccttttgtttttgtgtgtgtgtgaccagttattttatgtgtataaaaataaacacgtgttctttcttttatgggagaaagggtgcatgtcaacttacgatacactcttctgcatcttttcttatttaatgttaaattaattggaaataagcaagttttttcattctaattcctaatattgataattgttcattttaatttagcaaatttctgttcatgacagacactgttatgtctgtgttatattaggcactctgttctgtaaaaatcaatatactttaatctgtctacagcgagagagaagtgcgtatgatcaaataattactagtctttcttgcgtagcatttatttcagggtgctgtggaagcttggggaggtgggcggtagagaaagtttgagtaagaagcaactgagatctttaagagtaaggataagtagagtgatcatagttaaacaattagcagtcattactaggctttgtgtgcatgtggcaacttgccagtttcaggttgtccaggaaatacagtaaagtgaatgcataaggcagattctctttgggcaatgttttccttattattttggtagggcagcttttagaatttagtaaagcatttaaattctttttcagcaatactagcaaatatccaaatatatggattttattctaacaagtttctaaatataatagaaccataatagttgataaaattaactataagtcttttcttatgggctagttcatttcctcagagggaaatttttcaacctcctgtga

SEQ ID NO: 33903 - DNA, 1073 bp, Homo sapiens
attatgatgaccatggggtttatgaacatttataactttttataatttccatattacatttctcatagtatggacaactttttgccactaactgaattctccaaatactcacacgtgaaatttcaaaaaagaagccacaaatatgtagttctgaagatgttgaataatcattttacaaagcagttttctgaatggggattagttggtgattgtttgtaacaaatatgctaatgctttagaaatgtcagtatttttgtaattatttctacctccaaatatatatatattgtctttcactggataatgtgtgtagatttttacatgtgccttatttgacaatgcttatgtcttgtttttgcttgtctcatttgaagttcttttttattatgttaaagaatgcagctgtatagattatatagctttcattttattgctatttgaagcagatgttcaccaatgtcagcaagaactcaacctgaatttaaaggtggcattccatatactaacatcccccaggtcctctcaagtacttctgctgaaacaaatttatttggctaggcactaagttgttttccagtgaatagtaactaaagaagcccctaccttgctccatggattaattccttctgttcattttccaactgcactaattgtgcatattactctgcctaatcttgtgcatgttttcattgatttccctctcccggcttttgcttctcttgaaactgttgcccagtcacttctgctccaattctcttcctctctaaatagtagtttattactgccacatctccatgcatcagcaaaatgttggtgacatttttctagcctggcagaacagattacttaaagctatttcatttcaaagcagactgaatgtgacttcatctaaaggcagcattaggtactgcatggaaataggtcattaacttgaaactcttatcaaaatatattttaccagtttccagaatttccagtacaggaccgcctgaagagagagccattgttcaattccaattcagtgtgagtgacaaagtgaaatttagaagtgaagttgtctatttgatatttaa

SEQ ID NO: 33904 - DNA, 1030 bp, Homo sapiens
aggtactagctccatgttgtgatgctgatacaacagaacactgtgtacatacatatgtgccctcccctggcacagaagaaatgctttccttgtgtagacagagtgctaattaaaggattttgaacatactgattaaaagagactatggtaacaaagctgctgagttatttctgttctcttacaaaagtctctgccatctactgtgacctttttgggccttgtgcagtggggcatgcaattcattctggactggagaggattggaaggggaggggaaggagagaagggaatgttggctcaatcgggctgctaggctcttggcctttcattgtagttatttttaaccccttgtgtggtttaaatatgcctagtaacattgcctaataaaggtttgcgtttaataactaatttatattgtggtaagattgttaatgttataaatttttaacttactctcatcttaattagttctttggttatactttttctgccttaattatgtaaaattactgggatattactggtcatcaggttctttaattaatagtatcaagaaacaattaaaacctgaaagcatgcttaaaacatgtaatttaatgattcacttactttaataatgcacatgaaattcttagcaaggtctggcagtctctcaattatcttttataataatattataaactttaaaaagaaaactatttagagacttgaaacattaaatatttaacccccgtagttgtagggaacatacagttatggttttgttttgtttttttaaacttattgtccactgaaattaagaaaggaaaaaaaatcagaagtttgtacttagctgggaatctgcatctttagagttcaaaactgtgcaatttttcctctgattaggtattattatgttgaactccaaagggtcatttacattcctttataacactggagctctggtgtatcgaattgtgttatgagataagccactagcagggacttgaacattccattttctttagattttgttgtatcagcatgtgaat

SEQ ID NO: 33905 - DNA, 1077 bp, Homo sapiens
gccagctgcagtttccctcctaccggaagacagaaagactttcagtcctcaagctgaaatgagagagccatcctaccttgaataaatgggcccattgttaattttaagctcttgagtattttcttttatattccctccaagctaccctgtcattatgccaagttagaaaattaatttagtttgtataactatatgatgtatatttcacatgtgtgttcactctgctttaaaaatattaattaccttttgtgtgaagttcagagacctgtcttttcccatgtggcagttttatatgttttgtggtcacaaatgtcaggaatctcaatgtaattctggataaatttttctgctctatgatttgtaaagaaatgaaaatcttatattttttaattgaaaattagtagttttagaaaaaaacgcacttatttgattttagtaaacgttgggcattttgaaaagttattcagagaaatgttactggtaggcaggacttttgtatctgatggaggaaaccgatgtagggtttggataaaataagactagcaggctgggcacagtggctcactcctgtagtctcagcattttgggaggacaaggtgggaggatcacttgataccaagagttcaaggttacagtgggctgtagtcatgccactgtactccagtctgtgccacagaaccagaccctgtctcaaaaaaaaaaaagaaaaaaaaaaaggtaagaatagcactttagaccttgggaaagaacgttttcatgtaactattcatctactcgtgagttaggtatatctacctacttaaactaagaatagatagataatagataatgtacagctgtatattggaatgacttggatttaaatcttagctggaaaatcagttcattaatttgagcttctgattttctttgatgtatgggaaatgctttataaattaaaaagtatacaggtagatttgattattattaataatttggagcctgtgagctttcaattttttttagaacttctgaggcaaagagcttttctttatgatagttgctagtcacactacatgtgaatacacagttgaacag

SEQ ID NO: 33906 - DNA, 1041 bp, Homo sapiens
gaagggaagcaggagaaagcaggagagttgggcacacttggtgtaacttttattgaaaaaaatctgtctgtaagtagacccgtgcagttcaaacctgtgttgttcaagggtcaactgtatgtgtggttttgaattctagtctttagctccttttaaatgatgtgacaaggagactgaccattatgaggtgttcactatggtccgaggaatggcaaatttcacccttatgagactcagtgtgtttttattatcaacctttattagctaatggaagttaactgaaatcaggtaggtttatagagtgttctgtagcatagtgagtcaggcattgtgaaggtatactaatgtgtggcacaaggtagttactcattttagcctagtgtgagcagcagagtgtatgtgttggtaactatagtaacaaaaagagtaaggatgccagggatatttatatttttttgtagtaaagatgaggaaaggaggaatttctctttagtgtgttgctgtaaatgttaaatatgatgagaagagttttgaattagagaagaatttgcaacacttgttatttggattctgtgaattgttaaacatttttttccccaaggtccagagattgatttaacaatggccactgtacttcatgataattgtcctggctaaattttaattgaagaaaagagaaagtagttacggtaatgacattaacaatttaatgctgtttaccattgattggatcagggatttaagtgttgtgattcagttccattgagatctaattaacagcccagtatttttcaaatgatttctgggatattaacttttggaagtggtagaattaagagatttagtaaggctgtataacactagccagagcagactatgttctgaaagtatgtttgttctgaaagtatttttcttctgagaaaacgttaccggaggacagatgtcctttagaaaacaaatgttttgtcccttaactaggaccccttagaaatgttctggagaaagaaattatatctagctagctagctatcgtgttacaca

SEQ ID NO: 33907 - DNA, 1051 bp, Homo sapiens
catggccaatgtaatatatatgtagttaagaaattatgtgaagtgagtgaaccgcatggagttctgtttagttcataaaccttatccataagaaatattattggctgggtgcggtggcttatgcctgtaatgccagcatttgggaggccaaggcaggcggatcacaaggtcaggagttcaagaccagcctggccaatatggtgaaaccctgtctctactaaaaatacaaaaaaaaaaaccccaaaaaccactagccgggcgtggtggcatgtgcctgtaatcccagctactcaggaggctgagtcagaagaatcgcttgaacctggaaggcggaagttgcagcgagccaatattgcgccactgcactccagcctaggtgacagagtgagactccgtctcaaaaaaaaaaaaaaaaagaaaaagaaatattatctctgatggctcttttaccttttaaaaaacatgaaatcatgtgacatcggtgtggtgaaaggtcagtcaattacgaattgggactcaggatgaagaggaggtctcaaaggcccccctcacgatcaggaaggcggaactggggactcagtgcatttctttgagattccttagatgaatcctatacatctaagttctgccaccaggatattagttaaaattcttatgttccaaccactcagtacagacctgtagcttatcgtctgtgaacatctaacttagtattagcatttctttcctcaaaatagtgtacacatttttttttgttgttatttggagatataaccaaataataaaggatactattaaaaatcctttagcttttggtaagttaggcaaggttttatatgtagcctctacataaacattctcttatttatagggttaagtttcaggagataagagaaagatcttttgtgagtaggatacattgaaatattagactgtaagtgagctctgtagaccaaaatgctgaaatagcttttctcataagaaagttttgtgtgacaaacactgcaatttgcctatcagatacttttcatccccttttttcttactagaa

SEQ ID NO: 33908 - DNA, 1029 bp, Homo sapiens
gtatttcacgtacttttctagtgtttattcttcagtttagcttttactacttcttctttgcttatttgtttttaattcttaggttggaggatgacagtttttcagaaggactaagtctgattgattatgtcccccatccatcattaaaattagaaatgctgcttaggagtgggaaagaggacaaacatgtattgacatgctttgtgaattttttttttcttacatatatcattaaatccttatatcaatccattgaggaagaagttagcctatttcaggtgaatatataatgccttagaggtatccaatcttttggcttccttgggccacgttggaagaggagttgttttgggccacacatacaatatgctaatactagcgatagctgatgagcttaaagtagtcacaaaaaaacctcataatgttttaagaaagtttacaaatttgtgttgggctgcattcaaagccatcctgggccacatgcagcctgtgggccgtgggttggacaagcctggcctagagagtttgtgtgatttgcctaacaaactcagatcagttcatagcttatgccctccttactttctttgctgtggcaaaggacttaatgactagtctcctagtagatatttgataagatgggatagatgcataataggggtcactcttcctctacttatgagcaactgcatctctgttaaaaagtacttttcattttttactctcccctgtcagtattctgtaataaaaattatacctaaattattttctgtgtgctttaaaaagatcctatatgttagagtgaaaggaaaaagggggggaaagcttataggttaatgggccactagatagaaacattcgtttggatactgacttgtgtatatggtttcccatcctaagccagaaagtcatcttttatttttttcttccaaatttataaccctattgactatatttgctagttcattcctatgcttctatgtatgcattctgtgagtaactaaaaattctggaattttttaaaaaatatgt

SEQ ID NO: 33909 - DNA, 1056 bp, Homo sapiens
ccatggcttagatgtagtcatagaagataccaaatatatatttattgctttgagttgtagagtatgccacttttataaatatggcaatttttgctactgttgcctgataaatttagaaatcatttacaagttattagtgaggtaaatagtgacaagctggtcattgtcctttagttaatggcagcagtctccttagagttccagataaacatttttgtccatagctcaaggaatttttgaaaggattgaaattcaagtcattcccaactgttttccagtggctgttgttgctattatagtctcaaagactgaaatagcttaggctttatgtgagttgaaaagtacatgggagtgattggccatgcaaaacacggcagagtatttacactgtcaaattcttttgtttaatgtattttaaagcctgcattttcattgtaagtcagctttaaaataggttttcaaatgttactagtcctacctaataacttctttttacctgccgtgatccctgttaatactctttctctgaaattgaaatgcggatgaaaaatggtctttcattcattttttttgtttgtttatgaacttttaatttcttgggtaatatagtaagggttcatttccacatcacagtaaaattcacagggaataatcctgcattcaaatacctctcttacagtcaagtctgcctttatcttggctgttctggctgaagtttatagcactttttcctgttacaatgaatgtgagggactttccagattcttttgttttactggaattaggctttgaaataataggttatttattagtccagaatgttttcttatcctgagaatttctggtacacaaattattcttaaaacagaaaagtatttttatgttttgaaagaaaaattttacatttgaagaggatttaaataaataaattataacaatattcttgattccaagaactttagataatagtatttcttctgagatatgagagaaaaagtgttcaagttgttagggaagcagcttgttttttagtgcatagtaggaatttagtaagta

SEQ ID NO: 33910 - DNA, 1067 bp, Homo sapiens
cctcaaaatccctccacttgattctagggtgccaaaatgtcctctctcaactgtacatatgtagagcttgaataaaccttatgtaactgaattaaagaaattggaaaagtgttgatgtaatgacagattgggatgaatgatgatggtaggagagagcagagtagcattgtttagtcactggaagtttgagattatgaaaaggaagaatttttaaaactaaggacagtgataaagtttgctgggatcttcaagaagagagatcctagtttagagggattccatgattaaaagacagggcaagtaataagtcagtacaagtactcagttttcccaggaatcagatgagatgagctggactggaggttgggatcaagcatagattaggaaaagaagcttgaaacgattgtacaaaccttagtaatacgtgaataagtaacaagatgaacagagttccccaagagtacttatatgtgtctatgtataatatatatgtgtctatttataatatgtaattcataccccgaattcatttgcagtgtagaaaaactgttacatgtgctttaggctgaacttgtcggctaaagaggacttatatgggaaatggaagaatgcagaagaggattggggccacagaggccatgatatatgaaggaaaaaaaacactgtcttttcctcatttcttttcttcctctcttctgtaggcatttatttaactacagtggtatgccaggtctacggtaggattagggaataggtagataaaagaaatgcatctctcagttcaagaagctcttaatggaaagaaacagacatataaagtgacaatatttataatacaggtggacgattctcagaatgtaggtatgtacaagtagcaactggaacagagagaaaggagtgtagaggagtcaacatgttccaggagatattgcatgaattaaaacttaaatatagaatttgctaggtggttgatagtaggaggaaagaggccattctaggcagagagcacagcttaagcaaaggtgcactcagttctgagaacttgtcagtagttcagtggggcaaaa

SEQ ID NO: 33911 - DNA, 1033 bp, Homo sapiens
aacataagtcataaaatgtatgtgggttttactatgtattggtttaaaagaagcagtgcttgggaaaatgtaatttatatcagtcaagactggtagaacacaaagatagaagagaaagcataaacatttataccactagtgaataacatgtaaaactgagttgatgtccaaatcagtgtcaaaagctgatggtaaagtctcttaagaacctttatgatttttctagagttttaattcaatgttgctggcaggttcagacctctatatgtacagttgtgtgtcagtggataatagaaagtccacacatctttgaaatttgttaagagagataaataccaactgattaaatgtcaccattggtgtagatgttgggaatcactgtggtataactttcaaacctcacttttgtgttccattggtattgacactacactggctcacgattactagctttaaaaacaggcaaaaatcacattagataagaacttaaaataattttattaattagcttatggttattctgaacgtgtactaaaagtttttttggcatcacaccataaagtcgtattggaaattcgaagtatctgtcttgggacacatccaagagaattaactactgaattatcagagcaacttcattccgatgtagttgtggtctccctaattgaacagttttatgttttttatatataggaatattgcataccagtgtaaacatccccaaaccctgttttatgttttgtccatttaaagttaaatttttctggacggagacttaggctatttactagattccagtgtaaaaatgttagacttgtaaagggggagaatggcgtttggaaaaataaacatttaggttagatagaatttttttttaattcaagattaagattcattaatctgttaggtattactatgcattgttctaggtgtttctaaatgcattatgtgatttgagtctttaaactctcatgccaagagattacatacctttctcaagtcacacatcttataattaatagagctaagattt

SEQ ID NO: 33912 - DNA, 1116 bp, Homo sapiens
tttctgattataaattttctatattagtagcattttttaattattacttcttcactatagagcatttacttttagtctctagatgtatattttggaatgctgtacttggcataacatagattaaaatcataatgcatgactaaaaactccttggatttatttcccattttaaaatttttagcggtaagttcagatttataatctttctctagacttccatggtctgaatgttgcctgctgaagtagcaacctaaaaagtatcccctgcttatgcttgtccagttggccctccatgtccataggcttcgcatctgtgattcagcccactgtgggtcaaaaatatttggggaaaaaaatggatggttgcgcctttgctgaacatgtacaaacttttttttgtcattaaacaatatagtataacaactatttacaaagcatttacattgtattagctattataggtaatctagagatgatttaaagtgtatggtaggatgtgcataggttatatgcaaatactacaccattttctataagggacttgaacatcatggactttagtatcctagggggttcttggaacccatcacccataggggcaccataggacaactatagtaccgtgtttatttcctattaattcaggttccgtttagagtctaaaactaaaacctaatcatttagtcacagtgtaaaaacaaatggaaataacagctcaaatcttcaaaatattactatagcattatgtttaaaataatctacaacaaaaatgtaccattttcaagcagtactacattaggagcccttttatagaaaataatttcttctttacccccgttccagtgtgaatctagtattctgttaacatttgtgtggcatttggagtttgtcatccccattgaagggagagccttctcagacatgaagcaagggaaacatactgaatagttttacacaaatttgatctggcttccatttgtccccctcatttcccaaatgtttaaatgtattggatttggattctcaatgtataagttgccttatctgttaatgtctatcttctgtctctttaattttgtatatctgctgttttgcttttggatacattttctaatt

SEQ ID NO: 33913 - DNA, 1071 bp, Homo sapiens
tcttacagaactacatataaaatccttttgccagcaaaagcttaatttggattggcggtttccctttttgggtatgctcagacaagatcttggttatatcagaaacacataggtactgatgtattattagcaggcctggtgttaattagggagaattaccagaaatagtttgcttcgtggaaatttattgcagaatcacacttgactgatggcagaataggagttgctgagagagagcagctcccactcataaccactaattaatagggtgccaaaattccgcagagaaagtttcatcccaagtgtgggagcctcccagggaaaatggttcttttgcagtatttaaaatttaacagaggaaaggtgctaggacacatggctacctaacagaaatctcagactgatatggttttgtgttgtacgtatgaatgagaggatttaactcagtaagtaccgggcccaaatgttgcctgtgtatttatcgtatatggagatatgcatattatttttaatgcggcaagtgcctgatttgccaaactattcattttctgaggagaatttacaggactgtataccatttgtctatagtattatattacagaacttttgattctgtgatttagaatctgtctgggtaggtggcaagattgcatcaatgattaataagaaaggtgtagccttcataccttgaacacagggttggggaaaagtgagatgcattttgtgattttcgctaaaggtagagcactaggggagcccttttaaatagaagtttgccaagaaggcaatttttttattttgtcctgtctgtgactgcatgtaataacacacaataaagcttggagctgttgtttagtgtagaatgggatatttccatgtccgaaaaccacttgtctgaccttggggagataaataaagcaatttagaattctcagggagtataatttttcaatttctcaaatatggtaaatacagttcccaaggaaaatgacttctatgccaggtccttgagttgattgacacggtctcttatgcatctgtgtttcaaaggacaaagtttctgctctttct

SEQ ID NO: 33914 - DNA, 1050 bp, Homo sapiens
acgctgcagttcccttgagttattagaaactgctcttttcttagccacctttccagcaaggtgaggtcagtgactacgagcggccacaaaggtgccagtgaaagacaacggaggaagagagccgtttcactacctccaacagataaagaaaatgtgttaataccaaacttacctgcagcaaagcagagccacctgagaaaaggttcttgagttctgcaaagaaacataaaaggctccactggaaatgagagggttcagctaaaaagtgtttgcaaataatttgaaaaagcacttaatggaaatctcttgctgtgctaaattgatgccaacgaatctctgttttcttacatatatttttaggattccagtgacaactctcctaattattgttttgggcaagttatgggaaatgtcctgtgtcaactgggatgttagtatttaagaaaatattcagtctttgtactttatacccctttacactctagtgatcaagaagaattatttctagctgtaaagaaaatagtaaaggattcgtcagtaattttaaaacatgagacatgccggtgatcaataatgtttttggaaaactttcattataaggatgttttgaaggatgttacatcttagtgaaatatgtaagttattacacacttagatcattgtgcaatgcaaaaaagtttgtgttataagcagatcatagtagtgatgtctttttatgggaaacatagctgggaaattaattgctctgattttcactgttttctttagtcatgcataatgtacctttgtgtttagcaaaatatggcctagagctacaaaacttgatacagtgtgttatttgtccaatctgaattaccatttagaaaaccaccttttccttttagttacatgatataagttgatatgatctcattactcatgtgctaggggccgctgatgaattttaatggcactgatttgtgtttttaaatcaaaatgttagtttttggtgagttaaaatcttgatttatgtcatgttagtgaatcatcactatttataggggctttgcc

SEQ ID NO: 33915 - DNA, 1062 bp, Homo sapiens
ccactgacttggcatttcacatgctggaaaaacttagtatcttttgcagacctggaaaatttaatctatatttcctcttttacatcatttgtaaaaatgttaaggctacttccagcaccttccctgtttatggttttcctgccaaaataattccttttttcactgtctttgtttctccagtaaaaattcatcgaatcctatgatgactcagttcattataataacttttgtggtagtaccttgtcaagggcttttaaaaaaaatccagtggattatattgactggtttctcccttgaggctctacacaagttttaacttaccgagacatgattagccctgcaaaaaaaaaaaaaaaaaaaaatgaaaagctagaccccctcccatgattatatgtgttaaattcttccgtgaccttatactttagcatacacagaccttagaaatttgtcaaattgctaagaagtaattataacacgaaattagggaaacgtgaggggctgtggataaaagaggtgacattgagacttaatgtagatggttgaaatgcaagtacatacaagtagcagcaggaagaaaaagcagatatacacacacatacaaaccccgagaggctacggtggttttcttttatatgttctaggcagtgcgtaggcctgtcacattgaagatagtagttactgtcaacccattttacagatgaaggattttaatgcacagtgaggttcagccagtggtagtgctggattctaatgtaggaccctcagcttctaaatccatgctcaaatgttggaggtctgttagagccagatattatactggttattgatgaaacaaagatgactgacaatcagccctggtggttcatgagcttgaaagacccctgaggcaaggagacatgtgtgacaactgtatgagatgataattgcatgtggaaggtgctgatagagcacagagaaaggttgataattaaagagccttcgagataaagacttgggttatcaatcatatcctgaggagagaggtggataaagagagacagtgtttaaaatatatggaaaaat

SEQ ID NO: 33916 - DNA, 1050 bp, Homo sapiens
tgatgaataggaagtttaaaattattcattttaaaatgggatatctgcctcttggggaatcacaacaaatacttgtttattaaagattctgagaaattgtgcggtaggaaaagaggatctgttaaatcttgactgtgaagcttgtaaaaaaattgttaaatatctattgatttctaatagaaaatagtttttaactatggctgtacctatcttactgggcagagttgtggccatgccagttagagcctacaaccaaagagaaatcagacagatatttgaataacttttcatataactttctttgtaatactttttttttttttttttttgccaaggaccattaccaggctgtaatgaaggtatttttcaaagtaagtgtgtagttcaaacctattcatccagtatttactttgaactgaacaccaggtaaaaatcattttctttgggaactattttttggtaaagtagtttatgtgatgtggaaactattttgtaacacgtatgcctaagcagtcggccttttgttagatccaattagagttttctcttctgattaaatgtgagactctgaaatgtttcgcttggctgcaggcaaactaaatcacttgggacctcttctgcgtcagctttctgcagatggagagtataatattaatactatttatgtttacataattctggaattcattatagacagaaatagccaggatgtacacttttctggagtaatgtaataactaatagaacttactttagagttcttctatgatctataaaatgaagaaatagccatcttgtgcctgtaagtatagtaagacttagaattatgtaattgaagaagcacagaattttggagcttggagaagctcagccagtgtctatatataccatatttagaagcagaggaggccagagaagttaaataacagttttaggatcatgtagtgagcgctagaatataattttatctttattggtaaactgaacagtaagagctaattaactttgtttttggtcaaaagattacactgacactcagggaatctgatt

SEQ ID NO: 33917 - DNA, 1052 bp, Homo sapiens
aattcctatctctgatcatatatatgatggttagttaatactgagggtcaacttgattggattgaaggatacaaggtattgatcctgggtgtgtctgtgagggtattgttaaaggagattaacatttgagtcaatgggctgggaaaggcagacccacccttaatctgggtgggcacaatctaatcaactgccagtgcagctagaatgtaagcaggcagaaaaatgtgaaaagggagactggcctagcctcccagcctgtatctttctcccgtgctggatgcttcctgcccttgaacatcggactccaagttcttcagttttgggactcagactggctctccttgctcctcagcctgcagacaacctattgtgggaccttgtgatcatgtgagttaatacttaatgaactcccctttatatgtatatatgtatctatatatctatatatctatatctatatatccattccattagttctgtccttctagagaaccctaatacagtatacgaacatcaaatcaaaatagattaaagacaaatctgacaccccagactgtgaaactactcaaaaaaaaaaaacgttggggaaactctctaggacataggactaggcaaaaatttcttgagtaatactccacaggcacaggcaaccaaagcaaaaatggacaaatggcattatatcaagttacaaagcttctgtactgtaaaagaaagtcaacaaagtgaagagacaaaccacagaatgggagaaaatacttgtaactacccatctgacaaggaataaataaccagaaaatataaggggctcaaacattgaatgggaaaaaatctgatcaaaatgggcagaaaatctgaagaaacatttctcaaaagacatacaaatggcaaacaggtatataaaaaggtgctagacatcactgatcaacagagcaatgcaaattaaaactacaatgagatataatctcactccagttaaaatggcttttatccaaaaaacaggcagtaacaaatgctgttgaggatgtagagatatgggaatccttgtacactgt

SEQ ID NO: 33918 - DNA, 1050 bp, Homo sapiens
gcttaaacctattttaaacaatacaacactttttttagtggaatagatactaatatctcccagaatgttctttaaatatcagtttagaaaacaatgtgttaatgacaaaaatatatttttgaaaaacatatgtttatgtaaaatggaagtaaatacaccagattatttactttttatttttatttttttatttttttgagacggagtctcgctctgtcgcccaggctggagtgcagtggcgcaatcttggctcactgcaagctctgcctgcagggttcacgccattctcctgcctcagtctcccgagtagctgggactacaggtgcccaccaccacgcctggctaatttttttttttgtatttttagtagagacagggtttcaccatgttagccaggatggtctcgatctcctgacctcgtgatctgccctcttcggcctcccaaaatgctgggattacaggcgtgagccaccgtgcctggccaatacaccaaataatttaaaatgatcactgaatagaattgttttatgcttgtatgtaactcctgaattttcctcaacaagaatttcaatagaaatgcaatgcttttgttataaaaatatatagcaagtaaaaaatatagaaaataaatttggctataaaacttagtcattagaagacataaaatggaaccatccttctgatggaattcatgccataatttttttctattatagaattttggattaggcatttattttaagatgtggcaagagatattttgaccaaatttttagtgatatacatgagttagtttctcctgaactgtaaattagttcaaatagaccaaaaaatggaaagagttatcttgagtctaagaagagtgaaaatagttgttttctgttcattttgttttaatcaaagtttgaatacaactcttgttatttgtattaactccaatcaaatgaaaaatggggcaggtaggctagttgctgttgatggttgaagggtatgggtgtgtgcatgtgtatgtgtgtttaaactttgtaacttctacttcatttttaatac

SEQ ID NO: 33919 - DNA, 1100 bp, Homo sapiens
tctcaagtggttgtgggtccctctctctcaaatttattaatgtaatcagaaagttcagtacattatcctgaggtaatagcttgtatagttgtattaatttcttgaagctgctgttacaaattacacaaatttagtggatttaaacaactgaaatgtattctctcatagttctggaagaccaaagtccaaaatcgttgtccctgagttggaatcaaggtgtcagcagggctgtgcaacccctggatgttctaggaggtaactcattccttgccttatccagcctctggtggctgctggcattccttggcttgtggtttgcatcggtctagtctcttcctctctggtcacattaccttctcttcttctgtgtgtgcaatttccctctgcctccctctcatgaggacacgtggtggcatttagggcctatgtggataatctaggatagtcttcccaccacaaaatccttaatctaatcacatctccacaaactcttttttaaaataacataacacttacaggtaccagccattaggacctgacttttcaggccactacaacttttcaggccactacaaagatgagtaagatagtttgactaatgctttggattttctttaaatcatatatgtatatatatacacacacacatacacacacacatatatatttaaatcatatatattatatataaatcatatatatatgatttatatgacacttctgggaaattatatggttgaatatgaagtgcaaatatgaatataaagatgtgaaggcttccgatagtattatctcttcctagtaatatatgacctcctgttaaatgtggtatatttctattttttgagatgcagcaaaagaagcgttgatgttttataactggtgtttaagaaagttttcattagaaacgtgaaatttcctaattcaaattcatgaaaatttgagaaaatttattatagccactgtcaaagttaaggaggaaattaaaacttttccttttgaaatgggaatgtctgtactggaattaaactgagcatgttttctccctataaatactgttgatgtcaactaagtttccctgttcgcccacacatggtaca

SEQ ID NO: 33920 - DNA, 1048 bp, Homo sapiens
tggaaggcaaagtgggagaaggccagtcacatggtgaaagcaggaccaagacagaggaatggggggaggtactccacacttttaaacaaccgcatctcatgagaactcacccacattcatgaggacagcatcaagaagatggtgctaaaccattcaagagaaacctgcccccttgatccactcatctcccaccaggccccatctccaatattaggcattataattcaaaatgagatttggtgggggcacagatccaattatatcaataaatacaacctatttcactgcaggattgtagcattaaaatgaaatgacatattgatatttttgtgaattttgaagtatctttttagaagttgatggagaaagagtcctttttttgtaatctaaatatgttcatctttaaaagaagatcctaatattttagataaataatcttggattagcaatttttctgaaaaaaaaaattctcattttgttagcatgttttctttccttttttgttggctggggaggggcagagccttgctctgtcacccaggctggagtgcagcaacacaattactgcagcctcgaccttctgggttcaatctatccttccacctcagcctcccaagtagctgggattacaggcatgcagccccataccctcttaatttcttttttcttatgtagagaagggagtcttccagtgttgccccatctggtattgaactcctgggctcaagcagtcctcctaccttggcctcccaaaatgctgggattacaggcatgagtcattgtgcctggcctagcacttttcttatatgtgtgtgtaacatgtggatacctcttgtgggacgtgtgcgtgtgtgtatgagagagagactgagagatgcctatatgtcattctcattctattgtgctgtcaacacaatagcaatgtttaatggataaagcaaaccacaaataaaacattatgtatataaagtgcaaaattagtttcgttttgcagactacagaaattaatttcaatagtctgttgataatgttttagcactattatttt

SEQ ID NO: 33921 - DNA, 1050 bp, Homo sapiens
aaaatgaaacagagtaaaaggacagagagtgacttgtatgtgtgtgaggtggtgtattagcagaaatatttagggcatggctttcagagaggtaatcttagagctgagaactaaatggtgatatggtagcctttgggtagatgctgatttcattcagttattgccagccactttacctgaaagaatatacaagattcatattcatctcagtataggcagaatgcctgggacatcatagatgctcagaaaatgttagcggggagaacaaaataaaatatatatgggcatatgatttcaggggaaaatgccttatctttctaaagttatgttgcctctaacagaggagtgaaaagtttagattttgtgtgcatttttttgttgttagactataatgtaagccttggattaattttttttcctgtattattgttatttttgtattttataggtttcacagtggtaaagtcagtgggtgtacttgaagtgatgtgccttgtataaacgataaagtcagaaaagagtgcttctattggaacattttgtgctacaaatagcagcagcatgtttatctgaccgtggtattcatgctgtggagctctaaatcaagttgaatttgctatgatagtatacctcacagaaattaaatcattaatgttaaaggaaaaatcataaaatgattttttatgccaagttatacagaggcagtttgccatatgtctaaccaaaggtgtaagaccagtaatttgaatttcgtgggacagacaggagcaactagagaagggaagaagtcaaatggtgtagtggccaaataggatgagtgactgtagactatttactgctttcaaatgaatttttgtacccattgtcgaaagaaagcctgatgaacaggtatgtttgcagcttctttgctttgacaggttttttgttgttgttgttgttgggggtgaggggagtgggctgcaagggagatggaatttatttatttttgaacacgtagtgtttgaaagacattgggagattattggatagataaagagtttccagtgtagg

SEQ ID NO: 33922 - DNA, 1050 bp, Homo sapiens
ttgaggatttttgcatcaatattcatcagcgatattggcctgaaattttctttttttgttgtgtctctaccaggttttggtatcaggaagatgctgacctcataaaatgagttagggaggagtccttctttttctttgtttggaatagtttcagaaggaatggtaccagctcttctttttacctctggaagaatttggctgtgaattcgtctggtcctgggctttttttggttggtagggtattaattactaccacaatttcagaacttgttattggtctattcagggattcgacttcttcctggtttagtcttgagagggtgtgtgtgtctaggaatgtatccatttcttcctgatgttctagtttatttgcatagaggtgtttatattattctctgatggtagtttgtatttctttgggatcagagatgatctcccctttatcattttttaattgtgtctatttgattcttctctcttttcttctttattagtctggctagcagtctatctattttgttaatcttttcaaaacaccagctcctggattcattgatttttttgaagggtttttcgtgtctctgtctccttcagttctgctctgatcttagttatttcttgtcttctgctagcttttgaatttgtttgctcttgcttctctaattcttttaattgtgatgttagggttttgattttagatctttcccaatttctcctgtgggcatttagtgctataaatttccctctaaacacttctttagctgtgtcccagggattctggtacattgtgtcttcgttctcattggtttcaaagaacttatttatttctgccttaatttcgttagttacctagtagtcattcaggagcaggttgttcagtttccatgtagttgtgcggttttgagtgagtttcttaattctgagttctaatttgatcgcaatgtggtctgagagactgtttgttatggtatctgttcttttgcatttgctgaggagtgttgtacttccaattatgtggttggttttagagtaagtgctatgtggtgctga

SEQ ID NO: 33923 - DNA, 1053 bp, Homo sapiens
actaaaaatacaaaagctagctgggcgtggtggtgcgtgcctgtagtctcagctactcgggaggctgaggcatgagaatcacttgaacctgggaggcggaggttacagtgagctgagattccagcctggtgacagagtgagactccatctcaaaaaaagaaaatgagaaagaggaagaagtaagtatagggaccgtggaaggaaattagttttgggtgtgtggggaagagtgatagaaagaaaaccagcattcatggattattttcgcaaaggggaaagtgataagaaaagaggtcaaagaatcagatcgaggccaaaccatgtcgttcacagtagtgagtgtggttttgttcgaaattgggagatgttaggcagtgaagtcatgtgtgttttcaactttgtggtcaggtcatctctttagttgcttagtggagaactgtgtccatggcaggacacagtggagttaatagactcacaagaggctgttacagtagtttctgcaagacagatgatggtgacttgggctggggtttttgtagtggacatgaagacaaggggttcaatttgggatatattttgaatatagtgctactagttaccacacttgtggtagtgtaaagtatgatgattgacttggcattttgcacatgaattgtttcatagtcttcttgatctggttatgttctcagaagttgccacttcagtagctttgaacactttgttagaagaaggaggtgagtgggacaaattttggagttgatctttagatttgaaagtgattttcagaaacatcacctttattagaaagatgaattttgaattttttcaatatatgttatagaactttgaccaaagtcttagttcactagaatggttttttaatatctgtttactgtaggatagtttatcaagataaagaacattgttcaaatttgtgctatgacttgatacaatcttaatagcattgctttaagacagcacatgtaattgtcaatgaaacatttgtttaatttttattagcactggcatagatttacaattgcatgtttatgt

SEQ ID NO: 33924 - DNA, 1029 bp, Homo sapiens
ttatttcattaatcatttttaattaaaaattttaaaaaattaaaatgatttaagtattctgaatttggttcatattggaaattacagaaagagtctattaaataagcataatcattttcttgagttaatattcatcttctattttcttcaaatttgaccaatatgatatagctcttgcttttggttgcatgatagtgacaaggaagctacttcacagttgagtcttttatgaaggtagctttctaaaaatctatctgttatgcttcttggctggggaaacaaaagttctaagagataagggggggaaatcattgctagaaatagcaaacatagttttccctcttttacagatttctttttcagcagtgaattagaagtggcgggctttggagagatttgttcttagtaagttaatatttgacttgccaagccatttgggaacacggaattgccatgatatcttctgggcatctccccggttttggcaactaggaaacattcaaggctgtgacttcatgaagagaagtttgtctgtgtgatattatcctgactgctatgcaacattttggtgaatgttttctttgtagacacaaatccagtgtgaaaaccctttttttatgaaaaaggtttatggcactttcatagtagcagggcttgtcttgttgatttagatcaaaatcatttcctcccaacatcataaccattttactgttcagtggtgcagaaggcattataaagagttagtgaattgttttggatccttcagaattggatgagggactgaaaagaagaaaatatcaccaacagagatgatactctggataacttcttcttaaggaaaaaaaaatattttcacactgagaatttaagtgttataatgatttgagcctttcaataaacatctaatacaaaaccaaatgtttacagttccacttagtctttcttcatgcctatgccactttaaagtcttactgttttctctctcagcttttaggaatgggaaacaggacttctgttaatgtctaatga

SEQ ID NO: 33925 - DNA, 1043 bp, Homo sapiens
aggtgggcagatcacctgaggtcaggagttcaagaccagcctggtcaacatggtgaaaccccgtgtctactaaaaatacaaaaaattagctgggcgtggtggcaggtgcctgtaatcccagctgtttgggaggctgaggcaggagaatcccttgaaaccaggaggtggaggttgtagtgagccaagatcacgtcattgcacttcagcctgggcaacgagagtgaaactccgtcttaaaaaaaaaaaaaaaaaaaaaaaagaatgaatgaaaaattactgcttagaaaatttttatcacatttctaaaatagagaagatgacttagagtgaaataaagtcattgtttttagtatagcccattttaataaaaatatttcttaatcaagacagtttgtgtcataatttctaaaaaaacatgccagtgcaagtaactcaaaagtaatgtaggttttcaggatttactaaattttcactatagtgagtagtatgagtatcctagcataatttcctgtcctagaggaattttcaatctaatagtagaactatacaagtagggttctatgtacctagaactataaaactaacaaaatgaaaaatacagaaaaaataaaactgtataaaattctacaaaaataatctcataaatagattacaaacttattgatgaagtttaattttgggatttaaccacttggtgtagagttcaaactgcttgactcacacataggacaggttgattacattcatataagcccttatattttatgaaatcttgtaatgaattataattaacctggaacaaaagaggtgtatctagtggatagatgtgtgtgtaagtggtgaataggcacagagttacaatgtcattgcaacctggagagtcatactgggagcaaagaccatgtatatgaataggtatgactacatgttaaagtaataaattcatggattaaggtagaagttaggtgtgtaacatttatgaaatatagtttggagttttcattaaatagaatagtttttagctcttttgtttctcttcaaat

SEQ ID NO: 33926 - DNA, 1051 bp, Homo sapiens
tctggataaatatcttgcttagtctagcttagtctcttaatacctttcattttaacatgggacctacaaaaggatagagtacagagatcctcaggggatgcgttcctagacccacagtagatgcctgaaactgtgggtggttctgaaccctctgtatacaatgttttttccggtacatacatacttgtgataaagtttaattattaaattaggcacagttaaaagagtaacaacaataactaatgataaaatattattagaacaatatactgtaataaaagttacgtgaatgtgtactcgctctcctccccatctcaaaatactttattgtactgtacttaaccttcttgtgatgtgagatgataaaataccttcttgatgagatgaagtgagatgaataatgtaggcattgtgaggtagcagtaggctgctattgaccttctggggatatgtcaggacaaagatcatttgcttcaggtgatctgagactgttgagccatgatgatgttgatggttggagttcaggagcagataatgttgatgtctgtgtcaacaactaatgggcaggtagcatatacagcgtggataaaggacaaagggatgagtcacattctgaatcagatggaagtgtgagatttcattatgcaactcagaacggcatgcaatttaaaacttacaaattgtttatttccagaactttccatttaatattctcagaccacagttgactgtgaaaatttccaaaaccgtggaaatgaaattatggaaagtaaaactgctgataaggggcaactgctgtagttctctggggggggaaatgaggttctggaaccatggctgatcatcatgaaggttagactgatagaaacctagaatggattaggtgcctctgtacattaagtatgttgtggaatttttgtcaaaatattaaaactgcttctatacatatctgtctcctttactaaactataaactctttcagagcagagtctgtgtcttgttagccatttgcttagcatgttctaggcacttacctaagtatttaatgatg

SEQ ID NO: 33927 - DNA, 1092 bp, Homo sapiens
catgcctggctaatttttaaattattattattttttgtaaagacaaggtctccctatgttgcccaggcttgtctcgaactcctggattcaagggatcctcccgccttggcctcacaaagggctgggattacaggcatgagccactgattctggcctttgagtgttcttttcaaaagaaatacgtaacttcagaaatgcaacctgacacaacatagtacactgattgggcatatatttctttttagaaattgacgatgaaaaagattgtatgaaccagagaatatgaggttggaagttaatttgttcatctttactctgctgtgcacagaggagaaatattagcatatacttcttccattcaaataaaccccaaataggtttttgtacgcacaaaaagaatctttaaaaattaacacacctttgtgctgacattcaaaatttagaggatttgtaagaagttccgtgggcgagtttaatgtgggagggtagctttgaccataaattatagtaaaagattttttagaccttttaaatgtattattcccttatataatagacttaagactgatatgaggcaaaggacaaataagatatgacatatctgtgaatatttcagaattgggctctcaaagtatttaataataatagtaatacttcttaatgccagctatgattttgtgctaacataatttaagtgttgtgtacattatttcaatcccatatgagatagagttattttatacagataagaaaacatagaggctaaatatcttacctgtcatcacacttaagtgatgatagttggattttatgcactagtttgtttctctcctttcatttcttttcagtaaatgagaatttatgatggcagtggaatgtgtagaggtggtctgagtacagcggtagcagcatgtaacctgaaagattgggctggtaactgatgtgaaaatgtataaaaaccagcaaaagttgaactgctttatgtctgttcctctaaagtagttccctgcctttgacctgtagcagcaacagactcacccgggaacttgttacatgcaaattcttggatccactcacccagacttactgaat

SEQ ID NO: 33928 - DNA, 1031 bp, Homo sapiens
tttgacttgaatatatttcctagtttagtttaaaaccagaatacaattctggtttccattcattgtactttatccttttctctgtgttgtgtgatatatccaagttctatttcttgagaccaaaaaccatgtttatctctgatttttgagcccattatcagtttgatggaaacctgactagcatgaaagtgagtattttaaaataccactttagttgtggtacacaaatctgtacatatgttagaattgcttagaaccatacatgcccatacacatacactaatgcatgtaaaaactgatgaaatatgaataaggtctgacattgtaccaatgtcagtgtcctggttatgctattgtgtagtagagttatgcaatgttaccattggaggaggctggataaagggtacatgagacctttctgtgctttttttttttaaataacttcttgtgagcctctaattacttctaaataaaaagttttaaaacctcacctatccagaaagcatatatattctcttccctatgggaaatgaccttgttgtttcagcagtacctgaggtgggaggtgggggcagcaggcatacacataaaattttacagcatagctcacagcagtaattttaatgagtttgtgcaattaatgtgaaagacaaaaatgcctgtaattttttctccctccaaattggacttttatggaaaaaaatcaacaaaaacctaacagccctaaaataagatttacggagtgggaattcgtatttgttgggttaggacctagggacaaaagcagagtaaatttcctagaaagggaataactgatagggaaatattatagaccaaaaaaagtgaaattatgaactcaagtaaacaggttgatattaaaatgagaaaggacatttctgccatagagaataaaagacagaagataaatgaaagtataaaaaaacctttaagtagtaaagagggcactcaaaagtgtatttctgggtatagttctgtcttcccagtaaggtagatgtcaggctcatctgtta

SEQ ID NO: 33929 - DNA, 1032 bp, Homo sapiens
ctgaacatttagatttgtaatcctaatgttcagttttctgagacatcatccacatagaaattgcccagtaatttagataatttacatctatgttatggaaaacaaaaatttggaaattagatttctaaatgagatttgaccaattgttcttggctggttcatctagctagttactctggcagtataagaattttctgtgatctgatgagctgattagcatacagtcctgttttccatctttataacaatacagtaaaactaagtggataaaactgttttgtttcattttagtgtggatttcctcaaaaattttcaaaattatgaacatagtatttctgaggtcttactatataattgtgtgtgtgtgtgtgtgtgtgtataccataagaaattacatattttaagttgtatcatctaatatgattcagcaacagtaataaagatgtgaccttagtttcagttcttatatttggaaaatgaaaatctttcaaattgtaactaacttcgtagctgtaattcctttgtgagtcatttattttgctgatctttgtgctatatttctgtagctgaatagtacagtgtggtagctactagccaaatttagctactgagcaatttaaatgtggctagtctgagttgagatgtaactgtaagggtataaaacacttggattttgaagatatattgtgaagatgataatacaaaatattttgttaatttattgatttgcatatcagagtgatatatattgaattgaataaaatattactaaaattaattttcacctgttttttaatgtgtctattagtaaatttaaattacacatgtggttcacatttatggctcacacatttctcttggacctcttctagagggtggttatattttatctaaggtgtcagatttagaatgacacgtattcttcttttaatttattttcattcttatgttcaaaagttagaaagtagtctaaagctgtttgtatgttctgacagttaagtaacatctgttttatgcaatgtagatggacac

SEQ ID NO: 33930 - DNA, 1122 bp, Homo sapiens
taaaattaataattagccaacattaaatttcaatgtttcaaaaatgtaaaatggttaatttactaaatgggactaatttttgaagggctgccagttttgatcagtatcaaaaacaaaaactccacagccctatagtatgatttaagcattcttactgtgaacattttaaaaataaacaatattaaaatagttttatcttcgttatatatataccaggagtagctttaaaatatgaacactgtttgcagaagtaaaattattttatctagatgctaggtttacttcgaataattttttaaaactctaataaaatctggctttagaaacaagttcagagcaactgtagagatctcattttagaaatttaattattgtaaacagcagtttcttttctctgtaaaacatttttagaccctagaaacaagtgatgtatcaataattttcagatagcctatatggttaattaaatgcatataaatctgtgatattaaggcttcacaatacgtttgtgtcacaaaatatccatttgtttctttatcatcttatgtgaatcactgtgtggatcagacattcaaattttggtatgttcctggtatgtaacacaaataaggtctttctgtggtttgtttcataatggcattttaagttgtgatattttggcagagacattttatttgcatattagacatgcagtattattctttactttcgtgtgttgtagaaacacgtggcccttttggcatactttttattttttttcacattttatagttgtgggtccaaagaaatattctcaataattcaaaaaaaaaaaaaaagataaaccttggcaataaatggctactgatatttggcccttgttgttagtgacaacagtgaatggtggggactgtggtaagttgaagagcccttgtcctattgaaaggggaaaaccactactcttctctagccagttgtttctgtatgacggtttggccaaatactgcccaatctttatattttggggatgggaggtgggggagaaagctgaaatgtctagtttgttatgtgacatctgagttttaaatgttggattacatatttttaatactatagaagctaaacagaaagtatcttcaggcc

SEQ ID NO: 33931 - DNA, 1022 bp, Homo sapiens
atggctatatatttttctcttttgtgtggtatgtgtgttgtatgtgagtatataatgaatttggctcctgggtagttagacacattttcacgaagcaacatgattttcatgaattatggcaatacctacaatgtgccatttggctatgctaactttttctcccaatctgccataatttcaaatattactgcttcaatttgtatgccaaagattgtattaagcgctataacatttctttacttttcacccctcttttacctggaaccaaaatttgtaacattgtaaaagcagtccagaaaagtgatagatatgccaagttagcagaacatgaagagcattatcttctaagtggtattcttctgttatcttctccataaaatgtgttattcctctgatgtccctggactgttggatttttcatagtttgtaccaacagaactgagggggtgtgtgatgcttacatatatgcagacatatagtggagtttgactcacattcaatgcatgcgctagtgctcacgcttacatacctgaaatttaatgattcatcagctctgcagtatttgacaaagtagtgaaaatgaatacatatataaataaaaatactgctaaagaacaaggatcttcagaggtgaccctctagtaaagagccctatctactggtaagtaacctaaataatttctaacttggaaagctccttggtgcatgattattacaaatactataaccataatgcaactattctgccaatataatatagatataacactattgtgtaagtattttacctttaagtgttgtgaattattgctaaatttcatattcagaaaaaaatttaacatcaaaagtataaatacagattacttagttgagtatattttaattcttatctccttttagatttcataacttcattacaaaatttgaaattgttttattagagtatttgaactctaaacataaacttccatttttccatgtttattttttattcttattttggtaataggcccctttctatt

SEQ ID NO: 33932 - DNA, 1022 bp, Homo sapiens
tgagggagccctggcctggtaggagagaaaagaggtaagtaaagagttgcaaagacaaccttgtctaccttgctgatttctctggtatacagggaaaataagccattgaaaacagtttgatacaagttgctgtgctaagatagcagatttgtttgagaggctgcgtagaccacctctattcagcctagtctcccccagtctatgttaaaagataaatatgcagctaatttagttcagcccaggttcatactataatttcagtggttactgccctaccccatttggaggaagaaaggataagagaaaaatatgtgtatctaagacttctcgagtttatataatgagtcagttatgcccatgtaatagctaggttgtatacatcaacacgggagtggaacatgtatgcaccagaataatgtttctcctttcagagtgagctttcttgcctgttaacaagtaatgtatttttattgattcgtgtaaatatcaagtgtttaaaattcatgtcacatacttctgaatatgacatattactaaatgctacagttactttttgtcaaaatgtttttaataaaagtgttaaataacaaatttgtgtatttttgctgactagtgatgagatgtaatagcttaaagatgaaatggaaataatttaacaagtgcaatctatttcagaattgggacagaaaggaaaatacagctctgctttattaagtttcataaattttacaggattaaagatgttttcattttttcccaataatgaaaaaaagattgttttcctcctgattgttatttatgcacaataatattaaagagaaattggcctttaacccaacactctttaatataaccatggaatttttttttgttcccttcgagtcccaatgaatgtgtttacataatttttcatacttaaaatcatagcatgaatatggttttaaagtatgcattcttatttaacatggaataaacagaatgagactttgcctcttttaaaattttagttggaaactaactaa

SEQ ID NO: 33933 - DNA, 1047 bp, Homo sapiens
ttctgtcacatgtgacgaatacgatgttttatctattttttaatcccatattctataaggcaaaatgatttcatagaatagctattcaataaacatttgttgaagtagttggtgagagggcaggaatttttttttttaattatactttaagttctagggtacatgtgcacaacgtgcagatttgttacataggtatacatgtgccgtgttggtgtgctgcacccattaactcatcatttacattaggtatttctcctaatgctatccctccccgctccccccatcccacgacaggccccagtgtgtgatgttccccagagggcagaaattttaaaaaggactcaggtatctgttccggaaaagtgagatgaaagtatacctggccaaagagaggacactgttcatttctgatgtacacatttccttagttcattccctactcttccttctactacactggtcttttaagtgtgattagaaacatagaggacaaaatgacagttcaaacatcttccctaaatgattgcatatgtatctgttcatctcttatggtcttctttactcaagctcttttgtgatttttataaaattttttactaagaattctgtgtctgtttcaaataaactgttgctgagtaaacagtaaattggggaggttagaaaaagctttctaaaacagattgatggggaaaaatgtattagatgccagaacacagctaccataaaaacttagttcttggactctatttagcaagtttgatcactaaacaagtttgggctcaaagcaaagatactttctaaaaatagttttctcaaaaaatttttatgaaatggaagcataaagcaaaccctttaaaaatattttagcaaatttggaaaatatttccaactacaattaattttgaagctgactcaggctttttaaaatgtccagaccttcaaattattaaaaatattgaaaatagagaaaattatttttaaaatattattgagacctcctactaaatcagatttagttcaagagttctaagacaacggaacccttgg

SEQ ID NO: 33934 - DNA, 1029 bp, Homo sapiens
aaaatgctcaatgtcactaatcatcagggaaatgcaaattaaaaccacaatgagataccaccttactccagccagaatggccattactaaaaagtcaaagaacaatagatgttggcatggatgtgatgaaaagggaatacttaaacactgctggtgggaatgtaatttagtacaaccactgtagaaaccactgggtatctatccaaaggaagagaagtcattatataaaaagacacctgtatatgtatgtttatcgcagcacatttcacaattgcaaagatagggaaccaacctaagtgtcagctgatgagtggataaagcaaatttgatatatatacatcatgaaatactccccagccattaaaaaaagaatgaaataatatcttttgcagcaacgtggaaggaaccagaggctgttattctaagtgaagtaactctggaatggaaaaccaagtaccaggtcgtctcgcttacaagtaggagctaagctgtgggtactcaaagacattcggagtggtataatggactttggagactcagaaagggggagggctggctgagggtgagggataagaaactacatatttagtacaatgtacatactaggatgactgcactaaaatctcagactttagcattaaacaaaaaacaaaaatggtggtacttatagagagtttatgttgtttcatatgctagctaggacttgttgttaacagactttttatttttgccagtctggagttgtgtattactcatgaacagcagtgttcactgggctatttgcatcagtacacttgcaaaaatttaaaagggtttaactgtcttcaaggggcttatgctattcttgtatagacaagaagtactggaaaaaagataaataacagggaagtgctagtgaatgttatagacaaggaactatgttttccttgaattttttataattttactgagtttctctagctttttactgtgacaaatttcaaacaaatagaaaagtttaaagaagaatatagtataattgcagtatac

SEQ ID NO: 33935 - DNA, 1051 bp, Homo sapiens
aatattgctcatgtggaggacacagataaaacagctaaagaacagtttttaaaagcagcacactaagtagctgaacaatgtactaggtaaagacaggctttgaaacgcctcatgaaggagttaagaactgaattttgataaataggtgtgaaaatcaaatagaggagtaggtaaataaaatggtatatattaaggtgaaggagaggacattctctgcagggaaaggatgtgtttatggaagtaggagcaagctgaggcatgtaggtaatagcaagtagattagcagctttactttaaggaagagtccaagtacagaaatataaggaaatgaaatgatcgttagtagggatagagaccttgctgttcagttgaatatttttttccaaaatgtaaatatttcctgttaaatatattgttataaaaaggagtacatgatctttgcagaaatttaaaacagaagtgtgttaggtgaaaactatcataattctagcatcctaaaaccaaagcattgtttggtttcttatctttccagatttttacatatgtactatatacaggttaagaacatggatgctgtcttaagagggcctgcattcaaaacttggacttgtcattaattacccctgtgttttttggacatgttaatctgtgcctcagctttctcatctgtaaaatgagatatctgtgataatagtacctatgtcttggtagtggtgtgaggattaattctctgcctaatcagtgcttggtatgtagtaaaatctcaaatgttagctgctgttttttatctttcaaaataaaatagaattgttgctctgcattatatacacctatacagttttgtaatttaccattttttacatatctttaaaaaatttgttataaaaaacatttaattttactgtcttaattatttttatgtgtatagttcagtagtgttaagcatatttatgttgtgaaacagatctctagaacgttttcattttgcagaactgaactccatagccctataacagcaactctcctttgtcctgtttcccaaacccctggt

SEQ ID NO: 33936 - DNA, 1041 bp, Homo sapiens
ggaggattgcttgagcccaggaattcgaaaccagtttgggcaagatggtgaaaccctttctctacaaagaatacaaaaattagccaggcgtgttggcatgcgcctgtagtgccaactacttgggaggctgaggcaggaggaccccttgagccctaaagagtttgaggtggcagtgagctatgattgtgccactgcactccagcttaggtgacgaggtgagaccccatctttaaaaaacaaaaacctcccaaaaaacacacatgaccaaatacacaaggatttatttctggattctgttccatttgtctgtgtatctgtttttatgccagtattacaccattttcattactgtagctctggtatgttttgatatcaggaagtgtgagtcttccaaatttgctctttttcagaattgttttggctatttgggtcccttgagatttcatatgaattttagaatttttttcaatttctgcaaaatatgccattgggatttggtgaggattgcattgaatctgtaaactgctttgggtaatattgatatcttaaccttatcgttttcagatacatgaacatgggatgtctctctatttgtgttgcctttacttgcttttggcaacgtgttgtagtttgcattatacaagtcttttaacctccttagtttaggtttatttctaggtattttatttttaatggaaatttatttttaaatggaattgttccttaatttatcttaaaattattcattgttagtgtatagaaatgcaactgatttttatgttgattatcctgcaactttagtttattagctctaacagttttttttttaatgaaatctttaaggttttctacatgtataagatcatgtcatctgtgaacagagataattttacttcttcctttttaatttggatgccttttatttctttttcttgcctaattgctctggctaggacttccaatacaatgttgaatagaagtgatgagagctggcatctttatcttgttcctggactcagatgaaaagctttctgtctttca

SEQ ID NO: 33937 - DNA, 1045 bp, Homo sapiens
ctgggattacaggtgcccaccaccacacctggctaatttttgtatttttagtagagatggggtttcaccatgttgcccaggctggtctcgaactcctgacctcgtgatctgcccaccttggcctcccaaaatgctgggattacaggcgtgagccaccacacctggcctttttttgtatttttagtagatacagggtttcaccatgttggccaggctggtctctaactcctgacgtaaggtgatctgcccgcctcggcctcccacagtgctgggattacaggcgtgagccattgtgcccggtttagccatgcttttcattaaactattgttagtatataattttagtcaacagttttcttcttaaaagcctatttcagaattaatctggtggatagtctatatttagatgacaatccttttcatttatttaatgatatttaaaaacattttgtcattttattttcacaagtcatcataacataggacagagtttaaggctcagagggttatgctgtaggcctttttgtgaaatacctatgatgagtggtagtagtggttggtactcattaggtgaaatcacatatttattctgaaggaaaatataatacattgatattattcatttaagtaagattcttaaggtttctattcagtgctttaaaagtgatttgattctaattttgtttgatatcctggagaactttctcttcctatgacttgctgtgattctttgaggaattcattcatctatttttttttttttgagacagggtcttgctatcactcaggctagagtacagtggcacaatcatagatcatatagatcatagctcatagcttactgtaactccaaactcctgggctcaagctatccttccacctcagcctcctgagtagctgggatcacaggcatgtgccactacacctgactactttttttttttttttttttaagagacaggatctcactatgttgcccaggctcatctgttcttttttcttttcctctacttttccccattatagaaatgagagaagactacct

SEQ ID NO: 33938 - DNA, 1024 bp, Homo sapiens
tacgtaactggttaagtgtctgtaatttcaaatttgaaattctaaatgctccaatgggcatttctttgagtgtcctgtcggtgttcagaaagtttcagattttggaggatttcagatttttggattaggaatacttaacctgtatgtcattttacttttcctttgtgcagttaccagtaaactggtttgtgtatgtgtacctgactggcacaaaccctgttgtatattgtttaagataatatccagtactgttactaaaataaaatactgagttcttcatagtagcatgtgtccaactgttttcacatttttcaaattttaaaatctgtaatttcatacagattttttcttttatatattccaaattattttttctgtattataggcatgtattgcaagaaattgctacccttctcccctgaattattataatttcccaaagtcttgttgtacctcagtgaatgaagtcatttgccatggaataccagacagaaggcccttacaagaaggtgacattgttaatggtaagaaaaatatgttactttcatcaccatgggcaaagaaacaacaaagcttggggaatctgacagtgacttgtgttttcttgacttgcttcctgtacttaaactttttcctttttaaaattcagtatcactaactcttaaatctacaggaagctctcttaacggttttgtgcatgttgcttttaagatacttccggtgtgatgtgtttggtgcagtgtatttctttaatgcttatctcatatgtgattggtaaataggtcaaagatgtcagtgaaatgtggagtctagtttttttcccccagaagttcactaatggttttgaagagaccagggcaggctttgttatagatacaggaaaacccttcataatatatgaagacctaaaggaaagctgaaaatcttgcagaagtgccttacttgagtggaagtagctttaaagacccctatgttaagctaccttgggaagttacaagtatagagagtagaggaagtagtttaa

SEQ ID NO: 33939 - DNA, 1049 bp, Homo sapiens
caccgtgcctggcttagatggcattttaatattgatggaattagactctttgttaataagatatcttaaaggaactacctatcaaatgaggaagcatgagcccaagtgttagaggctgcagataattgactgattgtgatgctagctgtgaatgatagccgaaatttaactatgacactatttttattagaattgctactgctttagttagggtatctgttcataaagttccataggttttgaggccaaccctgtttttcaaatataaagcctgttatttttattatatgtagaatgtgtgaggtttttcaggaatgtatgtgttgtgctagaaccaaaatatctatattgtgatgttacaggttgattgaaatatgtggtttaaaaatactcaatgtgctctctagatacattataatggtataatagtatataatatatagtataatagtaatctatattcttaaacatggggacaaagagaagaatgaatattcacaaataagagaaaagcaaatgagttttaaaaaaacaggtgtagagcagtgtaaatttttctgttattccctagcaggagtaaggaacttgtaaaagataagtgaaaatggtattttgtagcaatgtagcaaagttttcaatttaatgttactaactctggtaatttattttgcatgattgtgtcccacatacatttttcttttgccacaagtgatacaattactataagagtataaaaacccactatctggcttatgttacatggccatattcctgctctccacagtgagttcagttacatctcagggagcttctgttgggcaataactatctatccattggtgtctaatttgagaatgcagaagttgtctttttcattaagttgctagatgctgtcatgttggaaaaacacttgaattttgaaatgaaaataagtatggtctttatatttgcacattctcttgcagtggatatcactctttatcgcaatggttatcatggggacctgaatgagacattttttgttggagaagtggatgatggagcacgga

SEQ ID NO: 33940 - DNA, 1045 bp, Homo sapiens
tttctgctctgacaggtttatatgttcttacaaatggatccatagtttgcagtgatttaattcctggttgggatttggcctcccctctcccccatgctaattatttacccttgtaattgtgcatagggaagcactcacccaatgagactttctccaatgtggactctgtgtgtcagtgaatgaatgtagtaaaattcactttggaaggttatcaggcttttaaaaatctagtttatggcaaaaatagccattttccaagtggtggctgactgttgcagggaatgagaatttcataatacactgctatttcagacctctgtttggtcagaaatggaaaagaaaaagccccctttcttcccttttctgttttacttcaagggcataccttggaggtgctcagagaagcgtgaagtttgcactatggtggaggatggggaaagagttctaaagtgtctccagctgtgaacccaggaggtcaagtgggctattaaaatctaacgttgagtaaatgtgatagtgatgagaaaggaattttgtgtactgtaaccttgcagtagagatgcagctgtccttcgtgtgtggaaacacacctctcctttacatagttgggaacctcattagaaatgacctcagctgccccatatctacgttcctttcagcagttgtccaagtaggagtgtatccagtgaagacatatcaaatcacaaagtcattgtcattagagtgtacttgattactgggcatccttgtaatataatttcataccactgacacattatacttgtaagagaacatctttcccagagtgcctcagaccttattgctttaaaatataataatgttttcattacttttattatttgaatgatttagtaaagttgactgaatctggtatagactttgggagtatgtgtgtgaagtttttatcaaactgtaatatttgtgaatggaatgccttgcaatatgaatgttaatataatgtgtaaagggagattaaaaagtttgaatgattatcctaccatgtagtcattaactttgctgcatt

SEQ ID NO: 33941 - DNA, 1037 bp, Homo sapiens
tatttttatgtgactgtgttaatttgaatgccttgtcattgagttctgaagttctttcctctccttgttctagtctactgttgaaactttccactgcatttggtaattctgtaagtgtgtctttcatttccagaagttctgattggcttttcttcaatatatctctctctttagaaaattttttatttatatcctgaattttaaaaaaagtttctttatattggttttcacctttctctggtatctccttggatagcttaataatcaaccttttaaattctttatcttgtacttcaaagatttaatcttggtttggattcattgatgaagggctagtgtaatgttttgggggtgttatagaaccctgttttgccatattaccagaattacttttgtagttccttctcatgtttgtagactatttttcatgattatccttgaatttatttttgctttgactgtttttttaaatttctttttcccaccttaaggttgtgacttttatgtttatagtttactgtagcataacttggctcttggtgctctcaggggtgaagactctctatgagttacttagttacagagagtctttgtgtgatgaatttctcagatgctggttgtagcagcaatgtgctcagtgtgtgagcaagttcaccctctcctatagtgttgaaatggcagaggtctcttgaagcttatctaattcccccatgttgtacacttatttattatttttttcccacagtattatatttactgggttgaatagttcaggcttcagcccagtaggagagctttccacaggtgaaagccagctgtggctaaagcaggtgggtaaatgcaatacctaatggtgggcagaggtcccagacttgacagatgtgactgggggagcactcagtgaaatacactgaggtcttctcagagagaaggaccagagccacttcacctcccctgccaggcccacaggaaagctgttcacctctcagacacactcctgacccagtgttctggctattcaaatcagagaggtacct

SEQ ID NO: 33942 - DNA, 1075 bp, Homo sapiens
cagattcagcctcagggcaggaaccgtataaaaagtgtgaccatcacaccttttattaaaatcccaaaacagatgtatgtgactccccagtcctttcaataggatggaaatggctcagagaagagtccaaaggcttttctttcaataaataatcctgagataactggcaagccacatgtagaaaaatgaaactgggtcctcatctctcaccttataaaaaagatcaacttatgatggatcaaatagttaaatctaagacctgaaaccataaaatttctagaagataacattagaaaactcttctagacattgtcttaggtaaagaattcatggctaagtacccaaaagcaaatgcaacataaacaaaaatatataaatgggacctaattaaactaaaaagcttttgcatagcaaaagaaatagtcagcagagtaaacagacaacccacatagtgggaaaaaatatttgtaaactatgcatctgacaaaaggactaatatccaggatctacaaggaactcaaacaaatcaccaagaaaaaaaccaaataatcaaaagacatgaataggcaattctcaaaagaagatatagaaacagtcaacaaacatatgaaaaaatgctcaacatcactaattatcagggaaatgcaaattgcaaccacaatgagataccacctcactcctgcaagaatggccataattaaaaaatcaaaaaataacagctgttggtgtggatgttgtgaaaacggagttcttttacgctactggtgggaatgttaactagtacaatcactatggaaaacagtatggagattccctaaagaactaaaatttgaatggccatttgattgagccatcccacttctgggtatctacccaaaggaaaaagagtcatatgtgaaaaagaaacatgtacattcatgtttatagcagcacaattcacaattgcagaaatatgaaaccctcctaaatgaccatcaaccaacaagtggataaggaaaatatcgtatatgtatatatattataaatactactcagccataaaaaggaacaaaataatggcattcgcagcaacctg

SEQ ID NO: 33943 - DNA, 1013 bp, Homo sapiens
tgtttatatctgcgaagaccctatttccaaataaagtcacattcacaggtaccggggattaggagttaaaggtgtctttttgggagggaacacagtttaacccactacagccccttgacatatttatttaatgtgtacacatggatgtagagagtggaatgacagaccatggagattcagaaaggtgagggatgggagggcagtgggatgggggtggatgataagaagttacttaatgggtacaatgtatgttatttgagtgttggataccctaaaaaccctgttttgactactatacaatctatgcatgtaacaaaattgcacttgtaccccatcaatttataccaaaaaaaaattttatttaaaactcatctagtaaggagacagattgttgtagtgaaaagatctttgaactcagaatttgaagatctttatataagtactgactactacagatcagctcctcagacttgaagaatcacttagtccccgtaatcctcacttttctcatttgtaaaatagaaatgctagcaccacactaacagggatgagtcaaaaatattcaatgaatgtgctttgtaagcataaaactgttcctatcattatattagtagttatgaaaggatagcagtgtccttttttctttttctcctatattttattttgaaaaatgttggaaaaaataaatagaaatgttggaataatctaacaaatctacattggttcttaaaaccgacattttcgcttttctctttgctctctttttcgtgtgtgtgtgtgtgtgtatatatgtatatatgtatatgtatatacataatcatttggaagcaattttcagactctggagcaattataatggcaatattaaattatttatgtaatgattccaagaagtatttaaaacatggagatttgttcattcatcagctatttattgaggtattactacgtgccagaacattggcttagtggggaaaaaataagtgatatatacactctaatttcaggaacct

SEQ ID NO: 33944 - DNA, 1032 bp, Homo sapiens
tatctgaaagatcaacaacctgacaaattatgtaacagctttattcattcactttacatttctcttactcattgttcacactgtcctgagcctcagtatgtagttctgtaaaactgcagttaattacagtattagaattacagttaattacagtattctgctgtctctaccagcttaacttaccagccactcccaggaaaggcagaggtgatttccattcattttcatttataaggaaatacgtatgcatacagttcacatgcactgagcgatatccatctattatccttgcacatgtagtacctcttagccttcctccttcctttggtagccccagccttttctgtgctgcctttggaacatgtaacctaacatactgaaagtaccagtgggaagtaaaatgttagaatgaactattgaattctcttccctctggtgtcagcctctttggagtcaggagaggaacattttttcaggtgcttccccttaccactagagtctgtagagaatagctcagaactgaaatggcctcctcactgtatccaactctgtggatatttataggaaattggatgggaccaatgctgtgaaagagaaagaaaggcaatctttaatgtctgcctataggaggtttcagttattagggaatggaaataatggtgtagttccccacagaatgaggacagtcagtaaatctttggatggataaactaatcacatttgtgtgtgactgaggatatggatacctgtcctcttgcagctgtattacccaatacattttctaagtattcttttcattagctcaggtgagtgaaacacttttgcattttgtaacatttaacacatgctaactaggtcacaagcttaaataaagcatccactgcgttgtggtttccagaatcgtgacattatatatgtgttatatttggtcagcatttgatataaatgtcttaatgattgctgaacaggctatccttataaggttgaaattagatgaaagtttttgctgtgggggcaagaatgccacatgaa

SEQ ID NO: 33945 - DNA, 1034 bp, Homo sapiens
gaaatgatacttctgagcctacatttgccacatattcattaagtgcatttgttcaggcattacagtaaaatgccatgggctgtgcttttcctcagctacagcctctctccttccaacctcacaccctgtcttcctgtcatgcctttgtgagagcgccaccactctgcggtgcctggagaggaacctggaaacgctgatagttcagtgcatactcggtcatatggagacagcaggaaagagtcaggggccaacttgaaagatttggggcctggctgtggtttgcaggctgtagacaccaaactatactttatagaacatgtgaaaatatagcctgtatgggttactctcttactgattgtctagatttgatgccttacattaaatcattttaaaaccaactctagaagtctactcaaatcctgcattttctactggaatagtgtcccatgcataaaaccctgtttcgcataggtgtaggctagcttacagaccctcttaccatgttgagattatttctagaactcaggctactgaaccatctggtgctctgcctgtgtctttcacatagctaagaagaaaatttccatttagctttctgatatcttgctgtgcaagtcttcatgctctttttttaaaaaaaattttaattataaattctttcaagcatatagaaagtttaaaaattgacataacagacactatgtactacaacacaaatttaataggtattagcatcttaccttatttgcttttgatagctctctctctctctctctgtcctctctctctctcaaataaaatagttacagctaaaaccccacttatccatcactttgtcctccttccttctcttaggtaagctgctactctgaactttcactccccaagatgtttttatatttttactacataagaatgcatctataaatactggcattttcaagaaagttaatttttactaacttcaacccaaatttgccattgtataggatggctccttttcagggcaaacataggttcaaactggacgccat

SEQ ID NO: 33946 - DNA, 1023 bp, Homo sapiens
aagttctcagtatcttactcaagcacaaaaaggcagcactacttcttgaccaccccaacggggacggtaagagacaatcacacatcattggtgtaactttctccaccttctaaatatctactaggtatttgataaacgtgtgttatttgatttgcacccaaaagtgctttccttagtcacctggagttcatcatctcttttgggcatttctgttgctcaccaaagctaatttttttaaagatgatttggaatagttagtaggaggagaaagcagaggcctgagtaaagattcatcttgaagtacacaaagcgtcgtttattcagagaatgtttatttatgttcatgtctcctgagaacataataggagactgtgggtcttcaaagcagaacaatagacttatagtatctttactgtccctccccatgattcagtttttgccatttccttcagcttcacaagggccatcttgtgagttagccatcccatcctgtgactgtccctttgcttggactctaggtctgaatgccattcatctagccatgatgagcaatagcctgccatgtttgctgctgctggtggccgctggggctgacgtcaatgctcaggagcagaagtccgggcgcacagcactgcacctggctgtggagcacgacaacatctcattggcaggctgcctgctcctggaggtgaagggcacacttatttgcttttgcattaaatttctgagggagatttaaggaaatcttttcaaagaaggaagtcagtagctgctgttctcccttacaatcagctctatttgtttaacatttatggagggcttcagagtaccacctttagacattcccccaacccccttgcttggcatctctaactggggatttcttcaatgacagagccagcccaaagtagcaattgggctagtaataggacccaaggagccatgcacactgggaggtggggacaaaagggcaaaagaaccttccactaacgctttcttgtgtgggctggattgtagggtgat

SEQ ID NO: 33947 - DNA, 1049 bp, Homo sapiens
tccctttcattaaattctaacaatactatggtgcttagtttcccagacacttaatgcatgtcatatctccgtacctttgcctatgcagcttcctctgcatggaatgaagctcctcctcccatattcccatgaacttctgtactcttcatctttcagaaacctatttaagtatcaaaacctgtacagtttttgctcatgccagtaaaaagtgaataacttgtacctctgcgttgcttctgtattattgctgatagtacacagtattatgatcgtcttttataggtctgtcttccatactaaatggcaagctcctttctaacagggagtgtgttttataatttttgtatcttcagtacctgtcccaccacctgatacatgtgagtgaggtattacaattttagaaggtgctgaaagtttttttcttaaatattttaagtagtcttcctgtattttaacttacactgtcattattcataagccatgaacaaagacaagtaagtacagaccttgtaggaattatctcaaatgccagtttattggagtacaaactcaattaggctaaaacttactgaggtcttggtttatgtaagtctctgttaaagggtagggagttagggattttttgtttagttggggaggagacaaatatttacctaactatatagttttaaggcagaatgcattaatagtttgaattgtgttctgtagtttttactgagtgggttcctacttcattcgtttctcccagcaatcctatgaagttagaagactctttacttttctttgtgccttgaaaattctgcgctcaagtgcttgagctcctggcttctcattcgttaggtctctgcttaaaggttcttttttcagaaaccttccctgaccccttacctaaaattgcagccaccctactgctttgccccaggttagtttttctcttatgtcatcctttatttcctttataacagttactatagtctgtgatcatcttgtttatttgttcacttgtttatagtctctgtcctctgaaatatataccctatgagagaagg

SEQ ID NO: 33948 - DNA, 1018 bp, Homo sapiens
gaattgatgcagtgtaagtaacttgtagaacttgaggataagtggtaaaagaaaaaaaaaagtaacttggctcttgaaatacatgtcttcggtttctagagccttcaaaatacagccctgttgttactgcgtcacatgattgttttgaggactgcttctgcttacctaggaaactactcatgccttactcagcaaatgaacatcactattacataaacatcaggtatccaaaagtgttagcaggcttgaggtatgaatgattcattcatatgggtaattaagcaagttgaattatggaaagcacctcacaattcacacaattcagctttgagttcaatgccaaatacgatgattcattaagttgactttgtattttgtaacctaatttgttaataagtaagttacaggaagccaattaagccagctgctgatctatatagtactaccttcctcattgtgattccatagtcttccaatagaaatgtgctgtcagaatctgtatagagagtttgtaaatgccactatttaacaaggttcttaagaatttaggtggatgttttatttgatacctaccaaagaagcctaagtaattgtataatacttaacccatttagaattcagttgtggcagcataaccaatctggagagaccaggggagatgttactaatgcttgtactttattcagaaatgagtgcctcattggcttggtgcagtgacgacacacctgtaatctcagcactttgggaggctgaggtgggtggagtacttgatctcaggagtaccataccagcttgggcaacgtggtgagatctcatctctacagaaaaatgcaaaaattagccgggcacagtggcgcaccagtagtcccagttactcgggaggctgaggcacaagaatctcttgagttgaggaggccaaggttgcagtgagccaagattgtgccactgcactccagcctgggcaacagaagtgaaaccctatcttaaaaaaaaaaaaagtcttttttttttttcatct

SEQ ID NO: 33949 - DNA, 1048 bp, Homo sapiens
gctgggcatggtggtgtgcacctataatcctagctactcagaaggctgaggcatgagaatcacttgaacctgggcggcagaggtagcagtgagccaagactgctccacggcactccagcctgggcgatagagcaagactcggtcaaaaaaataaataaataaataaatttttaaaaaaagtcttggtaaagggatcaattcatcaagaagagctaactatcctaaatatatatgcacccaatacaggagcacccagattcataaagcaagtccttagagacctacaaagagacttagactgccacacaataataatgggaaactttaacaccccactgtcaatattagacagatcaacaagacagaaggttaacaaggatatccaggacttgaactcagctctccaccaagcggacctaatagacatctgcataactctccacccccatatcaacagaatatacattcttcttagaaccacatcacacttattctaaaactgaccacatgattggaagtaaagcactcctcagcaaacgtaaaagaacagaaatcacaacaaactgtctctcagaccacagtgcaatcaaatcagaactcaggattaagaaactcactcaaaactgcacaacttcatggaaactgaacaacttgctcccgaatgactactgggtaaacaataaaatgaaggcagaaataaaaatgttcgttgaaactaatgagaaaaaagacacaaggtaccagaatctctgggacacatttgaagcagtgtgtagagggaaatttacagcactaaatgcccacaagagaaagcaggaaagacctaaaatcaacaccctaacattacaattaaaagaaccagagaagcaagagcaaacacattcaaaagctagcagaaggcaagaaatcactaagatcagagcagacctgaaggagatagagacacaaaaaacccttcaaaaaatcaatgaatccaggagctggttttttgaaaagatcaacaaaattgatgatagactgctagcaagactaataaagaagaaaaggg

SEQ ID NO: 33950 - DNA, 1058 bp, Homo sapiens
tgctttggaagcctatttcctaatcttccaagatttatcatcaccttcatatgtccatagcatgcatttctcagacaggtaagatagaattggtatatatttggtatagcaaaaagtcaaggttgtctttagattatatccttggtttttcatgtggtactggggagaaagcctactgtttcttcatctataaaatgaaggacctgggcaagataacattctgtgaaatttcactgaactttgagctcagcaaagtagggatgcgtgtgtgtgtgtctatttgcaatgcatcacagaccttaaataaatacagttgacccttgaataacatggaggttaagagcaccaaccccctgcactgtcaaaaatccacatgtaatttttgactccccaaaaacttaactactaatagcctgctgttgtctggaggccctgctgataacacacacagttgactaacacatattttctatgatatgtattgtgtactatattcttacaataaactaagctagagaaaagaaactgttattaagaaaatcgtaaggtaaagaaaatatatttactatttattaaatggaagtagatcatcataaagatcttcatcctttgttgtcttcaccttgagtatgctgaagaagaggaggaaaaggatgggttggtcttgctgttccaggggtggcagaagtggaagaaaattcacatataagcagtccatgcagttcaaacctgtattttaaggtcaacggtatttgttacattgcattttgtaagtgaccttgttaatttttttcaatgaaaaaaatagtgttccattcaaatgcctgtatgtttatgagaaacatttcagaactatgaaagttgaattcaaggtttcttgcagattgtttgtatactttctgtaatgtttgtcatataatgagaatactaatggtcttacaacttgaaactgattaactgattaactctttaagcaacttaaaaagaaaatctttcagtgaggaaagagtattcatcagaagtattctagtagatgacatatttttggtaatgaaatt

SEQ ID NO: 33951 - DNA, 1021 bp, Homo sapiens
taaagtttatatggagaggcaaaagagcagaatagccaactcagtatttgaggagaacaacaaagtcagaggactgacactacctggctttaaagcttactataaagctcagataatcaatgtagtgggtactggtgaaagaatattcaaatagaccaatggaatagaataaagagcccaaacaaacccatgtaaatataatcaaatgatctttgacaagggagcaaaggcaatacaatggagcaaagatggtcttttcaacaaataatgctggaaaaactacacattaacatacaacaacaaaaattttttaaatccaaattgagtgtaaacacagatcttataccctttgcaaaaattaacttgaatcatagacctaaatgtaaaatgcagaactataaaactcccagaagataacacaggaaaaatcctagatgactttggtatggcagtggcattttttagatacagctccaaaggcacgatacatgaaggaaatgattgacaagctggacttaactaaaatttaaaacttctgctctgtgaaagacaatattaagagaatgagaagacaagccacagatggaaaaattatttgcaaaagatacttctcataaaggactattgttcacaatgtgcaaacaactcttacaactcaacagtttgaaaatgaacaactcaacttaaaaaatgagcaaaaaacctgaacagacaactcaccaaagaagatacacaagtgtcaagaaagcataggaaaagatgttaaacatcatagtcattagggtattgaaaattaaaacaacaatgagataccgctacatacctgttagaatggctgaagtcagaacactgatgaaaccaagtgctggtgagaatgtggagcaacaggaaccttcattcattgctggtaagaattcaaaatggcatagtcactttggaagacagtttggcagtttcttacaaaataaacatactcttcccatatgattcagcaatagcgctccttggtatggacttgaaa

SEQ ID NO: 33952 - DNA, 1047 bp, Homo sapiens
tatgtgtcctttgctcttgaaaatgaactcagaactctacatctgagtggttttatgaatttatactctcctagtccacaggttctcatcagtgcctcaagatctatgcacagattaaaattacataagatatcatatactacatctgaattagggttttccaaagtatgctattccatggaaatactgtttattcagggtgctccataaacaatgatcctgtgtttcattatgtccaggaaatgccacacagcacctttccagacatcctatcatcatattaaagactttgaggccatgcattaaagaaagttttaaattagaaaaaaaataagttttcttgcttgagcacagaactttattttttctcaggctggttctccttttttaaaattacacgttaatatcccaaagaaccagtcccatagatagatatcacatatgataagaatctgtttcaatggtgttggtgtacatgtgtgttcaggtacctacacattaggacacatctctagtttattaatactgcacttataaagagacatggtagagacatcaagaagacatcattttagggtggacaccattgcctaggacctgcttcttaatgtcaaaaattcagaaacccaattttatctctcccgcagagttgactcgagtgaaggaaattgagttgttttaattaaactcacatgagattgatgtttaaacaaaattgtaagtttatcaattaataatcaagaattctgatttttaattttcaaaatattatttatgtccactgtccagggtacttgctttaagggcacccagtgattcttgaagatgaagagtcttaggaatatttattttctagacctcaatgaagaaagctttttaatcatcctgccccatagaagaatttatgttcctagtgatgtgatcatattggccaatccagtgtttcttttccaaggacagtactgataaggagcaccaaatctacctctttgtcctgaacagatcatctccatctattcatagtttggctcagaagttggacaaggc

SEQ ID NO: 33953 - DNA, 1050 bp, Homo sapiens
gcattttgtattagtgaaatcatgtatttggcctttctctctggcttctttcatgtacctcaatgttttcaagtctcattcattttattaaaaaaaaaaagtaccttttttctttttcttttttttttttttgtccacgtatatattcacaccacattttttgagacagagtctcgctctgttgcccaggctagggtgcaatggtgcaacctcagctcactgcaacctctgtctcccgggttcaagtgattctcatgcctcagcccccaagtagttgggattacagttgtgcaccaccacacccagctaatttttgtatttttagtagagacagggtttcaccatgttggctaggctggtctcaaactcagcctcaagtgatccttctaccttagcctcctaaagtgctgggattacaagcatgagccactgtgcccagccacattttctttttccatttattagttaattgacatttggatcgtttctactttttggcgattataaattatgctgcaatgaacatcggtgtacaagtttttgtgtgaacatgttttcagttaccttgggatatacacctaggagtgacattgttagtaatatggtaactttatgtttaactttttgaagaactgccaaactgttttccaaagtagctttatgcttttacatttctgccaacaatgtatgaaggttccagtgtatctccacatcctcaagaaaatgttattgtctttttaattgtaaccatccaagtgggtatgaagtttatctcgtgattttgatttgcattttcctaatggctgatattgggcatcttttcacgtgtgtattgaccatgtatttttttgagaaaagtctacttatatgtttttaattgtattatttttagagttgtaagaatatgttatgttgatacttgaactttgtcaaatgcctggtttgcagatattttctcctatcccacaggttgtcgcttcactttgataatgtccttaaagtacaaaagttttaaattgattttgatgaaactcaatttctttttaattg

SEQ ID NO: 33954 - DNA, 1042 bp, Homo sapiens
ggtgatcatgtcatctagcaaagacaacttctttctaatctgtataccttttattttcttgtcttaatgtattagctagcatttccagtatgatgttgaaaggcattggtgagaggcaacatacttgccttgttcctgatctcagcaggaaatcttcaattttatgttagctctatggttttgtagatattctttatttacattaaatatgttagctgtatggttttgtatatattctttatcaggttcaggtagttcccctcttttcctagtttactgagaggcttttgaaaatcattaatcagtgttggattttgtaaatactttttttccacctattgatattaccatatgatttttctttagcttattaacgaaatggattacattaattgattttcaaattttgaactagactggcatacctggagcaaatcccacatggttgtgatacattatttatgaatgcattcatggtcatggttgctattagtctgtagttatcttttattgtaaagactttggtgttggtattaaggtaatgctgccctcatagaataagttatgaagtattttctctgcttctgtcttaattgagattgtagagaattcatataatttcttccttaaaactttggtagaaatcagaatgaaccatctgtgtctggtactttgttttgaaaagttattgctgattcaatttctttcatagatataggcctatttagattattattttgcataaatattggtagttgtgtccttcaaggaattggtccatttcaccttgattattaaatgtgtgggcacatttgttcataatatttctttattatcctttgtttttgagacagggtctcactctggttgcccaggctggagtgcagtagtatgatctcagctcactgcagccttgacttcctgggctcaagtgatttacccacctcagcctcccaagtagctcggactacaggcacatgccaccatgcctggctaatttttttattattattagagatggagttttcctatgttgcccagt

SEQ ID NO: 33955 - DNA, 1034 bp, Homo sapiens
agttagaggagaagatacggctgggatatacatgtaagagtcagatcatatttaaagctatggcactggagatcacccagaacagtgctgtcatattgtgagttgtgccccattaatgagtcaggaaatcaatgtaatgagtaacaaccagcatttaaaaaaacaagcacagagtaaaaaatatcagatttatcccatattgtaggataagtattgcttcatgacatttttgtttctattttattcagtgtattgtgtgttacattataaaatatatacctaattgtgtggcatgctcaaaagtttgaaagccagtattcgaaggatggagtgtggattgagcagagagcaaaacactgagctgtgggtcactgagacatctgcagagtagccaatgaaaggaatcaggaaagaattgccaaagaatttaatccagtgcagaaacttgtcaaataacccagcctttggaatggaagtttatatcaaggattactgaaaccagcatacttgcttagaataacataatatctgacaattttcactttggtaaaattgcttcaatttatgaaattttatttataaatagtactgttatattagaacaatacctattcttaaatgtctctaaataagatcttttatgaatttaattaatacttttggactgatgtacaattctcatctctataatggaaataaaatacttttaaggattgtgagcattagaagtaatgcacatgttctgtgtgcttagcacatagtaggtggacaataaaatgtatgtaatatttaaaactttatttacctaacatttgttgagctcctatcaaattgtagtcacaaagataacttatttgaaaaaacaaaaaacaaaacacaggttaatcatttgcagcagttatgcactttttggtcttcattatataatatataatttatctaatatataatgttatgtatacataatgccatagatcttgacttgaattttgatcacaaaattttcaagctttattttttctggactgtggaga

SEQ ID NO: 33956 - DNA, 1049 bp, Homo sapiens
tttatcaaggctaagatatattcattagaatgaaagtgaaaaaaaaaaaccagatctgaatgcctaaatattaaacctatgactaattccaccatttaaaaatatattagaacattcctgagtaatgaaatcaaagacataatcttttctttttacccatttattcattcggcaagattcccaagcaaattggcacgtccaggaaagagatgcacactctatttaatatcctgaagtttgtggttttgtctgctactttctcactccctctctgcagagtggcacctgtcaaagctgagaaagagtaaattactctatttctgtgcttggcaggaatgtaatatggagtaacaagagctgtgccgcagaagccctggagacagaagttgattctatagtacctaccttcttaaagctcgtgacagaaaattagcgaactaaggcattctgaagctagaaaagaaaaaagaggaaggatttttttttttttgcctgtgatatttgcatacttggagcaaatactggttctactctctaaaaaggcacagtgcaagccaaaaacatcacatttgtacaggtttacaaatatttaatatttattttaaaaattatattagtacataatagggagacattattcaaggagagtaatttttttttttattctaagatcattaagtaacatttttaatctcccagggggaaaaccaacatctatattaaaaaaaatacgttaagaatcaacagtactttgttgcattttctctcaggcatctcattaatttttagatatcaccatgggcaggttattgctattctgttttgctgacatttagcattttattaagtgctaacagtgagaagagtttatagaatatgtctaaaatcctattttcatattcttatgtgccttacaacgtggcaaatataggcatactttttaaaagaatatttctacatatcttaaaagctattaaatagcatggctttgtttccagttttttaaaaagtgttaggatgagcctcgtaattactattttttagactgt

SEQ ID NO: 33957 - DNA, 1239 bp, Homo sapiens
ttacaattgaattttggctgtatacacttaagttgtaatatagattttgaagaagctaaacttagaatttactaaatttaaaaatccaattttcattaatatttatgtttatcaagaaatgaaaacagagttttctaaatgccacatgttttgctttatccataattcatcgacttggagacaaaataatattttcacttattagtatgagcaatcaattacatcagctaccaactgaaggagatctcacattaaacattcatggctggtcgtttttctggttagaagttcatatctaacagagttcatggaatatattactcattacatccctataattggatcatcttgttttcataatattatgacaaagaagcaactctaacagcagggctacagggtatactcacattacattcactgtttcttaaaaggtttatagtctgttaaagtaaggcagaattgtggcattttaagtttgttgttttcagttctggtaatttcaaacattgcatgataataagatctttgtgaaataaaattatgtaggggtatggaggatcactgtgaaaacattctcaagattcatgtttctgtactgtcaggagaaatctctaatacaatctgtattaagattttattggtacttggttcatttggatgtctcaacgactgactctttatgctgaattcatttaattacatcaagattttggtgcatattataataaccattctttttactaataaaggctgtattaatcctcatgatataagctattttttaggcctatccaatctgccatcctctgctcttacccatttctctccccacatcttatctaccattccttgaactttttactgtttttcttttatacaacctatatttactatttacatgtctttccttttttcttccagccttgaatattcttcttcccactccccttgctagttgaaattatacttgtcttttaaggatcaattcaaacgctgcttccttcattaagtcttctctatggagtcaacctgcctgaaatttagttagctacctagctagataacccatggccagatactcaacttctccgtgccttggttgcatcatctgcggaatggagatcatagtgtataccttatggaattgttggtacagtcggtgcattaatatggaaagcaattagcacagtgcctaggaaactgcaaatgttaaatatttgctcatatggaagtgag

SEQ ID NO: 33958 - DNA, 1027 bp, Homo sapiens
ttatattaaatggtttaaaatataacaagattgccaagaacatgtttgctatttgcttaataatactctttggatttagtgccaaaatattagtgtatatcagtatagaaattgaaatagatatatattacatacgatatgtattatatattgtatatatgagtgatatatagagcaaaacatgtgttaaatttatttctttttctgggagaaagttagagaagtcagccagagtaataggaaaaataatttaaactggcaaagagatggataaaattttactgggcaaaattgtccattatgacattaaacattccttatattaacatgtttttttaaaatagaatactaattaattatgcttggcaatcaagaggtgttactgttgataggaatattttataataggttttaatgaaaaccataactaatctggtgagtttttaaaaataaaaaagtaatgtaccatataatctttattggtgaggaatgtaacaaggaggtagagaactagtagaaaggtatctttatttttcagtgttaccatcttcttatgaaatattaaaaggtttaattagaaaaaaagaaacgtaaaatgcacaattttattataattgtatgataataatacacttattatttaaattttaaaaggtttttaaaaatttcacgtgaagtaacacataaaataatttaatcaaatcctcctgaaatgtatctgtaagtacaacatagtttttatcaaaatctgaagactttttgtagctgtagacaagcttattctaaattttatatggaaaaaaaaatttgaaaaagagcaacagaatcactctagtgagtgttaagacttactatatagctatagtaattggagagatagacatacagaacaataaaacagaataataaaacaataaaacagaatagagaagcataaaatgcataaaagcaactcaatggaagaaggatagtcttttcagcaaccattgctctatcaattgaacatccataggcaaaaaaaaaaaaa

SEQ ID NO: 33959 - DNA, 1056 bp, Homo sapiens
atgagctttgtggggccatccatctctactatgctgcagtatgctttgggggagtcctattactttataactacctgccattctccattctgtatctgtccaactcaatctatgatggttgttggattaatcttcataatatagaaccctaatcacattgagcatctgttctggaatggaaaagaataaaatgttaataactttcttcatgcaatgggagttttgtgagttaccatttattaaaagctgaccaaataaattctacttagtaaacaaaaatatattgatacatttttatgtctggtacattctggcacctaaggatagtgaattgattcagaatttatgcatatcacactagtagggaaattaaaattctataattttgtatttaatcttagccgatgtatgtgtgtgtatatatatatatgcttatctttctgatattaattttcttacgtagaacatggatcctccaggcataactagtttctatttctcatgtacgtcctcagaattcccgaaacctctttgttattgccaatctggaatgactttcctccctttatcacatttctatttatctttcaatatgcagcttagatattagatagcaagtcttccttcctttctcaacatcttccttctttttctatggaacattactttttaaccttgaactataagttacttaggttcacattttctcctccatgagactgctaccttttgcaggcaggaagtagcttaaaagcataagcttttgagtcagatagaccagactctgtctttaccagttttgcctacctaggcaagttacttgctttctctaagtcttggttttctcatctgcaaaatggggatgttagtaatgacttctgtatagggtagcagtaagagttaaagaagacaacgtttgtaacacacttagtaccatgcttggttcattggtaagtttccaataaattcaaggcatttttaattattatataattttaattatatattaacaatcccttctaccctgtgaactcttacaaatcactcagtgttttg

SEQ ID NO: 33960 - DNA, 1050 bp, Homo sapiens
aatagtcatacctatcatgttaggtagttagttaatttctttcccactacctcaacttttttcttgttatttttttttctcctgtcctatttttttccctgttggaacttgtaaataaataattggagtaaatatcacacaaggatagttgtgttcatataccagcataccttggcgatattgcaggttcagttccatactaccacaatgaagtgaatattgcaataaagtgaatcacatgcattttttggtttgccagtgcacatgaaagttgtgtttacactatactgtagtccattgtgcaatagcattatgtctttaaaaagcatacataattttgtttaaaagtactttattgctaaaaaaaaaatgctaagcatcattggaaccttcagcaagtcataatatttttgctggtggagggtcttgccttgatgttgatggctgctgactgaccagggtggtggttgctcaaggttgaggtttgtggcaaattgttaaaataagacaacaatgaagtttactgcatggattgactcttcctttcacagactatttctctgtagtatttgatgctgtttgatagcattttacacacaatagaacttttttttttttttttttttttttttttttttgagacagagtcttgccctatcacccaggctggaatgcaatggtgcgatcttggctcactgcaacctccgcctgctgggctcaagcgattctcctgtctcccaagtaactggaattacaggtgtgcaccaccatacctggctgactttttgtattttagtagagacagggtttcaccatgttggccaggcaggtcacaatagaacttctaaaattggagtcagtcctctcaaaccctgctgctactttatcaacaatgtttatatagtgttctaagtcctttgttgtcatttcaacaatattttcacagcatcttcatcaggagtagattccatctcaagaaaccactttttttgctcatccataggaagccactcctcatctgtacaggtttatcatgagattgcaccaatt

SEQ ID NO: 33961 - DNA, 1070 bp, Homo sapiens
cctaagtaaagagagacttataaaagtaaattttctaaactcttttttgctcagagcctgaagagggttttgtagagaagccgcctgatacatggggtcaggctttgaggtcagcatcctgcccctcagtagctgttttgttgtgggcaagttcttaatttcccaagacttcatttcctcgcatctaaattggagataataaagtctttcagggatgttgtgagcatagttctgagtgccatcacccagcacagcatagtgccagcacataaacactcagtaaatgtcagtttgctttccctccaggggaagatgtgtctataatttttactatgaaattttctccaactagtcatgaaaataaggattagcctgttttttactctgaaaagctgactaaaagaagcagatgagaaatcaaggttatttactttcccattccctgtagttgttgctgcctttactggataccagccttcctaggctgttttcagagtgaaacaagaaaggtgggatgacagcaacatggagattgttgacttctatgtggctcatgtaagtctagaaggaggaggaggaattcaggaggaggattaagaacagagatcttgctttcctcttcctgatagagtattgtttgtattgtttttagctttccagttcaaagggggcatctggtttataatattttactttcgctgggcgcggtggctcatgcctgtaatcccagcactttgggaggccgaggtgggcggatcacctgcggtcgggagttggagaccagcctgaccaacatggtgaaaccccatctctactaaaaatacaaaagtatgcaggcgtggtggcacatgctgtaatcccagctactcgggaggctgaggcagaagaattgcttgaacccgggaggcggaggttgcagtgagccgaggttgtgccattgcactccagcctgggcaacaagagcaaaactctgtctcaaaaaaaaaaaaaagtttctaaaatttacagaaaatctcctctttaccctgagagcccctccctaccctgaagttggtgagggaagattataa

SEQ ID NO: 33962 - DNA, 1022 bp, Homo sapiens
gcatattgaaaattcaacatttgattttctaactgtcatgggctttacttttattgactattgatgtggctgtttattgtcaggtgaaaattttttaatatgttcacacactgatgattgcatatttgcagcacacagcatcttaaaccactcagaggtttgtcacaaaatgtgtgtttcttgctctgtaatttttttgtcattttgatggcatattttaattatgcttttatttctctccttctaccaagtggagacctctgtaacaaagatttttcagggttgcatatttcatctttaaaagctgtgtacactgtggaaacaattgttaaccaaaagcactagataatttaggataactgagttcaagttctgacttttgtacctgaataggtgtctaacatttctcagctacagttttcttattacacaagcatatttccaaggtatgttgaagctctaaactgcaactgaaaacttccttaatgtagaaaaactatataggatctaaatattgtatttttgtatggttgtccttctgtttactcggagatttgactgtatatgtggcttatgacaatagcatttttgttaaaagcattttatagaagtgtgaagaaaaactaaaaatacaaccagttccaaggtttaacaaaactattccgtttctgagttctttggctgtcattgagcaacttgtggtttctgaaggaaattatgtgaattaggatggttttgtatcatttatccttaagaacagggaaaattgagatgttttcttatgtttctgctggagattttggaaagatgtgaaacctacacctacagattgaccttgcttagttagctctgaacctcctgctgcctcttccacgtaaagtgaaaattttggattcttatcggcttcagataaacttacaggttagtgaaacatagggactgagatatagtaattcattctgaagctgttttggagtggtcaaataattttagttggataatatatattactggctaatgat

SEQ ID NO: 33963 - DNA, 1043 bp, Homo sapiens
tccaaagtgtttagtgcctcctattttattttagtgttaagattttgtaggtacttggtaattatcagcagaatatttacataccaacaaatagcaaagccattgataattaatagaaaaacaaaatcatagcttatgtttagttgtattttttagtgtatttcagtgtttagagttgattttatattgcatatactaactgtggtaatagtttctactggatagattatttcaagttcacatgattatagaagtattttatgaagtttgacatagataatggtggtttcagggtcccttgtctcttgggttgagtttttacatcattgaagaattaaaagattgtgtcttggtgtctatgtatggccaagaattaagacattctgatgtacagtttcattttctaactaaggcaaaaatgttttttgaaacaattactttttaggataaaagtataaaattatgaagaaataatgtgtaggtttgctaaatgttgtgttcttaaatcttgtgttgaggtctgatgaatttttttatatctttaatagttctaaagtagtgtactgaaagttaggatcatccatgttgctacttaacttgttgtccatagggtctgttgtcctggatgttggtgttataaatgtacagagttaggtagttttctgtgaagagtttgcaggctaatatcactgtttttgacaatgaaaaatatagcatgaaaattaaggttggggtatggagaactttctagagctattgctttttctagctgatgattaaggttgagaggcagaagtacattgtgtcagggaggacctttcccttttatgcatgcacctggcatttatcacctttaacaaagtgtgtgtgtcatgctgtgctgcttgcttaaggggctgtatgcctccagtctgagtcacatggtaactgcatcagcagtcttagcctgtagcattttattatttcttttcaaagtttacacttggcctaatacttagacattttataattctttacagtaaatgaaactatacatgagaaga

SEQ ID NO: 33964 - DNA, 1048 bp, Homo sapiens
gcagtgcctcgcccagagttaccactaaaatagtattagccattgtggctgaagcatgtcccctgtcagtacatacagaacaccctcattcttatttatggctggctgctattccattactcatcagatgtaccacaatgtatttagccagccctccacagaggaacataagttgtttcaagactttaggtagttcagacagtagtgcagtgaataaccctatacattcattatttaatatatgttagactatatccatagaataaattcctaaatgtggaattgctatgtcaaaagagaatttgtattttgaattttgatagattttattaaattgccctttataaaggttgtagcaatttacacttcttcctacaatatttgaaaaccattcccaatatattataaaagtattttcaaaatctttgccaatcttataggttaaaaggaatctcttttaattttactttgcatttcttttattgtgaaaagttgatcacattttcatatatttgtcattttttctctgatgttctttatttttctttagtatttttattgatttatggaagttttctatacaaaaagaaaaattatccttttttaatttgttgcaaatatttaaaaacatttttgtttgtctattttatggtatttttatcttaacatgcaaatttggaaacttaaatgttcttcagtaagaaattggctaaatggttattggcatacttgcagcaatgcaaagtgtatttgctaccatagaaaaatggttatacaagaagcaacttacaacactgcaaatatagtattcctttttttaaaaaaagttcatattcatgtgcatttatgtgaatgtattacataagaaaagttcagaagtcaaaaccttcacaaatacctctagattttgtgaattgaaaatttaaaggcaccaaccactacagaattaaaaataaataaactaacattttataacccaactttctggtcaagttttgcagcatctattatttaccctccctccccaaaattcttgagatattgtgat

SEQ ID NO: 33965 - DNA, 1071 bp, Homo sapiens
ctggcctaaggaaacaggaaagagtttgagacttccttctaaaggagccacgtttgagaaatgggatgcaggcctaagttaagaatgctacagaaaaatatcgatccctaagcgtatttactgttatgtgaatgtgtgtgtcaaaggacttaggtgctttgggggagaggagggtgaagacaggaatttattcattgagcgaatagttattaagcgcccactctattccagacaccgttctaggcattaggtgaacagcagtgaacaaaacagacggaaatctgtgtctacttgtagctcacattttagagaggaaggcacatactaagcaaagtaattagaaacatactgtattttaggtcgtgatagtcctgaagagaaacgtaaagcagggaagaagggtataaagtgacacaggaaggtcttgctgaaaagatgacttttaagtaaagggctgacagaagtgggagatttaaccacgcgaatatcttgggaaagtgcagtcagacagagggaccagccattgcagaggtcatgaagcagaaacgtgctagaatagcaaggaggcctgtagggcagagttgagtgaagggtttagtccttcactggagattaaatcaaggcgagcaggtcatgaagatcttgaggacatctaacttttattctaaatgaaataggactttggagcgttttgagcagtagagtgatgggctctgacttccttttaagagggtcactctttaaggaaaatacacagaggaggacgtggtaggagaaaggagaccaataagaagagttttgcaataatccagaggaagcataatggtggtttgactatgggtggtaagaaatggccagttatattcttgatgcacttaatttggatatgtaagagtattatagatgacagggttaattttatttaattaggctttggaggacacttgaaaaatgaattccagtgtgagtttcagagtggcaaacacaagttaaaatcatggctttgctatgtggtacttgaagggattcagataagtcatgtaattttcctggatctgtctataaaatgga

SEQ ID NO: 33966 - DNA, 1043 bp, Homo sapiens
acacttacacccacttagtcataacttaatcttgtcattatttcagttgagttatatatgcactattggcatatagttgttgagtgtaatttcccttttaaagatcatttagaagattatgattagcattagaatgaaaagttactgtgtatgtggggaaacaaagggtgatacaagataaaaatccagggttaaatttaaaagaagtctgtcaataaataatataggatgtgtctaagtaataagaaagcattgggtcagttgattcaatagtgttttttttcataatgtacataaaataatagagcttcttgggattgaagccattttacaattgatggcattttagatttcttgtatagtatttaaagcttccaacaaaaatgtaaatttttacctactgtaattctgaaatagggaaattagaggttttgagtagagacactttcaaatttgtgtagcgttcctatatagcataagaattctaaaattaaaagtctgcctgtaaaactttgatttcaaagtagtaacttacttatgtttgattcccaatgttgtcatcgtggggcagagattttgctttttcaaaaagattgcaggcaatttagatggtgtgggtggggaggactactgaggaaattgctcagtaaacaaaaatgatagtgaagatctcagaatctcaaaaatcatcttttgtgtgtgtattttaatgattaagatgtactataaattcatgtacagtatttgggattctgcattagaggcatcgtatgattaatggctttttaggtttgatgaagtatgataattaacattgagaaggacaaaattaatgtgaagggacagaatgatttagataatatgtttcaaaagcttttgtcctaaaaaatgcattattaccattttaatttagtaaaggaaaaagaaaaggtcttgatcctcaccaaacacaattaacatacttggtctacagttttctgtgcttctctcttcataaatgttttatattttcaattactgtgcatgtcattcttatatctatt

SEQ ID NO: 33967 - DNA, 1037 bp, Homo sapiens
ttgacttatactcaatgtaaaattgaaaaatcacaggggagtaattagcatagagattaatgaaatgagcactgggttgaatggtaaaagatttgtttgagctttaagcagtattgttgttaaactatcactgtgccctaagcgtaacattattttaaaaatgtcttcaactgtgtttcccccatttgtctgaaagcttagttagttcaaagaacatgtttatttttgttctctactataaacccagcacatgacacaaaatcagggagtgtaaagttggggtcatgaacttattttaggagcctggtaggtaatataaatggcagacaacagggagtagtaaagtgtctgtctgtcttacttaaagacattcacatcagttatttccaacactgttagccctggaaaagaaagctatccctgaactttgtcaggctagtttgtgatccctagaaaagattagtgattaagaccaaaccctgaagaacagcatcattaatgggacagattaaaaaaaaaaggagccctgaaaggaggtgacaaggaagtaggaggtgaaatcaggtacaagtaattttttaaattaagaaaagtatagccctctccctctccctctccctctccgcaccgtctccctctgatgccgagccgaggctggactgtactgccaccatcttgactcactgcaacctccctgcctgattctcctgcctcagtctgccgagttcctgggattgcaggtgcgcgccgccactcctgactggtttttgtattttttggtggagacggggtttcaccgtgttggccgggctggtctccagctcctgaccgcgagtgatctgccagcctcggcgtcctgaggtgccgggattgcagacggagtctcgctcactcagtgctcaatgttgcccatgctggagtgcagtggcgtgatcttggctcgctacaacctccacctcccagccgcctgccttggcctcccaaagtgccgagattgcagcctctgcccggccgccaccccgtctaggaagtgagga

SEQ ID NO: 33968 - DNA, 1045 bp, Homo sapiens
aggtgaggagcgtctctgaccggctgcccggtctgagaagtgaggagcccctccgcccggcagccgccccgtctgggaagtgaggagcgtttccgctttccgcccggcagcggccccgtccgggaggtggggggcagcccccgcccggccggcgccccgtctgggaggtggagggcgcctctgcccggccgccccatctgggaagtgaggagcccctctgcccggccgccaccccgtctgggaggtgtacccaacagctcattgagaacgggccatgatgacgatggcagttttgtcgaatagaaaagggggaaatgtggggaaaagaaagagagatcagattgttactgtgtctgtgtggaaagaagtagacataggagactccattttgttctgtactaagaaaaattcttctgccttgggatgctgttaatctataaccttacccccaaccccgtgctctctgaaacatgtgctgtgtccactaagggttaaatggcccctgctctctgaaacatgtgctgtgtccgctaagggttaaatggcccgtgctctctgaaacgtgctgtgtccactaagggttaaatggattaagggcggtgcaagatgtgctttgttaaacagatgcttgaaggcagcatgctccttaagagttatcaccactccctaatctcaagtacccagggacaaacactgcagaaggcggcagggccctctgcctaggaaaaccagagacctttgttcatatgtttatctgctgaccttccctccactattgtcctatgaccctcccaaatccccctctccaagaaacacccaagaatgatcaataaatactaaaaaaaattaaaaaaaaaaagtatagaaaatttagataactttaccaaggtcacacagtctaagtatatataagcaagcccaagggtatatatacccatgttcctctgccagtgctagtgatcattatctgcatgttactagaaaacattaacataaacttatgcatccaacctatatttttaaaaaatttaaatgataattaatc

SEQ ID NO: 33969 - DNA, 1042 bp, Homo sapiens
ttcgaagaaaccacacggctgccttgggccccaaaagctgcggaaaagcgcagtattcagttaagcaaataactacttacactgtttattttggttacgattccttaagtgagaagtaaatcaattaacaggacaaatgacacgatggttaggcacgaaagggacagtgctgccacctcattagcttggagcaaccttccagctcataccatgcggactgatgactaaccttgccaggcaacgctgtgaggtttggaaacccacctctttgacctaggcccggtcaacaccgataaaccctctgaatcaacgctggcgctcccaagcccactcacacgccgtcaggaagcagtttccgaaacaggccgggtgcgggggtgggggatcccgttccagccccacccctgaaagttgctgggagtggcacccaaagaactttcccagattgatctctgttgccgctcagggaggtcagctccaggccctcagcctttcggccgggagccaaactgccctgcctgccaagcccctccttctctgcaccttaaacagccgcgaggggagagtcggctgggattttcttcttaagaagtcgcgcaggtttttcgagctccactctgcgccaggagagccacggcagcaggaacgggcactgctgccaccgggccgacgggtgagtcactgtttggaaatggagtgggcgggcgagggtgtgagagaatgaatgatgtcaagagcgcgctgggcgcagggcgcagggagcgggccgcgcgcggcgggcggggagagcgggcgcggggccgcggtcaacactgagcgccgcgccgtgggccgagtggggcggggagacccagccctcggcgcgcacggagcctggccggtgctgcagcgccgccgagtgcggcctcgggggcggcggccgcgggagggacccggagagctgcttcccctagtcaggccgcggcgtgggagggcgagaccccgagcaaactttctagcggcttcggcccgagggtggtgacgcccggggctggtcgcggcg

SEQ ID NO: 33970 - DNA, 1020 bp, Homo sapiens
tactttgagaattatgtatcaaaaaatgacctcagggttatgcagcggaaaggccatgcgatcatggagcattgctttagggcttccagtggatatgtaatgctctgaagctagatatgggtttttgctttactgttttttccttctgttatatccccctttttatataagatataataaaaatgcagtcacaaaaagtaaaccacagtaagtcagatgaaatgtttgggctctgtgacatatatggaaaccatatttatacagacacattagtgactcatttaggaaaagaaaggtacctgaagctctctgggaaagggtaagataattctggtgtctttgagtgtgtgggctgccacattcattcaactgctattctagggctgggctgcaggttcttggctagtggccaggaacaccaacacaaacaggacatggactctatccttgcagctcataaccagcagaggagatagccctgtgttaagcagtgagcttttaaaaccctgtgctgggctgaagagatgtgtaggagcataggtatggggagaaagccaatggcattcaatctcaatctgatctttaagagttctaagttcgcttgaatttatctttgcaagggaaatcagaatgttagagaattgtgttgggaatgtgtcaccacatgccaggctagtggctctgcagttcctgagcaatgttttgtagtagtgactaaaccctgctctgaggaagtggtgacattaggagatgcaacggagagtaaaagtagttggaacctttcttcctgaacttgcagagtctctctctctggttctgtctttgctgactgagagatggtggtgtttcccaaggaagtagttggcctgaaagtcaaaaggatgaaaaggattggggagtgactctcagagttgcctcaaaagccagtcataatagttaattttgaattaggtagaaactctggtcagttgtacaacataagtacatgacgttttattcaacagctatagagatttcttt

SEQ ID NO: 33971 - DNA, 1029 bp, Homo sapiens
gaacagcctgccgagtcagagctaccaaagtaccaaatgctggcttcactgcttactagttggtgaccttgggcaattcacttgatatctctgtgctcatctgtaaaacatgggtaataatatttaacctcatagaattgtggagatgattaaataagataatcaaagcatttagaactgtggcatttgggcaatagtaagtactatatgagtgttagctatagctcttgttcttaagtctaggctatataaatttattttttttatatggaacacttcgcgaatttgtgtattacccttgtgcgggggccatgctaatctctgcgtcattccaattttagtatatgtgttgccgaatcgagcacaggctatataaatttaaatcattaataggatacatagtcaaaatttttaaacacttggaaaatattccaatctagtgttgttaaactgaaataaaaatatatttttggcagaggaaatatagcataatagtaataaagcccaattagctctgcatgatcacaatgttgatgaaattgtttaaagtgtatatttgtaaatacttttccaaataaaagcttaaaataacaacaaagccacaatataataatcacttgggtttgcaatataaattagattgttaaaggcttggagaaattttcacttttacttagttttgcatgattttatcgtaggtaaggaaagctacacaaagtggtcaaccaacatttcccagaaaactctttttgacagttgatcttcaaattaaggtttctgattgcacttcggtaaaaacctctgcaaagaaagtgtgtatttaggctgttatctgttgaagagcaataatgcctttgatgagtgcattcttattcttaaagttgctgcccgccaggtgtggtggctctcgcctgtaatcccagcagtttgggaggcctaggcgggtggatcacctgaggtcaggagtttgagatcagcctggccaacatgggtgaaaccttgtctctaccaaaaatacaaaaatcagct

SEQ ID NO: 33972 - DNA, 1136 bp, Homo sapiens
atagaaaatacagtcttaggaaggattgatgtgatctctgggtaatttctagcttattatgacttcatggttagcaacaagtgatagtgtctgatgaagtgtttgcaatgttaggtcctgatttttctttaaggaaatttaaagggaactgattgttaaaatgttcctatttctaccaatactagctcaaaaagagacaagaattccaagataaaactgttcagtattttgtaaataaacttgatctcagcagctttaactaggttctgacgttacatttataaagcaaatggctttggtatttgtttccttagtttaagaatgtttctgttttggatggttgacagttggacaagcatagtttctgaacataattttgttttgcttttaggtgggatagtaacatctttttgagggaagaattggcttcctttcttgaaagtggtgaaggtacagcatatagctgcatggaagaaacagtaatcggatggctaccttctacattttgtattaggaaacaaagtccattgtaagagtccatgttgatcttggaaatagaaggattgaaaaaagctaaatttccacaaagaacaagaacttgaccatctcctttttgatctgaagactaggggacaatggatatcatagagacagcaaaacttgaagaacatttggaaaatcaacccagtgatcctacgaacacttatgcaagacccgctgaacctgttgaagaagaaaacaaaaatggcaatggtaaacccaagagcttatccagtgggctgcgaaaaggcaccaaaaagtacccggactatatccaaattgctatgcccactgaatcaaggaacaaatttccactagagtggtggaaaacgggcattgccttcatatatgcagttttcaacctcgtcttgacaaccgtcatgatcacagttgtacatgagagggtccctcccaaggagcttagccctccactcccagacaagttttttgattacattgatagggtgaaatgggcattttctgtatcagaaataaatgggattatattagttggattatggatcacccagtggctgtttctgagatacaagtaagtaaatctaatgttttgaggatttgtcatgggtttgtttttg

SEQ ID NO: 33973 - DNA, 1033 bp, Homo sapiens
ccaaaggtaaaatgtgctcagattataggcacttgtaattctaaccttgtatccatttgatcaaagaaaatttgtagaacatttttacctctcatgatcacaatcattagtgtctccctttataacgacctatgttttgtttactttgaaacaccaaatttgttgtcttggttttttttacatgacagaactcatgcagtttcttttttagttgaaagttcacatcttgccccttgaatagtttgaacatttctttcttaattcttttttgtttttgttttgcactgtaaaactgatgaaaactttaagccaatcttaatgcactagcctctgtagtgtaaggaagtgtgagaaggagtttcttaatgagtttacacgtttaaatcaagcatattataagttatatgccatgtgttgaaggcttttctatttatatatataaagatttttagtatttgtttttagtgtccttgtgttgcaataatttaactcctttgactcagttgctgaaaatatttcttctattaagaagtgctcttgacttcaacacccaaacactgaaaatcatgtcaatgttacccaaagataagtttttatacagatacacaccttataagttctgatttattttcttactcattatgctgtgttctaaataaatcatgaatgagaagagtgctttattgtgaaattatttaaaactgtcctttaaaagaaaaagaggaaacgatgaacaaaaactaatctaattgccaagttagaattcattatttaatttacctcctatgcaatgattaatgctgcaaaatgtatggttatgttaccgtatattcacaaaagaaatattattacaaggtttcagaggtagccaattgcattcttttggaaatttactgtactgtttcaatgtgttaagtgccttgttgtaaagtaaaattttaagtctagattcattattttcctgacatatatttttcattatgatatctactgtatgctattgtgatagttttatgaaatgcttacattttaa

SEQ ID NO: 33974 - DNA, 1052 bp, Homo sapiens
tgaactgcgatcagttttaattctatcagttatttttgatttttattctgtaattgtgcagtctttgtcaaagtagttttctctcctaaacggcctcccggctctccccggtctttccttcgcttgctaggttgtaaagaatagtagtagtcatgacttttgtagcactttgtaaagtcacctaatggaagattgctgaggtcctggttttgacctttgaaatagtgccgtctgtgcagagttctgagcttgcgattttggcgctgcagcggaataagtctctctctttttttttttttttttttttttgagtcggagtctctttgacccaggctggagtggagtgcaatggcgcgatctcggttcactgcaacctccgcctcccgggttcaagcgattctcctgcctcagcctcccgagtagctgggattacaggcgccccgcccggctaattttatatttttagtagagacagggtttcaccttgtgggtcaggctgatctcgaactcctgaccaaaggtgatccgcccgcctggcctcccgaagtgctgggattacaggcgttagccactgcacccagccggaacaagtcttttatccattgtacatcttcagggcttttccattgttctgctgagctgtggttcaggctcagttgtgcgagtgattgattacctggctactgtaatgcttgtactttttttttttaaaaattattccatttcagctcacattggagaaccatggttttcgtatcctagctgattatattcttagcatttcagtcctttgcaacttggtttgttggggaaggcggttatagtcatctaatttttcttggggacagtactactgtggctacagtcatgagagagtttactttttcaatgtcttgtttccaaccaagtccacgctttcatgcttgctttttaaaaacaaaaacaaaaaaaccttttactattaggtattatatatctcaattttcttctccttggcaagttttttacaacgtttttatttgattgcattttcttctaaaagctatatccct

SEQ ID NO: 33975 - DNA, 1080 bp, Homo sapiens
aactctcctctacccggaaagtgtccatcatagcaacatcttccagggattcttaaatataacgatgctgttgacatgtctggttatccctttaccttttcagaatttgtgggaggtgagaagtctgggagaggttatctgggttattatgaaacctacacacttactgaattaaaaaaaaactatgtaacacaattctagtctaaaaatgggcgcacactttctttgccttttagaaatactttttgaaatgtaaaattcgaagtctaataaaggagtctgtccaattaatttaactgtttgaagaaaaaaaccagtccaggcatggtggcttacgcctgtaatcccatcactttgggaggctgaggcgagcagatcacttgaagtcaggagttcgagactagcctggccaacaaagttaaaccctgtctctactaaaaatacaaaaattagctgagcatggtgacacatgcctgcagtcccagctattcaggagactgaggtggaagaattgcttgaacccaggaggcggaggatgcagtgagccaagatcacaccactacactgcagcctggccaacagagcaagactccttctcaaaaaaaaaaaaaaaaagaacaaaccagctggttgtggtggtggtggttgacatcctcaacagaacagcttttgctaattgttgaagtcagggaagacaacttgtgctgatggcagagttcaagacattacacaaccagagacaatcataaacccagaaatgccagccctgagagatgcaactgatgtatgacttttttcctctctggatcaaaccatgacaaccgtaaaaggcaggccttgctgttaaggcgctgcagcctctgaagcacagttggcctcagggagctctgactcagtctacttattctggggatctgaagaaagtcagaaatcatgtgtggtagatagtttgcataactttgggattttccagagagaggatgaaaacggtggccctccttgtaatgtctaggcacatgggacatccagtggaactgttgagggaggagatgggagggagaccagtcaccagaccagttg

SEQ ID NO: 33976 - DNA, 1276 bp, Homo sapiens
ggaaagccttaggaaagtggcaaagaagaagtttgcagaaaaccttaaggtaatttcttattatcgatgtcttcaagacaagtcctctgactgctttacatttgcagggcaatgggggatttctggctttctttctttctttttttttttttttttcagtttgttagtgtaaaactcatttttccataactttaaaccaatataataacataattactaaacattcagggggtactgattacaaaacaggagaagtaaataaccattttgttgggtgggatttgaggttgagaagaaagcttgtacatacaggtggtgaactcattctagaagaacatgagaatttggaattgaagaacacttgttttgctaaaaggatggaagaagaagaaacaggaagataatttttatactacaagttaagaagagaatgatataataaatatggtatttatagaaactaagagtgaatcattctacttgccaggagcagaagagatagaagaatttgaggaactctgtggaggctgggaatacaacagcatggtgggatgagaaggagttggtgactaagggccatgctgtttttcagcgcactttcacttaggagtttgcatttaattagaaatacagcacaaatcacccaaacaaattttaatttaccttttgtcatcttgttaaagttgcttaagattgatttccttggggcttggatagaatttctcgctgtatgcagccagagaaaagtacacataaggcatttgttgtttctcacttcaagtatccaaggtggtatatctagatgcttttaaaaatttttttattatggtagaatatataacataaaatttgccattttaaactatacaattcagtagcattaattacactcgcacattcatacttcatgtaagtggaatcatacaatatttgtcctgtgtctagcttatttcacttagcataaagttttcaaggttcatctatgttgtaacatgtgtcacaacttcattctttttttttttttttttttctgagacagagtctcactctgtcaccaggctggagtgcagtggcacaatctcagctcaccgcaacctccacctcctgggttcaagcagttctccttcagcctcccaagtagctgggattacaggcgcacgccaccacgtccagctaatttttgtagttttagtagagatggggtttcaccatgttggccaggatggtttcaatctcttgaccttgttatccacccacctcggtctcccaaagtgct

SEQ ID NO: 33977 - DNA, 1027 bp, Homo sapiens
tatatcgaataaaaaaaccctaaaagtaaaaaaataaaaccagcttctgatagccttgagcctcctgaccataaacctggaaggtggagcggggaggcagggagggcttccccagcatcctgtttggaatgcttggagactccaatatgttggagttggagtcacagtaggcaatttgcacctgaaatgggacaacttgccttttacagggtcctaattacagggtctgaggagcagccgctattaaagtagcatttgttctgaggttgaggagttattgccctgcgaagtgtgggggacgctgatgctgccatgtgggtgatgtggggccaggcaaacctacacacactggctgtggcctctctgggagtgtgtatcgtctgttttcttcattattgccttttccaactaccttttccttcctttatcctcctcattccctcaccactactcagcataagcatttttaataagtcataataatgaccattttttttagcattttctctcaagtgacaactttgaccatcttgcaatgggactttttctgtcttactaacattgcttctcagcttcctcctattttctcctatcccctaaggctgattttttgaagaaattgaagaatgaaggggagggatttggggaacagaagaaacagcatttaacagctcttatctcatgcagattaagagcaaagaagtggcatgcatttccaacatttcagtacttagggactagttgatttctttagttattatattgtatatataagtgttttggagataggcacattctgtagatttactttaataatgttttcaactgcatttatctggtaatgtatgcttttgtctttggaaatgtagtgtgttggttgttaacagctgatgtttagcaaatgctactattttttagaaagtattttgtaaaagtgttcttctctattcagtttttattgtttaactttagctcttccttgtgttgctggtggtgtacaccaaaataacttgtataataagctaag

SEQ ID NO: 33978 - DNA, 1050 bp, Homo sapiens
cgattcttgaaagggaattgggaggaaagaggaggaataaagggatgggtgtagggctgtgtgtacagcattttatgtgttttctgatttatcttcacaactttgagacaaactgtcacccccagttcacagatgatgaaacagattcagagtgacagaaggaccaagagagtattcaagattgaacccaaatctgtctctcccaaagccatgctcttccaggtcacacctgtgccttgatctgtctttatgtcaggatctgtgcagtggggcatctgggtttgaatgtttttttaagtactatgattgttggataaattgtcatatgagatagaaataaggccatgctgcaaattttgaaaatgtacagcttgataaatgggggcaaacatgatccagggtaagaaggggcaatttggtgacttcacaaaagataccatttaatgaaaatttactagttttttgtttttctgtctcccaaaacaggacactcctgggtttattgtgaaccgcctcctggttccatacctcatggaagcaatcaggctgtatgaacgaggtatccttctgacccaggccaggagcagcagacctcagctcctggcgccactgtctggaattctcagtgtctctaggaggggtcgggccgtgcacaatggaggaagcagtgtctgttttctagctttgtgagctcagctgcaccctgagccctggtacctttttcactgttttcccagggcctcctggcttccctgtgggcctctgagaaaggtttctggaactcccaccacccccactacagtcccagccagagcaattgcatggccggcccagattgatatcctggatctctgcttttgattaaaaggtttactgcttttaaaaataatcataatgtaaaaatcactaggctaggagatcttgaaagttccttaaggttctaaaacttgtgactgacaggtgattagaaatatgtgacaaggccgatatgtggtaaggacagtttttagtagtctgtccttactgagtgatgtcatgatgtactttttg

SEQ ID NO: 33979 - DNA, 1034 bp, Homo sapiens
gcagtgtgagtaaatctctccatctttactcacacagagctgtgtgagtcatgaatcttcaggtcttattatgttgaagtttttggcttacacatctgagttctcccattatgtcatgagtaccttgagtgcttgtctggtttatctttgtctcattctacatctctggtgcctgctacataatgaatagaagttgaatgaatgaatgaatgaatgacgctgcctatatgattatttttgtttctttgctttcttatggcctaacactcaaatcatgatttctcaggcgtctctaatcctaattagtgtagttattagtaatgtcaaccataataaataattgtggtgtattttagtcaccttaaaatgccttgaaatcctttggaattactttagtaatttatttgcttttaaaaatatatcttctttatcgatgtttaagtagtttctctctgagtgtcttaacatttttccctcttttctttagctttgatctgattgacttcttaatgctttggaacaaaattctagatagccacctgttgcagactattctacttttctgatttcaaagaaagggaacagattgttctccataaaggcctcttggggccaaaggacatagtaaatttccaagggaaaagcacattgatccttgtcgtagtctactcaacagacttccaaacgtgtggtgattctaactcgggtttgggcttttctttaaaaggtatcttgactaaaaggtttgtgtgaaatgtgatgccaggggaatactccttacttgtaaaacccaaaaaactgggggaaagaatacatacaataactatacatacaaaagcagaaagcttagttttctttttaagaaagtttatttataaatcaaaaatatgctgtagcattaaattatactttaataaatgattccagagttggaaaatcccaatgtatttgaaagtagctgaagtttcaggcatggagacttctgtctccatgaacagggtatcagtactccaaaattcacctcagtggtgcgt

SEQ ID NO: 33980 - DNA, 1041 bp, Homo sapiens
tcaccacgcccagctaatttttatatttttagtagagacggggtttcaccacgttggtcaggctggtctcaaactcctgacctcgtgacccacccacctcagcctcctgaagtgctgggattacaggcgtgggctactgcacccggccagtgatatttttatttacctataatacaagtgaaagtttgagattaagaagaaaaccaggcaacttatgagatgacttgctgaaaaagatggtgagcctctgatagccatcacctagacttcaattctgtttagtaaaatggagttctctgaaggatcgttttaactcaagatatctttgtaaaatgaaaatcatggccctttcatgttcttaagattcactgttaatagtagtttttctggggaaaatggttaactttttctgacatcaattgtaaagcgtatttccactttgggaacttcaatgacacagcgtgggggtaggtggaaccatgtcttggaactcggaaactactatgaacaaatccggtgttagaaaatactctcagctgggtgcagtggctcatgcctgtaatcccagcactttgggaggccgaggggggcagatcatgaggtcaggagtttgagaccagcctggtcaacatagtgaaaccctgtctctactgaaaatacaaaaaattagccaggcgttgtggcgggcacctgtaatcccagctactcagaaggctgaggcaggagaatcgcttgaacccaggaggcagaggttgcagtgagctgagatggcaccatggcactccagcctggacaacagagcaagactctgtctcaaaaataagaaaaaaaaaaaaaaaaaaagaaaatgactctccactgggttccgttaatagtaagtgttttgactaacacatcagctttcagaaacccatttgagattcaactagtcatcattggagaggttacagccactatgttagtcacagcttatacaacaacatacactaattatgctttctttgtgagttataccgttcacatatttgaaacaagcttttg

SEQ ID NO: 33981 - DNA, 1063 bp, Homo sapiens
gttaaggaagtgccacgtttgattaccatcaggaaagctaacattcttggcctcttgtttatcagtcacctttaaatacaagtagttttaaaatgtggaataatacatcttaatttaagggtgttacatacaaggatatgtatgtgaatgaaatagaccacatgatactgttttgagattttatttacttttacaatggaaagatttgatgttactctattcttaatttaggcactcagaatggtccagcgtttgacataccgacgtaggctttcctacaatacagcctctaacaaaactaggctgtaagtatttctgaaaattttaagtatatattgtcatttactctacaaaatgctgacctactgactgtttcactttctaggtcccgaacccctggtaatagaattgtttacctttataccaagaaggttgggaaagcaccaaaatctgcatgtggtgtgtgcccaggcagacttcgaggggtaagtgtaccttttactgtgtgcagcctaacaagtcttgaacttactgagctttcatcccttgacgatggaatgaatcaaggagaggttaccactaagagggttcagaattactaaacattcatgagccaaatctgccacgaacatagactttttaaaccaatctgagaaatgcagtgaaatgcctttcagataaatgagtacaccatttccctttgtaacctactttaaacttgcccttaacacttaacaaaatttagggaaatttctgttaaagcatcacaaaaatcttaatatttttcttatgcaggttcgtgctgtaagacctaaagttcttatgagattgtccaaaacaaagaaacatgtcagcagggcctatggtggttccatgtgtgctaaatgtgttcgtgacaggtaagttaaatgcttaaatgggctttccttagcaaattattgtgtgtgttatactgtctgctgatcagtacaatggtgaagcaactcattttaaaccagttgcatgctttagaaccctttctttgctatggataattgatgctgcacaaagcaggaaatgatat

SEQ ID NO: 33982 - DNA, 1120 bp, Homo sapiens
tgttagccaggatggtctctatctgacctcatgatctgtcagcctcgacctcccaaagtgctgggaatacaggtataagccaccgcacccagtcctagctgagtttttaaaccaaaccttttgacaccaaatgcaggcttcattctgcattttaggaggtagattgtaagagaacagtaggagatactacattaatacaaataggggataaatatagcttctgtgatacacagcaaagcttaactatgattgaagtttaaaggagaaattacttgcaaataactaggaatggcatttgagttggaacctaaatgatgggcaaattttggacaaaaggcagaaagggcattccaggcaaggaaagtacggactgatctggcacattgtgggtgagaaatggaagtgtacattggagataagtcatgagttttaagctgaagaagtttggctttttttcccccagtctttggttctaaaactttgctgaacacaaaatcagatgggcacatttattaaaaatacaaattctcgggccttatctcctgaagatttgaatttaggtttacaggatagcctagaaattagcattgttagctgtgatgctgagcaggtctgcatgtggtctgtgctttgagtaagttaagggaatttttaagtgattcagttgtatgtgtctctgataggatcacatgggggagatttgaagaaattagaaaacccagagttttgagggtagggtttgataaccaggtttaccaatgggaaatggggtgggggaaggtttaagttgaagcaagaggagtgctttaaactctggtggtaactctgatttaacaaatgctaggaagacctgctttttgctaggtcctgtgcaacactgtaatgatagtgatccataaaatgcactcctagatggaggctcaaagtctagaaaatctttccaaatttaatcctcataaactccctgttaaatacgtgtgaaactattttgtgccttaatatagagaaggtaacttgtccagtgtgcagctagtgtgtggtggagttggccgtaaacaggttctaaaatccttgctcttggtgaggtgtctcttgctaatatccctttaccttttaattt

SEQ ID NO: 33983 - DNA, 1019 bp, Homo sapiens
ggcatgtgccaccatgcctggctaattttgtatattttagtagagacgaggtttctccatgttggtcaggctggtctcaaactcccgacctcaggtgatctgcccacctcggcctcccaaagtgctggtgttaaggtgcgagccgcagcacccagccagtgggttactttttctgaagaaacagttggtggtcactgatggccagaatttttttggtgacagctctaccgctgcattggagcataatgtccttctctttgtgggctgagacttcagggtggtttgggaggaatggcccttctatttgaaactttaatatccctttgatccttactatggtatctcctttacgtcagcaagtttcataggatagaaaccttggtattctagttccttggaatggaacctttttaagattgtttttaaaccctctgttcttttaggtcacttcagttcaaaaatggtatcttggagagctcagaactccttatttaacaaatgagtgagctactatatataaaaccttgggtcaagggtatagtttctgatctacattggatttattatccaggccagaatgttaaaatacagacctcatttttcttgggaactatgtagtgtttctgccagctcagacaaggtttcactcctgctgcccagcctggagtgcaatcttggcttgctgcaacctccacctcctggactcaagtgattctctgcctcagcctcccaagtagctgggactacaggtaggcaccaccatgcctggctcatttttggttttttgagaaacagtttcaccatgttcctaggctggtctcaaaactcctgggctcaagcagtctgcctgcctcagcctcccagcgtgccaggattacaggcatgagccattcttctgcccaacctgttggctgacaacctttttttttttttttttttttgaaatggagccttgctcttgcccaggctggagcgtactggctcgatttcggctcactgcaacctccacctcctgggtt

SEQ ID NO: 33984 - DNA, 1033 bp, Homo sapiens
ctttgcatttttaaaattatttgtactctttgaatttataactccaaacatgtcatcttattttttaaaaaaaggaatcgtctgtataatggtgttgtagaccattttggttattaattctctttaaatttctgaattgaaaaatgaaatctagtaagtatacttttgaaagcttagctagaaattatttatttttaagattcaattaccaaaacgtgccaaatatacttttttcttttttagtttacaagcctgtatgtaaaatatttgtaagacaactagatataaaaaataccctgggtttgatattttattcatctgaaaatgatgctttcacaagattttttctttcatcattaaagaagtaaatcatttgcattttaaagatatgctcgaatgctgtgggatgcagcttttcccatttatgtaatgtttaattgcatttacttgatcacagcattgaggcaagtttctttaaaataagtttgccttttcataatgcttgcgactatagtttgttaatctcaaagtatcaagaatgcactttgatgaggataaaattatgcaggactatgattcctatgaaagagaactcctgccctactctggccacagaaaagaattacatgtgggcagctgtgagaaaaatgctgttgttatttagttgaattgcaacagctttgcaagtgaggtaaaaaacgtgtagatctacagttatttttctttaacacattttaatatctatgtgcctgtgtgagtgtttttttgttttaacctgggtccctaatgttgcaaaacaatttattcttcacagaggacagctcccaactctttacctctcttcctaatgcaacactcactctcactctcagcagccttataatatctgtaaatgtagaaactatcagttatgaacttctgtaactcccttttcatctttggcacctcaaaactttaatgtatgtaaaagcatgggctttgaaattggtaaactggagctctatcaatctctggctgtgtcaacttgagcatg

SEQ ID NO: 33985 - DNA, 1664 bp, Homo sapiens
ccagcctgggcaacatggcgaaaccctgtctctactgaaaatacaaaaaattaaccaggcgtggtggtacacgcctgtagtcccagctacttgtgaggctgaggcaggagaattgcttgtacccgggaggtgaaggttgcagtgagccgagatggtgccactgcactccagcctgggcaacagagcaaggccctgtttcagaaacaaaaaacaaaccccaaaattagctgagcctggtggcgcacgcctgtagtcccaagtagctgggactatggtgcaggagtttgaagtgggaggatcgcctgagcctgggaagctgaggctgcagtaagctgtgatggcaccactgcactccagccagggtgacagagcaagacccgaccctctctcaaaaaataaaaacaaacaaacaatggttataaatacagtgaaagaaaagaacaagaggtttttgagaaactaaagggagttggaagcatcatctggattggattcgatatgattcctgaggaaatgatatgtaagccaaaatctgaagagttcggggaaaggatatgctaggcagagggaaacgtagggcaaatgtgagaccaaaagaccaattaggtggcctttgtagttgacttagactatacaaggtttatggtagtggagattaggataatataatgaaagatatgttggaagtagattcagtaggtcttgaattcactgggtgtaggggaagaatgaagtgggaaggaatcttacaggtttctggtttgagctcctgaatagatggaagtatcatttcctgagattgagaaaacaaagtttttggtggaaaatggtgcaccagaggttgttttggggtaaaattagttggatatgtcacatgtgcagatgggagtctagacctgagaaaagaggcctgtgttgaagttggtcaactaacagacatttctggaactcccatgagacattgaagagtataggcaaagtccaaagtctctgttcttgaggagcttacatgtaattctaatggtactggcattatttgagaggccttggcacatcacattgagagtctttagcacatgaaattgaaagccctgggagttcattttggagaaaagtagaagaggacagtggaccaatccctgagggcctccaacatttagttcttttataaaagaagaggcccaatagagaggtagcaagaaaacatgaagaggagtatcacaaaagccataagaagaggtgtttttcaagaaattggtttagtaaactggattgagtgcttctgagaagtcccctaagatgagaactgaaaagtgtctattgaatttgacaacatggagatcattggtgaccttagaaagagcagtatcaatggttgcagaagccagattggattgagttgaagaatgaagggtaagtaagaaaggggagatggcaagtttgcctaagtcttccagaagaaagtctgactccctttcagaaagcaaagatagaaataggatgttagctaagaggatctgaagtcaaggagggttgatgtagggaaggagagcttgaaaatacaggagagaggagagatatccaaaggaataaagtccctgagagtccaagtgggaatggactcctggtaattgcaaaagggatcccacattataggaggtggg

SEQ ID NO: 33986 - DNA, 1050 bp, Homo sapiens
ttgtgcttataattatatttctgcaggggctatctgatgggttagagtgcctttgagaagaaatcagtggatactggatttgctcctgtcaatgaagttttaaaggctgtaccaatcctctaatatgaaatgtggaaaagaatgaagagcagcagtaaaagaaatatctagtgaaaaaacaggaagcgtattgaagcttggactagaatttcttcttggtattaaagagacaagtttatcacagaattttttttcctgctggcctattgctataccaatgatgttgagtggcattttctttttagtttttcattaaaatatattccatatctacaactataatatcaaataaagtgattattttttacaaccctcttaacattttttggagatgacatttctgattttcagaaattaacataaaatccagaagcaagattccgtaagctgagaactctggacagttgatcagctttacctatggtgctttgcctttaactagagtgtgtgatggtagattatttcagatatgtatgtaaaactgtttcctgaacaataagatgtatgaacggagcagaaataaatactttttctaattaataccttttatatttgttttttaactgacagtgttaagtttttggtctattaatcattcattcccacccatcttatgactttctttagctacttttggtagcctaagatttcaaaatatggttggcaggatgccttgagagttagcatctttatatccttgtaaatattcaagcacaggctgcatatctatgtcagagttgtcaatgtgaatgtgctagatgagcacatgtagaaacatctctggggccgggcgtggtggctcacacctgtaatcccagcactttgggaggccgaggcgggcggatcatgaggtcaggagatcgagaccatcctggccaacacggtgaaaccctgtctctactaaaaatacgaacaaacaaaaacatctctggaccaatctggtcttaatttcttctatccaggccttttggttctccctggctggccatg

SEQ ID NO: 33987 - DNA, 1030 bp, Homo sapiens
actactcagctgagtccagtcagcctgcaggaccttgggaaataggaataaactgttttcagccactaaatgttcggcttgcttttaatgagcaatcaagaactgggatgaatgtgtggctttaggaccaaacagtggattgaaacttccagggtcttgaagagatgaaaaataaaagccagaaaggcctggagaagacaatgaaagtggagctgttggccgggcacggtggctcacgcctgtaatcccagctctttgggaggccgaggcaggcggatagaggtcaggagatcgagaccatcctggctaacacggtgaaaccccgtctctactaaaaatacaaaaaattagctgggcacggtggcggacgcctgtagtcccggctacttgggaggctgaggcaggagaatggcgtgaacctgggaggcggagcttgcagtgagccgagatcgcgccactgcactccagcctgggcgacagagcgagactccgtctcaaaaaaaaaaaaaaagaaagtggagctgttgatgcttcaagacagtgaggtcaatgaccttagaggctgaagagaagggacctttgttaggtaaaggcgaaatttgctaatgctctaaccatgtgaggcaggggtggtgggagggcatagaaagggcacctaatgaactcattgatccagctagggaggaagtagaaagtgccaagtcaactgtcttgtactgtatattgtgaaatataagaagagacagatgaactaaggtttgttctgtttctaagctgaatttagaggaaacagagcccagaacaatctttccaggcagcaaatgaaagcttgtgtttttaaaacagcttatccaagaaatgctacttatttattattattatttttttttttttttttttttttgagatggagtctcgctctgttacccaggctggagtgcagtggtgtgatctcggcttactgcaacctccgcctcccgggttcaagtgattctcctacctcagcctcccaagtagctgagattacagg

SEQ ID NO: 33988 - DNA, 1033 bp, Homo sapiens
tgtaactgtaaccctgacccagttcggcctcaagaactgtcattgccgctgcggctgctgctcaagcttttggagtttgcttgtagtgtttgaaagggagcagatgtaaacggatttaaacgaacatctttagatctgggtgtttttcctagctccactttcagagatgaaaaaacgtgccagagttggccctgctttgaggcagggccttcatacaggcagcagccaaatgcagcacgaaagccgctttcatattaaggtcgtgggcttttagtaggctgcaaaatgatggatatgcattccctaatgctgagatttggaatgttcgcggataggggccaagggtggaggaattctccttacagacttcttagtatgtcagatgagaaccttggaaagtaattgactgaatttagaaaaatacctctgtcctgtgttggtacgagaaccaaactgcattagtactctccagatgattgacctgttttatctaatttcctaatgaaaatctgctggactttatgaattagtttaatcaacatctaagttttacaactgatgcttttcaaacatgaagtgtatcgtttgtcctgaggatcagaagttgagtgatactttagccttaatattctttggatcagccttacctatcagtattacatgctgtactctcagtagtcattgtttactataatcgcttttggatataaacctgttctgaacaaatgtaaaaatactatttgtgagcagtgtttgttcttgtaaccttaatataagttcttgtttttgtttgtttttaaaatagctttatgaaggaactagaacacgataatttagtaaaagagcccaagtcttttagaacattgtagactcatgtttaccagtgattcaaggattgtgtctttccttgattttctgaatatgcattatcatcttagtgaacagtttttaaagtggcaaatgtttattacagccttataaattttgtgaacactcaagaatgccaggatatgtactcagccaagtgtaatca

SEQ ID NO: 33989 - DNA, 1059 bp, Homo sapiens
gatatgaaatacgtttggcctttgtcctgggttcctgtaacagctcctaaaacccttgtaatttcctgagtgataggagtgtcgcttgctactcataaggagtcttttgatcacatttgagtttgtgctaatgagatgacttaggatgggtctcctagacagcctcaggctggagctggtaaccagaaagaccaagtaattagagagttgggactttgagtccccacccatcatcccctttgaaggggagtggataggctggagatgaagctttataaaaactctggaacagtaagatttggtgaccttctgggttgctgaacatgtggagatgctgggagggtggcggcacctgcccccatcctttgccctgtacatctctttcatttggctgttcatctgtatcctttgtaatatcctttataataaacaataaatttaaatgttttcctgacttccacaagcccttctaccaaagtaattgaacctaaggagggggtagtagaaactccagtttgtaactggttcctcagaagtacagatggcaacctgctacttgtgatacttatgataggcatctgaagtggggagccatcttgtgggactgaacccttaatctgtgggatccgagtctaacttcaggtaggtagtgtcagaattgaattgagttggaggacccccagttggtgtctgttggggaaaaataaaaacaaaaattcacacatctggtcacagaagtggtctgtgcagaatgagagtagagtgaaagaagttttttgttttttattgtttgttttagagacagggtgtcactctgccacccaggctggagtcagtgactccatcatagctaactgcagcctcaacctcctgggctcaagtgatcctcctgcctcagcttcccaagtagctaggactataggcatgcactaccactcctggctaattatttttatttttatttttgtagagactgagtctcaccatgttgcccaggctgttctctaactcctggcctcaagtgatcgtcctggctagacctaccaaagtcttgcgatt

SEQ ID NO: 33990 - DNA, 1037 bp, Homo sapiens
aatatattttgaaagtagaagaagctgccatttattgagcacatacaatatatcagatactttatatctcattaattcacatattaatcttatgacatagatattcttccttttttacagatgagaaaagtgagattgacagaggttaggtaacttgcccaagactacaagttaataagtagcaaagcaaaagattttttaactcagatctctctatcttgtattctttctataaaataaagctgaatttttgttgtcattggctgttgacaaactaactcttggtttacctaagataagtttcttgcttaagtaacagaaaatatcatactggggacatctgaattgtagtttttattgttcctttttcataagtaggagaatggcctcttagtgacttctttgtctttggagagatctgagctatacaacctaattgagtcagggctaccacatatggtggtgcgaattgtcatttgcatgaatggagcttcttcgaattgtgcagtgtatcatctgcatagggtttactgtgggcctgatatgaactactaaagtgattatacttaaaaagagattagcttttttcttccaaattcaaagacaccgttgcttagttgttctcccaagactaagcattttttttctgtttttaggggagacatcaaatttttgtttgggtagcccctaaaattttttttataaactacctacttgaacattttttagattgatatctaaaatttttcatcaaaaatttaaatacttgtagttatgcagtttttaacatatatgctggctgacttttaaaactgagatgttacattattctttcaaatgtaccctttggaatgatacctaccatcgtccttttgcaaaacacacaaataccccttctttaacatttgggaagtttacatttttcatttttctatttgatggcatatcccctttccttaatgtaataataaaatatatgcttacactagaaactcttttatcactctattgtgcttttccatgaccataatatataa

SEQ ID NO: 33991 - DNA, 1050 bp, Homo sapiens
aggatgaagtttaattgaagttggaatgttctatacttaaaaaaaaaaaaaacccatgctatcttgctatcactattctatgaatcagtagaaaactaatcttttcagctcagtatggaattcccttgtaatattttaaaaatacttgaataaacgactcagttttttgtagttaaggatttttcccctaggaattttgtgtgtgtgtgtctgtgtgtgtaagaagttgtaaaccattccaaaaacaatctcttatcaagatcttctagaagagttgcttcatttactaaaagatgaacaaccatatagtatcccatgagctctagattaatgtgaaatgaaatgtctagtgtagtatagttgaaagattctggccctgcagtcagactttggtttctttgtattcattcagtcaacgaattctaatcttataatgaactatgtgttgagagtatttcagtaaccttggacaagttttctttctatttatactacaccaaaattaaagaactacgtgagcatctgtagcagtaatgttaaatgaattgtaggcctactatatgtcaggtactagaatagatctatagaaacctagaaatattattctttcctgaagaaggggagaagatttagaccttcatgtttattggagtgcagtggcatgatcgtggttcactgcagcctggtactactgggctcaagccatcctcccttttcagcctcccaagtagctgggactacaggtgcacaccaccatatccagcttttttttttttttttcttttcataaagatggggtctcactttgttgtccaggctggtatcaaacatctggctacaaacagtccttccaccttggccttccaaagtgttgggataataggcttgagcctttgcacccagcgccattgtttttttttatttcttatgctgataacttgtcatgttaagagaactttctgcctatgtttccatcaccatgaggagggacaagcaggagatctaaggattatgacagcatgttgaaggtcttatccttttaagaagtct

SEQ ID NO: 33992 - DNA, 1015 bp, Homo sapiens
gaatacgagaggaggctcagtgaaccaaacagttcctgctcttaagaaggttggtgggaggtcaggattaataagacaataaataagtaaacaaataaagaattaatttcaggtagttacaagtgctatgaagtaagacaagttgaagtagtttctggggtgaaaatgtggagtaggtggtcagataagcagccttcattgtagaagttaggtttgagttaacatatggaagaaagaaaaagcatggaaggatctgtggttaaagcatttcaggctgagtaaactgatatgcaaagacttaaggcaggaacaagtttgacatgtttgaggaataaagtcccagtgttgtgggaattcagccatgggaagagtaatagggatgagatcgaagagctaaaggaccacagtcagaagcttagattttatccgaggtgcataagagaggtatcagagattttatgtaataggatgacatctaatttacatatttagaaaatcatttggctgctgtgtgaggaatggattagagataggagtatttgaaaagacaaaatggaaacagagagacaaattgaagttctgccctaattcggaaattgatggttgttctttgtgctaaggtagtatcatggaggttgtaaaaagtgaatagataagagataactttttatatgccagtggattggatgtggtgggtgagagaaaggaaggtgtcaagagtaactcctaggtttttggcataacacctgggtagaggttagcgtatttactaagataatgaagacaaaggtctaggaatgggaattgagttggccatgttaaattaaaatacctaatggagatgtcaaacagtatttgatcagtggttgttggtcaagtatggagaaataatgtaccaatgtatacttcaagcaagaatgtatttaattgcccctttctctatattgtgaagtaccccagtaattattttgtataagcaaaaaatttttttataattattggtcatatgtatttc

SEQ ID NO: 33993 - DNA, 1106 bp, Homo sapiens
ccaccacgcccggccaattttaaaaattttttttttttttttaagcaatggggatctttctatcttgcccaggctggtcttaaacttctgggctcaagcagtcctcccaccttagcctcttaaagtgctgagattacaggtgtgagctgccagcccagtaatttttaaaatatatactatttttagaaatatgcacttttattttatttgtataaatttacaggatacaagtgtaattttatgagctagattgcaaagtggtgaaatcagggcttttaaatacgtttagacaaatgcccttttctttcttccagagatgagagtcctgccaaagcagaattttttcagcatttgattgaagaccggacagaggctgcattttcttactatgaatttttgcttcatgttcagcagcagatttgtaagtgaagtagaataaaattgaataagaaaaagatctataacctaggtaaagcataatctgtcagagaagcgcgtgagaaatttgaaatgaaggcatttgttaatacaagatgcaacgcacagcactctgtctgaggctttggtaaaaagtaaaggggaagaaagaacttgacagatctttttcaactcaaattaatggtaacgatgatgctgtttcaccaagtatattttgaattggtttctacacatttccagtagtatggcagtacagtgctctgttcattgcaagctggcaaatttatgtagctatgtggaatgatatgtcataatgtaaaattagataaattcttttttcttataattaatataacatttctggacttgaactctggcaagagatgccaaaaggcattggtaccgtgttatttgtttatatgaattactttttaacaaggaatgtttcttattcattaaatgaattcaacattttctctgtaaaaacaatagagtttcagtacatgaactatagaaaaaaatctatatataatgtacataaatgttacatttgtaaagaaaatgtaaaaatgtaactatagcatatgaattgcttaaactgtgctgcattgttggatgacaactctttttgtcacagttagagaatgaggttgactaatgcatattat

SEQ ID NO: 33994 - DNA, 1051 bp, Homo sapiens
gcctcccaagaagctaggattacaggcgcgccaccaccatgcccggctaatttttgcgtttttagtacaatcagagttttaccgtgttggccagactggtgttgaactcctggctctgcctcccaaagtgccaggattataggtgtcagccactgtgcccgactggggctgcatatttttaatctagtgaaaaagaagctgaggaaaagcaagatatttgcattcaaatatctgagatggtatcatgtgaaagaaggttgtcattctgtgttgcttccaagcaaggaaattactcccaagatagagcagaataggtaggcagagttcagctcagttcaagaaaatttttgtatccattctggctgttccctaatagactgcttcttgaagtgtaggactcccaagtttctaaaataactcaggcagaagctaaagaagcactggaaaaactgccaacacagctagagcctggtgctggagaagccatctatatctatgcaataggagcctgtgaagtgaacacacccgaaccaggaagcaaaatcttttcctccgtcagtggctctctagtgtcctctactgaaaaaacttcagtgccagtcagcaaaggaaaaatatttaaaggtcccagatctattttcacagagcagtcaaaaagggagaatttgagggcatatacaagacgttaataaccatcatatgaggaatgagacagcagctgttgtgcagtacttgaaggtggcagctgcactcatgagcactgccacgctggtcaggccaaggagggatgggagacagagccggactggtcaagcactgataacgaagtgctcattttaaatacagtgttagtgcctagaatagaaatcagggaagcagcacttgttccagggacagagaatccaacccagagatggattgggtaagacagagatccaaaaaaagtatgagacttaacaattgcatgagaagttagactgagtagaaagaaagatgggtagattattgagaagccaaaaagttagcttaaataggagcatttgagacccag

SEQ ID NO: 33995 - DNA, 1038 bp, Homo sapiens
gagactctgattaaacctcactttttttttttttgagacggagtctcgctctgtcaccaggctggagtgcagtggcgtgatctcagttcactgcaacctcctgctcctgggttcaagcgattctcctgcctcagcctcctgagtagctgggactacaggcgcatgccaccacgcccagctaatttttgtatttttagtagagacggggtttcaacatgttggccaagatggtctcaatctcttgaccttgtgatccacgcgcctcggcctcccaaagtgtaaacctcacatttaaagcaaagcaggaccaccacatagcattaggcaggttttgcacttaatctagggtgctacatgtaagacgtggcatttgcattgtggataggtaaatttattatgtttttctggcaaatgaccatgaatgtatcgaggaagggaagccaacttttaaattcactaaaggcacctaaggatcagtgcaaaaatcctgaccactgccatgtagaaaagagctgtgtgttattgccaactttaaatttatccagagaatgagtcaaaataaaaatgatatttaaagtctgactgaaaatagcaattatattagagaagaaataatgaaccaaatccccaaaaatgaacataaaactttttattatttttttattatactttaagttctagggtacatgtgcacaacgtgcagtttgttacataggtattcatgtgccatgttggtttgctacacccattaactcgtcatttacattaggtatttctaatgctatccctccccttgccccccaccccacaacaggccccaaggtgtggtgttccccgccctgtttccacgtgttctcattgttcagttcccaattgtgagtgagaacatgcggtgtttggttttctgtccttgcaatagtttgctcggagtgatggtttccagctgcatccatgtccctgcaaaggacatgaactcatccttttttatggctgcatagtattccatggtgtatatgtgccacattttcttaatccagt

SEQ ID NO: 33996 - DNA, 1049 bp, Homo sapiens
ggggaatgggctttggactttctctctggctgttgtccagtgcttgccctcaattcacttccacttggtcctcttcaacatggaagcttgtttcatcaaagtatgcaagctgatagacaacagagcgaatctagcagacagaagtaattcatttgttatgtaatcatggaagacgcatcccatcattttttccataccatttaatagaagtacatcactgggtcctgcccacattcaagaggaagagattacacttacataagggtcagaataccaggaggcaggatcactgagtgccatattcttaaaaaaattaaagtatttattgagataactgcagactcacaggcagtttgtgagaaataatacagagaaatcaggtatatactctccattttcccccaaaggtaacatttggcaaaactgtggtataatatcacaacccagatattgactgatattgaagttgatataatccaccaatcttatttatattgccccagttttacttgtgcttgtgtgcatgagtttacatctgtatacttttatcatgtgtaggttcatgtatccaccaccacaaccagatattcctaatgttagaggactgtatttgaaagttgcatgcaacagtctacccagtggttcacaatgcaaaataatactggttcataatgcagaaatacattaaccccctcccagtgccccaaaattgtcagcccaaagtccagaacattacagcgtcagctcaaagtccagaattgtgtcatttgaatcagcattgagtacagctccaaatacagagtctctttccatctataaacccatgctgtaggattgagtgaatgtttgtgtcaccataaattcatatgtggaaaccttaagcctcaatggaggcttttggagatgggatccttgagaagtaattaggtcatgaggatagagctctcatggttggattagtgtctttacaagaagaaacagggcagagttgcttcctctttctgcactccgctatgtgaggacatagaataagatagccatttgccaac

SEQ ID NO: 33997 - DNA, 1030 bp, Homo sapiens
aatgatttatgcaaattaatagacccaatttgcctcaactctggcacagatgcttgcacaattggcctgttggctgttataggatcattctaagtgtttattcccttagctcattggtttgacttgtggcactcttcacattttgatagggcaattttttggtaagttctgtttagtgcattgcagaatgtttagtgtctctgaccttgtatactacacgtttttagcacccatcagtcaatgtgacagccaaataaggctccccacacatttccacatttagtgtgtcgggggtgggagggaggaccatggctgggtaactgatgcattgaagtccaaatttcatgtaaaggtggcttagaagtgaaaatgtgtaattatcaaagtgctggttttgaaatgtaagaaatttgaagaccacaattgcaataacattatgtatagtttggggtctaaagtttttcaaagtatcattgtcatgaatcttttcttgtatcattaatattttcttgaaagcaattgtaatgaatgcataatcatcatatgttacagattcataattaacctgtctattattattggacaattgaattgttttcaattttttgctgttataaataatgttacagttaacatctttatagataaaatctaattaggtatttattaaacccacaataagaaatatgcaaaaattttattttctcttttgatctctttttatacctactttaggtaaagatgttctcagagctatttagggaagatcagaataagagtagcttctctttatttcttggaaaggcctgggaagtcttgttttcacatgtaacttcttgtatttgtaggagatgcctttggtccttgcatgcatccatttttgcccacctctgatttcatttgtaactggtggatagtttcttacaaattcagactcaccttccattgctggtgtttcatctcaaacccaagctatacccagtctttctgtattctgctcaatgccttcttcagcagcacaggaactcgg

SEQ ID NO: 33998 - DNA, 1060 bp, Homo sapiens
ggcatttgctccggctgttgaagtgaatgaatctggctgaatgctcctagagttctggaaaagttttaacattctaaatgctatccagaatatcactggagcatggaaagaagtcacacagcaatgcatgaatggcatttggaaaaaagttttgaagacatgtgaacacattcaaaggccttagcaaggttctgctgttgatgaaacagtaacaagatactagtgcttggagaatagctagaattgatgaagaggatatttattaacttcttggcattgaatctgaagagctttccaatgaggagataatcaaactggaggaagaaagaagttgagaaagaggaagaagttatacctgaggcaccaagaaagttaacggcaaagaaactggcagagatatttgccactatcagcagtgccattcagaagttagaagaaagggatgtcattattcacaggagctgacacacagtacaggatgctcttgcttgctacagagaaatatataatgaaaaggagaacaaactgtatagtccaaacctgatgtcggccaggctggtggctcacacctgtaatcccagcattttgggaggccaaggtgggtggatcatttgaggtcaggagttcaagaccagcctagccaacatggtgaacccccgcctctactaaaaatacaaaaattagccaggtgtggtggagcatgcctgtagtctcagctactcaagaggctgaggcaggagaatcatttgaaccggggaggtggaggttgcagtgagctgagatcgcaccactgcactccagcctgggtgaaagagcaagactctgtctcaaaaaacaaaaaatttaaaatttaaaaattaaaaaaacttgatgtcttcctgaagaacactatgcctgctaaaccattaacaagtatcgatgccccagtgccttctcccagctactctcaggcctcatcagaagagaaattaatgaccctgttgcagtagcatccccatcatccagcaattaattttagttcaatgcttcaaacattcttcaggcccagtatgcattcacc

SEQ ID NO: 33999 - DNA, 1075 bp, Homo sapiens
tgaatatattgaatggtatctagaatggtgaaccctttctagaaaggtctcaatgtactttgccaagattcattagaggaatcactatctatggcagttatagccttacaaaatgcagttcttaaagaagacttgaaagtgtaaattactccttgatccatgggcttcaaaatggatgttgtgttaccaggcatgaaaacattaatctccttttacatttccatcagagctcttggatgaacagatacgtgagcagtaatattttgaaaggaatccttttttttttttccccctgagcagtaggtctcaacagtgggcttaaaatagtaaactggcctggcacagggtctcacacctataatcccagcactttgggaggccgagacgggtggatcaccaggtcaggagtctgagactagcctggccaacgtggtaaaatcctgtctctactaaaaatacaaaaattagccaggcatgatggcaggtgcctgtaatccagctactcaggaggctgaggcaggagaatcgcttgaacctgggaggtagaacttgcagggagccgagatcatgccgttgcactacagcctgggcaacaagagtgaaactccatctcaaaaaaagaaaaaaatattcagtaaaccatgctgtaaacagatatgctgtcatctaggctttgtggttgcgtgtatagaacacaggtagagtagctttagtgtaattcttaagggccttaggattttcggaatggttaatgagcattggcttcaccttaaagtcaccagatgcattattagcccctatcagccccaacacagcgttattagcctgtcctttgaagctttgaagccttgaagtcaggtgtcacgtgcgtttgtatgaagagagtccaccaaacaggctttgtgtgagtaacaaggctgtttatttcacctgggtgcaggcgggctgagtcagaaaagggtggtgagattatcgttagttcttataggtttgggataggcggtagaattaggagcagtttgtgggcagggggtggatctcacaaggtacattctcaagggcagggagaatatta

SEQ ID NO: 34000 - DNA, 1081 bp, Homo sapiens
acatatttaataagacatagatggagaaagaaaggccaggaagtagatcaagaagggtctgttgaagagattgcacggaagtcacggaagacaagaaggaaaatgtttcaagagtgaaggagaaatcaacatcaagtgctacttagtgtttagactgactgtgaaatgggacttaactaaaatctaacaactaggtgatcttttgtatactcattagaagacctacagctgtggaaacaaggcagtgtgcttggtacagctgcagagagaatagagaaaagggctaaactgtttagttcataacccccattatttctaagactcccagaattatagttcctttattctggttgcgtacttggtaggcagcaatttactgcactgtttttatctaactttaaaaagtcattgaatttgtagctagcccagaaagagtcttcatttcattaaattcttcggagtatatcttgtatacatgctacaatcctagatgctaaaaatagggccaaagaatcatcaaatttgctgtcattgtgtgctaattatcttgaaggaatgatagaaattaagcaatatgggttttagttgtagcccacttattaaataaatctgctgtatgtcacgtattcaaaaaccacagaaatcatgaggagcctgaaatccacatgaaaagacaaggaaaagtaacagttaaattatatagtgttacataagactcagttaatcataagcaagtagtttggaaatttagggaggagaggatagtgtgggtaggataaggcttaggggcttgaactgaagtttgaaggatggatggcatttggataggaaaagagaaggagcagggtgctccaagtgggagaaatatgagtcaagcatggtgtatctgggcaaaaactagaatggagagttcacttgacaagtgtagaaatttgcttctagagagtgacaacagatgaggcaaagagcctggaatatcaggttgggaaatttggattgttatcccacagccagtgggaaatactacaagttttcgggaggagaagaaccatggttaagtctatgttatagcaagctgatt

SEQ ID NO: 34001 - DNA, 1048 bp, Homo sapiens
atcaccaagtaattcttttcttgatggggaactcaactctattcctgcttgttgcacaaccctcctttagtctctaacaatccagtaatgattctagcttcttggatgaaatctactcacaccccaccccctcacacccctttaggatctagtatgcccatatctggcttatgccctttacagcatgtaggggatgttgaacatgcacatccagtacactcgacagtatttctcagtgtaaaataaaacagtggcattctggttaataagtttagttatctgtctacctcagtgcaaccaatctggggcactgacaacactgaggttctggaaacttgatttccagaaacttgattaaggtggtatcagctgtgaggcttctctatggaccaaaaagctggctcaacttcctctctggatagtcaagtcttgtagtatgcattcttctattggggtagtgtgtgtgtgtgtgtgtgtgtgtgtgtgtgtgtgtgttggaatgaagaatttggacatgttgagtttcaagaaatactggaatagtcatatgagcttacatatggtagatgcttagtaaacgacaatgagttcaatgaaaaaagaagatatggaactggagcttgtgtcatggctgaaaatagtgacaaaagtgctgtgaggatagaatgataattgaagcttgagaaaggcaactatcgaaaaagaagagccccaggccccaggaaggaagaggaggaagttaagctgacaaaaagagggcatggtcagtcatatatttgtcctaaaaatcagtaggaatggtatgaaagccaatgaaggagtttcaaggacagaacactcaatagcaatgacattaaaaccaacgttcagtgctgccttgtgcaattaccagattctttgtgttttaattttctcatttctgtttcacagaagggatgtgaagatgtcacatacagttttaagaacagcaggagctcttcaaataaatgaactaaaatagatctgttatgtttttaaaggggcttaaatatttaattttgagtctact

SEQ ID NO: 34002 - DNA, 1016 bp, Homo sapiens
tgactccagcggggacggcgggccgggcactgcgccagctccttcccacctgccttcttccacggccagcccctcaggtcctcctgcccaggaccaggacatctgcccggccagtgaggatgagagcggacagtggaaaaactttcgactgccggacttcgtcaacccagtccactacgacctgcacgtgaagcccctgttggaggaggacacctacacgggcaccgtgagcatctccatcaacctgagcgctcccacccggtacctgtggctgcacctccgggagaccaggatcacccggctcccggagctgaagaggccctctggggaccaggtgcaagtccggaggtgtttcgagtacaaaaagcaggagtacgtggtggtcgaggcggaggaagagcttacccccagcagtggagatggcctgtatctcctgaccatggagttcgccggctggctgaacggctccctcgtgggattttatagaaccacctacacggagaacggacaagtcaagtaaatattaatttttgctttacctcccttaagctcacatatctgctttccatttcttttcctttccttttcactttccgcttttaattattttgttggtctgatattgatcggctcttggtttcaattctggctgtccatctgggaagccaaaattgttgccctattgtatttccaaaccctgtcataaaacttgaaagtagtgaatgagcttcgtagagtcaaaagtcagtgtaagtcttttattccatcaggagaaatcataatatactgcaccctatcttgaagatttccataaattatctcaggtttgagaactgcctttggtaaatttcactagtgatattcccaggctatgtagcaatatatatacagcaatatatatgaacttttaaagtggtattacactaaatttacgtgaaacatcagtaaatttcagttattattttgtccattttttttttgtccaatgtctcttttttggagaagagagacattga

SEQ ID NO: 34003 - DNA, 1061 bp, Homo sapiens
atgtgccattagggacagggactggggactctggaataacctccactctgtgacagaagacagctgttcacttcccataagggcagttagacacaagcttttaagtttggctttgtgtttatctacttgttgctcaatgggcttggggtggagagagtactagctcataattggatttatttttgctcctccacagagttttagttatggcaccaaaatagctgttaggttgatgcaaaagtaactgtggtttttgacaaataaatatgtgaatgaaatatctgaagcaatctgactcagaattttttaaaaatttgttaagctaaaaattccaggaaaacctttgacaaatatttgatagtcttctagatggaacctcatttttagaaatgtaatagttataattgcatagctgatttttttttcccctaggaatagagacataggggttgtcagaagaggcagcatgcatttcgtttgtttgtttgtttgtttctaaggagcatagtggccaccgatcatgaaccaacagatgccaggaaatcttttccttgttttgatgagcccaacaaaaaggcaacttatacaatatctatcacccatcccaaagaatacggagcactttcaaatatgccagtggcggtaagtattttttaaatgttttgtttatgcagagagtctgttgacaacattaggccagttacctgattttctgtgaaagagaacccattgaattctaaaactaaatgtgcactaatagtttatttagctgagtgaaatacattttggcaatctttttctttgagtcctagaagtctgtaaggtatcacagtccagtaagaaagccagattggtgtttctgtgcaagagacaatgccatagacacacacatcagcttgggctctgcttagctgccaggatccctgagtcgtgacagattacagtaatggcaaactaatggaattacagacttgaaaatatttgagggctactcactatttagttttcaggtgaatataaatccagtttttgttttgtttttttgaaaaagataaagctac

SEQ ID NO: 34004 - DNA, 1026 bp, Homo sapiens
ctgagtataataattgggatactactgatatgtagtaaattgttacttattgtacataatacttttatttcaggaatacttccaaggtcaagtgaagcctattgcagattctctgggatggaatgatgctggagaccatgtcacaaagttattctcactttttaacaactaaaattcatttaacatttgttttttgttttaagacttgttgaaaagtgcttaaggccctggatttgtgtttgtttgttttttaaggttactccgttcctccgtgttagggtttgcgtgcaagatgggagacagagaagccttgaacaatgcttcctcgttatttgagcagtggctaaatgggactgtaaggtgattactcacattgttatgcttagaagacacatttgagaaaagagtagttgaaatctctgaaacactgtttcttcttctagccttcccgtaaatctcaggcttctggtgtatcggtatgggatgcagaactctggcaatgagatttcatggaactacactcttgagcaataccagaaaacttcattagctcaagaaaaagaaaaactgctgtatggattagcatcagtgaagaacgttactcttttgtcaaggtaagttgggcttttatttcacatatataaatagtatttaatagtttatgtgtcacagtctctttaagagtctgattaaagtatgatgttttgtttccaaaaaaatccattaaaagttattttccctgcaagaaacaaaatatccatgtaagactggcctaaacaataaggaaatgtaatctcatatgaacacattctggaggtaggtagcttccagttgtgtgcagcggctcaacattttcacccaggacccaggctcttctctttctgattttcaatgatcgacatgttggatgtctcatgacttccagagcttgaaacattttgtttttacacaaacatgtgtaatggaggtaggacaggagcaaaagagtttcctgacaaggctctgtctcttatgccaacaggacaa

SEQ ID NO: 34005 - DNA, 1060 bp, Homo sapiens
gtagattcttgaaaaagtataaaatgtagaaatgtcttaacctgcagtttgaaatcagaaagaggcttgagcagggtgtggtgggtcatgcctgtaatcccagcactttgggaggctgaggtgggcgggtcacctgaggccaggagttcgagaccagcctggccaacatggcgaaaccccgcctctccaaaaagatacaaaaatcagccgggtatggtggggaatacctgtaatcccagctactcaggaggctgaggtagaagaatcgcttgaacccaggaggcagaggttgcagtgagccaagatcgcaaactgcactccagcctgggcgacagagcaaaactccgtctgcgcccaccaccctcccccgccacaaaaaaagaggcttgagttaggcatattcttgagttcgtggcccacagttatatatcattagttcatgaaaagcccttctcttatttaattatttttccattgcataaccatttctttctctacaataggcagctgttccaatacgtctgttagatattactgaaattgagtgtatctttttgactacctggtggtttcatttgtgtgtctgcaattatgacttataattttaaaaatattgaagcccggtagttaaaatgaaaaatgaatgcaaattttggtatttttctgtttataatcatttcaaagactaagttctagttgatattctcattgtttttatccatcccctcaaaaaaatcttttttcttttattgggtctatgtagtttagtgggaggtaagtataaaacaatgctataatttttcatttactgataagtgacaaacaagttataatgataagttataaattatataatataatataatgctattattagatgaagccttatataggtagtacatttttacatttaatttatatcattttttaacgttttgtaggaaatgaaaactgcaacttcatgtagagtccaataaatagaaaaatatgtccagcctcactataaagaaaagaaatgcaaattaaaacaattaggaatgattttttacctatcaagttg

SEQ ID NO: 34006 - DNA, 2749 bp, Homo sapiens
ctaaaaactcttaataaattaggtattgatgggacgtatctcacaataataagagctatttatgacagacccacagccaatatcatactgaatggacaaaaactggaagcattccctttgaaaactggcgcaggacagggatgccctctctcaccactcctattcaacatactgttggaagttctggccagggcagtcaggcaggagaaagaaataaagggtattcaattaggaaaagaggaagtcaaattgtccctgtttgcagatggcatgattatatatttagaaaactccatcgtctcagtccaaaatctccttaagctgataagcaacttcagcaaagtctcaggatacaaaatcaatgtgcaaaaatcacaagcattcctccacaccaataacagacaaacagagagccaaatcgtgagtgaactcccattcacagttgcttcaaagagaataaaatacctaggaatccaacttaaagggatgtgaaggacctcttcaaggagaactacaaaccactgctcaacgaaataaaagaggacacaaccaaatggaagaacattccatgctcatgggtaggaagaatcaatatcatgaaaatggccatactgcccaaggtaatttatagattcagtgccatccccatcaagctaccaatgactttcttcacagaattggaagacactactttaaagttcatatggaaccaaaaaaagagcccgcattgccaagacaatcctaagccaaaagaacaaagctggaggcatcacactacctgacttcaaactgtattacaaggctacagtaaccaaaacagcatggtactgctacgaaaacagagatagaccaatggaacagaacagagccctcagaaataataccacacatctacaaccatctgatctttgacaaacctgagaaaaacaagcaatggggaaaggatttcctattgaataaatggtgctgggaaaactggctagccatatgtagaaagctgaaactagatcccttccttacaccttgtacaaaaattaattcaaaatggattaaagacttaaatattagacctaaaaccataaaaaccctagaagaaaacctaggtaataccattcagaacataggcatgggcaaggacttcatgactaaaacaccagaagcaatggcaacaaaagccaaaattgacaaatgggatctaattaaactaaagagcttctgcacagcaaaagaaactaccatcagagtgaacaggcaacctacagaatgggagaaaaattttacaatctacccatctgacaaagggctaatatacagaatctacaaagaactcagacaaacttacaagaaaaaaatcaaacaaccccatcaaaaagtgggcaaaggatatgaacagacacttctcaaaagaagacatttatacagccaaaagacacatgaaaaaatgctcaccatcactggtcatcagagaaatgcaaatcaaaaccacaatgagataccatctcacaccagttagaatgacgattattaaaaagttaggaaacaactggtgctggagaggatgtggaaaaataggaacacttttccgctgttggttggattgtaagctagttcaaccattgtggaagacagtgtggcgattcctcaaggatctagaactagaaataccatttgacccagccatcccattactgggtctatacccagaggattataaatcatgctgctataaagacttggtgccaacccaagtgtccatcagtgatagactggattaagaaaatgtggcacatgtacaccatggaatactatgcagccataaaaaatgatgagttcatctcctttgtagggacatggatgaagctggaaaccatcattcggagcaaactgttgcaaggacagaaaaccaaacaccgcatgttctcactcataggtgggaattgaacaatgagaacccttggacacagggtggggaacatcacacactggggcctgttgtggggtggggggaaggggaagggatagcattaggggatatacctaatgtaaatgactagttaatcggtgcagcacaccaacatggcacatgtatacatgtgtaacaaacctacacattttgcacatgtatcctagaacttaaaatataatttttttaaaaaaaggatgagttcatgtcctttgtgaggacatggatgaagctggatatcatcattctgagcaaacgatcgcaaggacagaaaaccaaacactgcatgttctcactcataggtggaaactgaacaatgagaacacttggacacaaggtggggaacatcacacaccgggacctattgtggggtggggaagaggggagggatagcattaggagatacacctaatgtaaatgacaagttaatgggtgcagcacaccaacatggcacatgtatacatatgtaacaaacctgcacgttgtgcacatgtaccctagaacttaaagtataataattttaaaaaataaaataaaatgaaaaaaaagcttctgcacagcaaaagaaacaatcaagtgaagatacaacccatagaatgggagaaaatatttgtaaactaccctgacaagcgattaataaccagaatatataaggagctcaaacaactctataggaaaaatgtctaataattcaattttaacatgggcaaaatatttaaatagacattcctcaaaagaagacatacaggccaggtgccgtggctcacgcctataatcccagcactt

SEQ ID NO: 34007 - DNA, 1024 bp, Homo sapiens
ggaatgaaaaggtatatgttacagtataaaatctatttttatacttgcgtgcatgaataagaggatttgggattatgagtaaatgctaatcttaaaaagaaatagcaacacctctaagaaagagacaacaaaagagtgagaaagatccaaaacaatcctcaggaattggatggacaattatcaagaggtgactgaaagaatttgggagtatggaaggagtgccaggaacattgagacacataattttatagtgaagcatctcagcacaatttttaccaataatacttagcagcctaaaagaaacagggaaattggagactgtaggaagtcagggcatggggagaaaacgtagctatgaattcgtagttgaaatggtagacactatgtattctcaactgcaaggagaaaatagaagccaaaaagactaaatatataactaatccagaggcttttaaaattctgcttctttcttagtatgtattgtcatgtatttgtttatcttccctttctgtatgatactatgtcttacttgtgtttcacaaatgtgagattcctgaccttttataagaaggtaacaaggcatttttcaaaaagcctttttttggagaggttaagtgggatggtagagtggattaagtggaacaaaattccagttttttggcgagaaaatattttttagtctaaaatccctctgagactcactacaaactaatttctttctgtcattcttcttccttcttttggtttctctataactaaatttagtttaaaattaagttatctataaaggcagcctttccatgatcgttggagcacattctgctcatgttagaagttcattgttctttgtttttagttattaagcacatacagtagtccccccttatccacaggggatacattctaagacccccagtggatgcctgaaattgatgatagtactgaaccctatatatactgtttttcctgtgtgtacatacctatgataacatttcatttataagttaaagacacagtaagagat

SEQ ID NO: 34008 - DNA, 1024 bp, Homo sapiens
gaaaagcatggtcaccagatcagcatcataagcatcacctagaaacttcctagaaatgcaaattctcagactccaacttcacccctgacttactgaatcagaaactctagtagtaggcccagcaagctgtgctttaacaagccctccagcggattctaacgcatgctaaagtttaaaaaccactgcactaaaatatcaccaagacaaccactcataggactgggcagaaagaaaaagagatggatggacttactgaaactgagaagcttcaaaaaggcccccatggaactgaaattcagacttttgagaacaggtcactgcttgcctggtactgatttctctgagttcagaggagggagcctatagacctgggaaccaggtatctgaggaagaagcacccagtaattggagctggcatctcaagaaggcacattgagattggttctacaagtgttggaaaacccccaaattgcaatcagctgctactactagcaggcactattgctgtcggagtgaagaattgttgctagagtgagacttaacaggattaagaaacccatccgaaggaaacagcaaattccttcttccttctctacctgtgaagtgtcacgctggtccctctattggcagagcctaacagggagacagaaatgcttgcagaattccaaagagtgggtttgaagccaagagacagtagcttactgtcatggccttaattataatacaagtggaagataatagaaataatactttaggtatgtataattgggtgcatgtagacattttctgggatactaactactgggtagacatttggccttattgtaaaaaaaaaaaatttgtattaaaactatttgtttctcctgatgaaattaataagaggcatttagggcatctatataatgaacaggaaactatgcaagggcctgcgctgaagtctgcttagctgagcctaagacaaagatcacagcagtagtggctgaggattgctcaataataacagcaaacatgctttggtcatctg

SEQ ID NO: 34009 - DNA, 1059 bp, Homo sapiens
tgcatattttttcctagagagacattttcagtgtatttttttttagaaatttataattttatagttctttcataacacttattctgagttttgaaacaatgtatttcctatcttgacatggattttttcacaaaaaatttgtattttactgttgttttcaggaaaaaaatcagatcatttttctttgatatctatatcagaaaggtacaatattaacagtataaaaccaaatgcttaaatttggaacttagccaattttgataatctttttctaaggctaaagtcacatcagtaattggctagccatgttattaaggtgtcttaattcagcattttcaggttttatattgaaatacgcatttctttaaatattctttgaaaatggagaatggctttagtgatattttgggttttgttagagaacctaaaatctttacactttcatctcaaagattataaaggaaaggggggtagttaagatttagaattcaagttaaatttcagaaattggggcagtcaggcatttgtatctttggtagggcaacaagtaaaacatgtagagtgcttgctatcccacttcataaagcttttacccaatcttatttctaaacctctgtgcattcttagtgtcttctcattctgaaacagaaaataaggaaaaacatttaacttagttttctaaaatcagataatcctaaacaaaaatgttagtcagggtcactaaaaagtattgcacatttatataaatacagtccttttaaaatttgacttttaaaaaacaaaagactttgtacgatattgtgtttttattgcttttgcaatatttttatagtagcctttatgaactcagtataagtgcaagttgtttgaaaaggtgtttttattagtgcacaatagaattgtgaggttttcaatagatgtcatgagattttgtatatctacataaaatatcagtacatttttttctaatgctactggaaattttacttttcctttgcaacacataaatgatatgatgtacaaaataacagctctggttccaccagtacctaatgttga

SEQ ID NO: 34010 - DNA, 1078 bp, Homo sapiens
cctggtctgggagatagattctcgagatgactaatttcaatatgaggtagggaaagcaattaaatagtgattatagaacattctagggaaccttagagaagaggctgtttgcccaaaacaaaatccaagaagacatttttaaggggataacacctggtgttgattgttgaaaggttggttaatgctaactatccaggcagagcaggaggacattagaaatttcataagcaaagtgagagaattgattgtaaaggggcacaaggaaagtatgtgaggtgatggaagtgttatgtatcttgcttccagtggaagttacatgagtgtatacaattatcaaaacaactttatgaactgaacacttaaaatctatatttcattttatttaagttatacttcaaagaaaaaattttaaagccctaatatataactagggctagcagaagttagagctgaagggacagaagtaggagataatacctataaatggctagttaaccatgatagttaccaagatcacctaactgaggtgggggtttggggagaggtggagcatggtgagagagcaaggatctgaggattgactaggcggacactagaagaggattctgaagatgaccaagaagtagtaggcaaaaagaagaaccaggagagcttgggaagccgagggaggggagacagacagacagatgggaatggttaacactgtcccatgaaactgaggtagtaagataaggacttaaaattgtgtattgtatttggcaacatagaagccattgattacctttgctagagttattggagttatgggagcagaggtagactgcagcgagttgacaagtgaatgggaggtaaggacatgaaggcaagagaagaacagtagttaagaacaagagctacactacctggggttcagattctggctttgccacatactatatgacttacttagccatactcttaatctgtcttcgtttcacttccctcatatgtataatccttatatctaccttagagggttgttgtgaggattacaatttgctaatatatgtgaagcattgagaagagagccaggcacata

SEQ ID NO: 34011 - DNA, 1049 bp, Homo sapiens
cctagtaaatgctggaaaagtacatgttatcattagagtgattgtcattctctgggaaatgaaattatgtgggtaggaaaagactttggcagacatactaacttggctatatgagactaacagcagttgaaatcctccatccattctgttttatttatgagtcttcaggaatttcatcttatcggataatcgatgcatcaaaactgccctttggtgactgttaatatttatttttatctgaggcatacttcagggttagaacccaacaatttcccttaagaaggcctccatgggactgggtctttaagttaattcacacatcaagtctgatagttaaataaaaactacattgctaaatttgggagtttttaaatatagctttattatctgttctgagatttttgaaaactctgttcaaatcataggaatgaatagaatgcttccaatgagagaacgttccaaaacagaggaagacattctacgggcagcacttaagtatagcaacaagaagactggaagtaatcctacatcagcctctgatgattccaatgggctggagtgggaaaatgattttgttagtgccgaaatggatgataatggaaattccgagtattctggatttgtaaatcctgtattagaactgtctgattctggcataaggcattctgacacagatcaacagactcgatagggtaaaattgtgtgaccttgtttatcagttatgaccaaatgttaaaaaccaactagaatgtataagtgattgtgcttagcctttttgtaagggagatgtgtaagaaaccatgttgtaaatgcttattttattacaaaggagtagggatgataggatctgaattgatacagaattaagtgcaatttcatcatctgccttctgcttttcaagaccaatttaatggtcctgtcatgttactgattaaatttactttgtcttgtctttatagcatttctgtttactatggtagatttccactttcaatttttaaaattaattttactttgaatgatttatgaagcctatttcattgtctaac

SEQ ID NO: 34012 - DNA, 1016 bp, Homo sapiens
catgcctgtaatcccagctactcagaggctgaggcacaagaatcgcttgaacccaggaggcagagggttgcagtgagccgagattgcaccactccactccagcctgggtgacagagtgatactcggtctcaaaaagaaaaagaaaagaaaatttgttttataataattattcatgtacatatgaattaaataggctctgtgggcttgcttatgaatctaaccaagggttaattgaattccaacatagataatttaaattgagcttgcagagtacaattgtgtattatatgccctgtatatttatctagtttaccttttagtatatttgcatcttatccttctaattatattgtaaattccttgacagtaaagatcatcgctcatatttctttacctttctccacatcttctagcttggggattctgactagttggctagtgggttataatagcagtggcaaccagtagacaatggaatatctctggagtcattttattttccttgacatattccctaataggggtactaattgtccagtgaaaaagactcaaacacagatgctaaaagaaatggagctttgaataatccactggtttggttactttttataatagctgatttgtcaattatcccataactaagccactcaactaaattctaagttaccaatagaactgaagaatttgtatatcaaaatcacatacagcatgtataaacacatgaccccttagctgtgagtgtgcacatgtgccttaaagtgtatcactctaacttttttgggtatttattccagaattatctgtttttatggtctgattgcttttcctggaccctttctatttgatttttaaggaaaaaaaaaatacaggggagggatgttaaaagagaaaaagtaattcattgattaccaaacatactggggaattcccattgtttaaatgtaaaaacaatatacagctcacagaatgccacagttcaggggaggaaaaactgatatgtgttgagattgaaaatg

SEQ ID NO: 34013 - DNA, 1026 bp, Homo sapiens
aactactttcttcctttttttttttttttcttttgagatggagtcttgctctgtcgctcaggctggagtgcagtggcgtgatcttggttcactgcaggctccacctcccaggttcatgccattctcctgcctcagcctcccaatagctgtgactacaggcgccagccaccacacccggctaattttttgtatttttagtaaagaccgggtttctccgtagccaggatggtctcaatctcctgacttcatggtccacctgcattggcctcccaaagtgctgggattacaggcgtgagccaccacgcctggcctactttcttttttaattttattttaattgacagattaaattatatatctttatggtcatacattatagaatggttaaatcaaactaattaacattatctcacataccattatttgtggtgagaacacttaaaatctactctcttagcaatttgcaggtatataatatattgtttttaactatcatcaccgtgacatcccatagatctcttgaactttttcctcctgtctaactgaaattttgtatcctttgaccaacaccctccctaattccccccatcctgcagtctctggtaaccacaaccctactctctgcttctatgagttcaacaaaagaccactttctaccttaagggaatgatacagcactaagaaaacataagcctttagacaaaaggatgatgtgctactaaaattatatgatattgtggttttatttctttgtgcacgagctcttcctatttctttattacacctctctttctcgatgtagttctacaaaagaatgctaggaaacagaactcccttcttgctttaattttggacttgaagaaaaatgagtctccaacttatctgcagctcacgccaagcaaagtttgttcttaatcttctaaaccaccaaatgtatattttaatctcaatgctaacctcccattttagccaatgtctccctctgtcaaggaatgatgggaatgagatatcatttcttcattgctt

SEQ ID NO: 34014 - DNA, 1036 bp, Homo sapiens
ttacaactatttttcagaagggtttgaatctgcattttctattggtaaaaatgaaagaaaggccaatgaaatgtttacaggccctgggcataaaccttaagaaaggtcagctttttcttctcacctccttatcacatttagtgggtggacaaatatggagcatgctatgtttggtcttccattgacttgagtccaccagtttgatctgtaccactttcactctgcttttactattgatggataactatgcaggcgtcaatcacttttcgtgtgtttattctgctaattcctcatctcaggacttccccacctcccttccatatttccctgccttttaccaatctcccaatttgttatgcagcaataatttccctttacactgctcctgccaattgcagtgccagatggcttcagttctgagccccttcacccagcccctccttgagaacagctgccattgtcattgctgtgaacacatcacagctttgaacccatagctgggacctaaacttgatgctcagcatcgggaggggctggcgctaatgcaaggaaccatgaaaacagcacacacttttccttgctgctgtttagcaagagcccttagaaaaggctcttcagcattttttcaatcatctgtgtatcgaaatctcattgtggagtttaattcctttaccacctgactcagcttcctagccatgaagttccctttgtgccttaaacacaattagaaccccgttatttcccatcctgaaaacagatgtgaaaaaacaactgcgtgtgtgtctatgcgtgtgtctgtgtacatgtgtttgtgagcctctctcttcagaaatccagcacattctctcatccatatccacatatttttatgtaaacatgatcacataacaggaaaaatacaatttggttgctatttggacaatcttcccctaagccagctccgaggaaaaataaaggattagaatccctgtaagtttttgatcttgagctatactatgttcatcccaacactaaaactgttactgtgacactacct

SEQ ID NO: 34015 - DNA, 1044 bp, Homo sapiens
ggcggctattgtgttcttggtggaccggttcctgtatgggctcgacgtctctggaaaacttctgcaggtcgccaaaggtctccacaagttgcagccagccacgccaattgccccgcaggtggttattcgccaagcccgaatctccgtgaactcaggtatgctccctcctgctggccgcccccgcgtcctcagtgtcttctggtccccttccctcccgagctacttgacctctgtgggacacccggagcacccgggccctgcgtgccatctttccgagcccggggctcccctcccccgcccctgtgcccttccacccgcctctttgccagcacaaaggccctggcataaagggtttcagagccaaaagcagtagagaaaattgtgaaagggtgtggaaaatactaattggagcttttgtcttctaacaaatctgtcctgctgctttcaaacaggggtatctgaattgctatacttctgaccaagagtctttaaaaagcagattagaattctactattttctcttcgctctcctgtctcctttctgtaggaccacttgactaagctgacaatagagctgacaaacccactgaagtaatttgagggttttttttcatcattcagaacaccggtacagtacctgattaggtcttaaagtatctttttttttcctgtcactttgaatgaaatgaaaaaggaggctgacattctaacttaagatgtggtgtggaagagggctggggggaggggggcctgctatgcgttactgcaaagtccacttccatagaattcttgaattatttaaattgctgatagccattagatttagaaacgtgtagcctgttattcctgtttccaagactgaaaaagtaaaggatgaaaagagaaggcaagttacccctcccagaaatgggactggttcattttctgattggttttagctgttgctattattttaataactctggtctttaagaggttaaaatctctttacttcatttcctttgaaaaggaactgtactaactatgctaaataggacaattgct

SEQ ID NO: 34016 - DNA, 1034 bp, Homo sapiens
ctcctttaatgttttaaaataactgcaactgtcatttcacagttattatagaagctaatacacaattgtatcacattatctactgtagttaaattataattatcttgtgtattatttatctattgctgcatgacaaattaaccccaaaacatagaggattaaaacaacatttattaattcttacagtttctatagatcagaaaagggtggggaggggtggcttaactgggtagttctgactcagtctctcttaagctgacagtcaggatgtcagctgcagctccagtcctctgaaggcttccccaggactggggaatctgctcccaagctctctcatatagctgttggcaaggagacctcttccttgttggctgtgggtcagaggcttctgttcctcaccatgtggcctgtccatagaacaacatggcagtgggaaaaatcgaagggagagagaggtggaagccacaatgtcttttacaacctaatcttgcctccgaagtaacatatcatcacatttgtactcttttggtcactggtcacacagaccaacccttgtacaatgtgggagggcaccttggaaattcatgcccaaaagggcatgaataccagcaggtggggatcaccgagggcaccttggagatggctctgtctatctcaccagcctgactgaactcggccttgtgcctcttgctactccctagccctggcttattatagttttgcataataatatgaaataccaataagaattgtttgcatcttaaatgatcaataagggctgattagcttactaactcttgctacataggatgagaggcataagaaaagaatgtctgagctctccaggcttcagaaaaccattctacaacaaggaagggtgtgggcagataagtggatggatggaagaattaaaagttggaaagaaaaaaaaaatggcattttctcagtccttcctctaatttatcaagaaacttattttgcttccttttgtttaaacttttctgatttttctccctccattctttaatatttat

SEQ ID NO: 34017 - DNA, 1047 bp, Homo sapiens
gtggcaatgttgtttatataagtataccacattataagtctactggagatccaaagggatttgcgtttgtggaatttgaaacaaaagaacaagcagcaaaagcaattgaggtaagtccagatcctaaaaaaaaaaaaagaaagaaaagaaaacaagtattaaaatagtaacttttgcaatcatttcagtttcttaacaacccaccagaagaagcaccaagaaaacctggcatatttcctaaaacagtgaaaaataagcccattccagccttaagagttgtgggtgagtatttttcaatatttaaataggtgtagttgaagtaagatgaactaataatgatggcacttttacagaagagaagaaaaagaaaaagaagaagaaaggccgaatgaaaaaggaagacaatatccaagccaaagaagaaaacatggacacaagcaacaccagcatcagtaaaatgaaaagatccagacccacatctgagggctctgacattgagtccactgaaccccaaaagcagtgctcaaagaaaaagaaaaaacgggacagagttgaagcatctagcttacctgaagtcagaacagggaagaggaagagaagcagctctgaagatgcagaatccctagctccccgatcaaaagtaaagaaaattattcagaaagacatcattaaggaagcatcagaagcttccaaggaaaatagaggtaaaactacaaggttttaattagataaaactaattaattttaattaattagtttttaattaattaggttttaattggcttctgtttcacccatttcacagccccatgtcttaacggagagcttttttatttatttcaagatatagaaatctctactgaagaggaaaaggatactggagatctaaaagatagctctctcttgaaaacaaaaaggaaacataagaaaaaacataaagagagacataaaatgggagaagaagttataccattaagagtgctatcaaagtaagtctgtggtttaaattctgtcattggcttaacaatccatcaccattgctaaagt

SEQ ID NO: 34018 - DNA, 1059 bp, Homo sapiens
aaaaaaactaacttaaaaagcaagtgtttttcatcaaccttcttctaccattgcccagaatttatcgtgatttgtggggaggtgtgaattttgtttccttgaaaggagactgaacttgctgtggtggggaagcctcctgtgcttcccaaggattctttcagggatatgaggtgttaatttcaaagccagtttgagattattcaaatgttaaaatcactaatccagaactggtaactgaagtgaagtcactttgttaaataatacccttctaattggtgtgaaatttcatttagattttatatatttttaaaactaggaataaaccttttatttttcattttaaaaatttagagctcatctttgactaggaagttcttaaattgagttggaacacaactcagttatgacgtcaggattgtcgttaacgcaatttgttaagtagctatggaagtagccagttgactcttgtcgtgaaatgaaacggaggttaacacagaaagtaagtgctgtgcaaagcttgttggaaaaaaggagtagaccataattagtttagccaacttgtttgctagttaattcagctaatgatttttgagtgccttgtgttaggcaccattcttggaacctggggtaaagccatgaatcacaaagtcccctactttcatgaagctaacagataaacaatatagtttaggtgatgaccagtgctagacagaaaaataaagtgtattgcaggagagcattgtaacagctgaggttgtctggaaaactctctgcaaaggttatgttacagccaagacccataaggaagtgagcgagtaagccccagtaaagtttagaagtatagcttttcaggcagaagcaaagaaaatgcagagaccggaagggaagactgtcagggactagaagaccagtgtagttggagtactaggagcatcttagtaagtaatggaaattgcttagaaaaaaaactagtagaacatcagtgaatctgccaaaaggttacataaataccttactgacctgacagcccaatatttctacaatagtgttgtatttggc

SEQ ID NO: 34019 - DNA, 1088 bp, Homo sapiens
agctccgcctcccgggttcacgccattcccctgcctcagcctcccaagtggctaggactacaggcgcctgccaccatgcccagctaattttttgtatatttagtagagatggggtttcaccgtgttagccaggatggtctcgatcttctgacctcatgatccgcccaccttggcctcccaaagtgctgggattacaggcatgagccactgcgcccggccaagatgttatatttttaatttttattttataaaaagtatttgagttacagcacaggaaaatttattttagacagtgaagggatgacagtcacaggcaataaataaatatagttatgtattgacattattaatttaggtttttaaattttgttttttaatagacatatagtaaaattcactttttatatagtttaatgagtactgacaaatacttaagagtcgtgtaaccatcaccacaatctaggtagagaatagttctatctccctgaaaatttccctcatgctaatcctactgtagtcaaacaaaggcttctcctaccttcaattcctgatagccactgatctgttctctgtccatatagttttgcctttccaagaatgtcagataaatgaaattacctagaataaaaccatttaaaattgatttttttcaatcagcatagtgcctgtaaacaggtccctctaagtgtcttgcatgtgtaaacattttgttcctttttattgctgagtagtattccatcgtatgggtgcaccactgcccggccattcaccagatgaagaacatttgggttgtttccaggttggggcagtgatgaatgaagttgctatataaaacactttggaaggccgaggtgggcagatcaccggaggtcgggcattcgagagcagcctgaccaacatggagaaaccctgtctctactaaaaatacaaaattagctgggcgtggtggcgcatgcctgtaatcctagctactcgggaagcagaggcaggagaatcgcttgaaccctggaggcggaggttgcggtgagctgagatcgcgccattgcactttagcctgggcaataagagtgaaacaccgtctcaaaaac

SEQ ID NO: 34020 - DNA, 1031 bp, Homo sapiens
catagaggggaggggggctgaaaattgagtcagtctccaatggccaaagatttaatcaaccatacctctgtaatgggacctccataaaaagaaaccattaacaataggattcagagagcttccaagttggtgaatgtatccacatgttgggaccacatcaaacaccacggggacagaagctcctgcactctggacacttggagacctcaccttacatgccttttcatctggctgttcatttgtgtactttataatattctttataacaaactggtaataataagtaaagtgtttccctgagttctgtgagctattataacaaattatcaaacctaaggacggagtcagtcgtgggaacccccaatttgtagccaagctggacaaaagtgtgggtaacctgggtacccactacttgtgatttttatttgaagttgggggcagtcttgtggaactgagcccttaacctgtggtgtctgcgttaactctgggtagtcagtgtcagaattgaattaaattgtagggcacttggtgtctgcagaaaattgggaaatttcttgatgtgaaaaacccacatatctggtgtcagagatgttctgtttcagtagaaacagtagtagacttgaacagttttactctttatatagcttatttccaatagagaacaaatggaaacaagtgctcttggaatctcatattgaattccacagtcacaagcatcctggtcaactcaggggaaaatatcacacacttggtacaaagcaaatagatgagttaaatattatatattaaatgacaaatttattatgatattagtaatttataattattagattgaattatttccataaaaatatgcaaatactattatattgattacaatatcaaataatgatattatagccttaattaacatataagaaaatggcacaattcactttaaatataagggacaaagacaaaataatgaaaaccaagggtttgcatattttgtgattattttataggaaacagctaattattaaactaaggaa

SEQ ID NO: 34021 - DNA, 1031 bp, Homo sapiens
ctggtactgtgagaatgagaggaggttaaatccacatgacttagtgactaaatggctgtctgaatgaggaagaggtagtatgctaagaaggcattaagggttctagcttaagggagtgtgatagatgattgaccaacattggaactgcaggaggaagattggctttaggaggaaaacattataatgagttcatagtggatatgtagtttcagggtttggctgaggactggtagtccagaggtgggagctggggtgaagaaagggaatgggagaaacactgttccagagagagagctcagtgtgggaggaatggagtagaatgggagggagggtggtatgatttaatttgggttatttaaatctttgtatttttttcttttgactgggtgttacagaattaagttgaggacatatatagtcagaccacaaaacagtttagtttattatttctaaacattaagctccaatgacacaatgcaatattagcatcctaatattctttctctcgatgtagaccttggaaagagaaattgcactgttaataggagtattttttgttgtttttgtgacaattaaatgcttggagctagggctatgtatttacagaaggactcacctctggccttgtgcagtttatgattcctggtgggtggcactgcctgctgggatcacctcgacagcagcactgctggcccagagctgtgttcttctgtaatctctcactgtccaccagtctgctcatactgaagtgttgccaacacttctgctctattgtctttgttcgttgtccacatctgctgaaacaactttcagttatgctaaattgcctgcctgggcagcctaatctatagctattgattatggtagtacactgacaacaggttgcataggtttttgagaggtaaatttatttctcttccctgcacctcctcaattggccctatatttttagagcacaattttgtagaatacagtctttttccccctgaatgtatatatcaagttatagcagaaatacctgtaatgatagt

SEQ ID NO: 34022 - DNA, 1051 bp, Homo sapiens
tttaaagatgttatagcattaacaattttttaattataagaaatgtaatatactataagacttttctttctgtagtctaggcaattatcattggtatcatttgggaatgaaaaggtaaatagattgtctcttcctcaagatattcattgctggaaaaagggaggtggaggaaagaaatctgaatacaatagacataataaacacattgggatttgttcaccaaagtcatctattttctctaagggcttatgaatttgttttctgtgatcagaacattatcttcataattacttataaaattgattgctataaggttgtcaataaagttatttgattctaaataattcaaatagattgcatccatgtggagaattctccagattctacatttaaatcaaggggaaggagggaagaaggaaatattagacttaaatgatagaatgtaaaaattcttagtctatttatatcgcacacatgatttggggaaatctgcttgtatttttaagtcgtgaatctcatctagaagaatccgtttcttttctagaaggaatctacgaaatattgtgaaaatcatctcatttggttacagaggaaacaattacatggtgaactattagatgagttgtatgacaccattaacattgacaatcatgcaaatatccatgatgtttcaggtgcaataaataacatatggtgcctttgtactagattagtaatttaatccaagaacagaagatatgccagaatgccaaaagaggagaaatcaacttagctttttaataaaattgcaatttttaaagcatttctcattttgcttagaaatttcctcaaggccttacaaaattcaggtcatgtactattgaagataagataaaaggagtggggaataacttaaaattttatcctctttgaatgataattatttaacatacattttctatacttcatggctattcttttgagtgctaaaggagaaatagacaattttattaatgttggtaatgagataacattaatcagcttaggctattttctttttgtttttgttttg

SEQ ID NO: 34023 - DNA, 1050 bp, Homo sapiens
gatggaaccccgtctctattaaaaatacaaaaaaattagccgggcgtggtggcacaagcccgtaatcccagctacccgggaggctgaggtagaagaatcacttgaacccagaggaggatggcgccactgcactccagcctaggtgacagagcaagactctgtctcaaaaagaaaagaaaagaaaagaaaaaaatagtgaactaaaatctgatttttcccttatttgcttacttttctttctgtgatctgaggaaaacaaaaggacccagcccatgtggcttcatattgggaagaagaggcacccactgtttcctaaaatttagagctagaaggggttggaaagagccgatcctacccctgtttttttagaatcaaattcctgtatcacagttgaaatgattgtcaaaggtaagagcataatgtttgtctgttgggggaaaagtctgttggggatacctgaaggaatacatgaatttgaagatgggaattctatttttggaaagcttaatgcagcaaaggctgatataatagcaagtgacggctgcctctggggctgagtccccatgactactgctttctcctgaataattactggaaaatacatctaaactaaagtttatgactaaatttagggcctatatgttctgattttccccagataataaggctatgagttctactgaattgaactgagttacagaaattagattttcatgcctttcctagttgttactgttctttatacagcttacatattttttagagcagggatcttcttaacttcaagatcctcagggactcaaagttcatgatgggagctcagcaaatgtactgggatagacagataaacggtatttgtgtacgtcaaacttgatctaaagaccactttaccaagaacatgaggcccaacagaaaaataagactttaaatagatgtttttaaaggataagttccaaagaaaaatataaaatggggtctattttaaattttaaagactggtagcaagatagtatgaattattttttcatttggccaggtgcagtggctcat

SEQ ID NO: 34024 - DNA, 1070 bp, Homo sapiens
aggttatgaaagcacccgaaagaacataagtgggaaagtgacatcaacaagttttcatttagtgaaaaaaaaagatgatcaagtcaccttcccagatttgccgcacccactctcactctgaaagtaagctatttgacagtagcggggagacgtggcggaaacatccaagtccggacactagttttctttgatcgccctcaccatggctgctgcatttgttgtctgagtgaatattatttttcctgtttgaagaatagagaggggaatgatgccacactctaacaaataaaactaaaaagcatggcagtaatattaattatgtgatctactgtcttcttaagtgttttgaatgttatttggcatatcaacagaatgaatagttttggattgcaaatgattttttgtatcctttaattttcatgctgtttgctttctgtttttgaaaatttgttgaagattgtccttgacagtttgtttttctaaattcccacttgtttgtttgcttggctgttgtttatttggctacttcttgaacgtggaattcatgtttgcatatgattatatctgcataattatttgagtttatatatagctaatcaggggtggtaatatgctctgctttaattgacccctgattacttctgctttctatggaatttctattttctttcactttttagttaataaagagttatttatcattttccacatggaaatacccttttaggcctgagtaaagtagaccttttctcagcttagaagaaatctcttagtatactggaatatgcatactaatattgtcttccagctttagctccatattgacaattggcaatagcatcttttgtattagatggatttataggtgatagtgaagacttgtagcagttatatggagcagggtatagcattaaagcaatttattattttataatttgtaactccattagcgttactcagcttttatctctttatcacagttatttttatttataaatgttaactattttttaatgtatgtaaaaacaagcattattttaaattaaaaactatggaaactcactcgttga

SEQ ID NO: 34025 - DNA, 1022 bp, Homo sapiens
tcctgtgtttaaatgtttgttatcatggctgctaagaaaagtttattactttttcattgtcaaatgtcaaatagcatgatcttctgtggatactacttagaatttataataattaggctttaattcatttgtctttgaatatgtttttctgggaactgacaactgacaggtaccagatggaataaaactctggtctgaaagaagtttctgatgctggtaaccagctccagtgctgtttagcattatggcctcgaacaactgactaacatctttggacctatttcctgagttgttaaatgaagaagtagaactggataacttctaaagttccttttgattcaaatattgtaattcttgaaattgtagggctactctaactcgtcttaggtgtgcccacatacaccagtttctagaacctttggtttcctttcactgcagatttagagaggggagactggctctttctttaagagtttttaggacagaaagcattttttgagtatatctgtattgagctgcactttacttttcctcacactaacctctctaattttcttaagtggttgttcaattctccttttcatgtagcccaagggtcctatatatggctcatggtgttgcattcaatctgtgactgggtttttttactatccacatgggccgcatttaacaaaataattgacaaggaatatttaccaacgatgaaatcctgttcatctgatttagcccaactaggctgaatgttgagaaacttttaccttcagcaatgttctcaagactgtagaaaaatgatacaaagaagtaaaagacaggggatttgatttaaagatactacagtgcatattcaataatgtagttctgctaggaaatatttgtgatagtagcatagactgtttagccttgtgtgacagagtcaaagatggggtaagtcagttattttgagcaaagatttcatatagagcttatttgaatatgaaaaggaaggtcctagaagcttgatgtaataatcagtgtagacaatt

SEQ ID NO: 34026 - DNA, 1063 bp, Homo sapiens
tccatgatttacactactatacttctcttattggcttgaaaatgattgacatcttattaattcattaagtaaatatctgttctaaaaagggattacaatgagaaaggcaaattgccttcagaattatgaacaagtgaagaaatgaaaagatctttatggcagggaagctcctgaacttgttggcttgttgtgaccaatcttcatccattttgaggattcattgtgttattgtgttcatgggcagcactgcattaatctttcttctgtgcttctgttgtggccagcataggcactagccagctggccaggcttagtttttcctaagaaatcttctatttcttgacctcagatgactggtctctaggtgaattcagagataaatgaggtctggattacaatgagtgattgttcttgcatccagagtcaggcgcctccatggtagttctcactctcacaatctgcactgaagactcagccttagttctctctctctctgaggaccacaatcctaatgacgcccctctctgcatgaggacaggcatggtgacttgttctgtcttcttcctagaaagtagtagcctatacagatgttgaaagaaaaattatcctatgcccaggttacgagtagacattacccagttaggagactgtgataggatctgtgattcataaagtacagtctctttgagtgattgtcttgtcacttgtgaaataatgaactttttgcttccaatgtcacataatggagttggtgaatagggtgtgctgaaagggtagaggaatggaaggaggaagatctgatcagaaatgaaagctccctttttttttttaacagccattttcctgctcattgaatatgtttaggctgtgtctggtggctcacgtctgtaagcccagcactttttgggggctgaggcgggcagattgtttgagccaaggagtttcagactagcctgggcaacatggtgagacccagtctctaaaaaaaatacaaaaattagccaggtttggtgtgcacacacacctgtagtcccagctacttgggaggctgaggtgggaggat

SEQ ID NO: 34027 - DNA, 1050 bp, Homo sapiens
attagcattcgtaacaattaaaaagtttcacatggcatgcacacaacacaaaagacaaattttatagtggagaaataatttgcaaaaagggttactattctcaatatataatgagatatcattaagaaaaatataaatatgagaaaaatgaaggaatttagaagtaggcaactcaaaagagaagaaatgcagttgatcaataaacataattagatgttcagtcttgcaaataattcacttttttggtctgcttggaatgctttccccttttcttcacaatttttgtaaacctgattccttttcacaagggtcttcagtctaatgtccctcatctctgtaactccatgcttcacttcttacctgcctctctctatttgaatataagctttttgaggtcagatacctaatctatgccttttttcccccagtgcctatttagtgcttggccatagtagactctcaaatgtttgttgagtaaatgtgtaaataaatgaaggaactgatagaacgtaaatggaaacaattacatacagtattttcctattgtattaagaaaggttaaaaagtaaggctgggtgcggtggctcacgcccgtaatcccagcactttgggaggctgaggtgggcggatcatgaggtcaggagatcgagaccatcctggctaacacagtgaaaccctgtctctactaaaaatacaaaaaattagcctggcatggtggcatgcacctgtagccccagctactcaggaggctgaggcaggagaatcacttgaacctgggaggtggaggttgcagtgagccgagatcatgccactgcactccagcctgggtgacagagcgagactctgtctcaaaaagaaaaaaaaaaaaaagaaaaaaagaaaggttaaaaaataaaaatacctagcatgagtgaaataacgtattatcattcttggaggtaaaaattagcacagtatttcggtaggaaaatttggcaagttgaatcaaattttaaaatgtgtgcctcggccgggcgcggtggctcacgcctgtaatcccagcactttggg

SEQ ID NO: 34028 - DNA, 1031 bp, Homo sapiens
acctatcaaccaatcatctaggttttaagccctgcatgcattaggtatttgtcctaatgctctccctccctttgcccctcacccctcaacaggccccggtgtgtgatgttcccttccctgtgtccatgtgatcactgcaattactactgttattatgtaaaattttctgtgcttcttagacatctacgtttggatgtcaggtagactgaagtttagaggagaccctgggcctggtggtaagtgtttgggagttgtcagtgtacaggtgttatgttaagctgcgggagggcctgggtgagaaggtttaagaggtgcccacgtacacgggacgttacatatagcaaatatggggtgtgatagtaatctaacacccttccacaaatataatttcctcaacaagactttttccagaaaaagaagtcattatttgaaaaagacacatgcacacacatgtttatagcagcacaatttgcaactgcaaagatatggaaccaacttgagtgtccattgaccaacgagtggataaagaaaacatggtatatatataccatggaatactactcagccataaaaataaatgaaacaatgtcttttgcagcaacttggatggagctggaggccattattctaagtgaagccattcaggaatggaaaaccaaatagtgtatgttctcacttatgagtgggagctaagctatgaggatgcaaaggcataagagtgacataatgggctttaggggcttgaggggtaaggctgggaggggagcgagggataaaagactacttactgggaacagtgtacactgcttgggtgataggtgctttcaaaatctcagaaatcaccaccaaagaacttatctgtgtaaccaaaacccacctgtactccaaaaactattgaaataaatcatttgcattgtaaaaaaaaaaaaaaaagactttttccagggaaagtaaccttaacctcagagattgaaatgcatgtctttcatgattttattttgaaaattaagaagatgcagtttaattttcac

SEQ ID NO: 34029 - DNA, 1676 bp, Homo sapiens
ttaattatgtgcatgaagacaggtagatggactagcagaaggagtttagagtctttattctactcatggcttttaaccagagctcaatatgtaagcgttttctgggtaacccaaatggtaaaaaaattctgatggtctcctaatagtttcatgggaggacacagattttcggggtgtttcaggtccaatgggaatgattctgttttctctgtgtagacaaatgctgctttaattttgtgtagatatatctctaagttgtgttcttcttgaaacagataaaaaccaatgctaggacagaggtaattctacacttgatcttagccaaaaggctgagaagcaattcagaggtaattctagagatcttgttctgctcatattttaaacgagaaaactgagacacaaagaggttattggtttaccaagttaaaaattcttaatatagaattttaataataataatgtaatatagctgaaactcatataattacttcaataggacaatttaataatatagcagaaactcaactgataacttcaacaggacaattatgttgtaaaattgatgaaaatgaagtctgtagacacaaacatacgataaaacatgtgctcttactgattcattgacttctcttagccataatatttatctaccaaatttccctttatttttagtggtgttttatatttattgcagctaattgattctgcagagaaaaataagccctggtgcctctgacaggtgcagcagcctcgtgcagtatgttctcattatgcttatgtaaagtaagtctctactatcaaatgttaagaaacaacacagtggggcaaattttaaattaatggtttcagaaaatatcctgcagcctcatagtgtatcttgtcagctctctcaaattgtggacattcatcagaggtcttaaaagagaatggcaggaagtcagggaactgaaggtttagtagtaataaatggtatgtaagccaatatatagttggcttagtgttgttctgtgggataagaaatgcttctaaaccaagaaattacagaaaacatgcacaaacatattttttgactttggacagttcatgacggtatccttccaagattaaattaagaaaactaacacttaatttcatagctcaataggaattgttgaaattgtgatactgtagcaaactaaattaataattttttaaaaaataattcaggtattgtctgggcacagtgacttatgcctgtaatcctaatgctttgggagcctgaggcaggaagattgattgaggccaggagttcaagaccagcctgagaaagtagtgagaccccgtctctacaaaaaaattaaaattacctgggcatagtggcacattcctgtagtctcagctactcaggaggctgaggtggtaggacagcttgagcccaagactttgaggctctagtgagccatgattgtgccactgaactccagcctgggtgacagagtgagaccctgtctcaatagcaataaaataataataataatgcaggcattgagctaaaacaataacttggagtccgttaaaaggctgacatgatcagagtctctcactaatagtcaaggtataaaagtcccacctcttagatattattatagatgacacccattctgagtctattctctgattaaacccaggcacttctt

SEQ ID NO: 34030 - DNA, 1050 bp, Homo sapiens
cttttaacatcttgttgcaaacattacatatatctatagttgctaaataaagagacataaaacatatatgtgtttccttggcagtggcttttcttaaaggtaactttacattatattttcaaactgttttaaaactgtctttatgtttggtctattgtggttttgaacattttttttcccctcaaacatacactcaaaacattgaaatggtcaggagttagtcttaaagtcaaaagcctcgtgtttactaaatatctgctttgtcctattccaaaagtatttaaaatatttagcttaaggatttcataaatcaccatcttagtggaacttaaaatcagcattttttttttctagttttaggccctaaacttttgagtgagggaaaaaaggttgtgcaactgtttcattccaatcttgtatgtggaatttgattcaatttaaggaattaaaataactacatatttttaacaggttgagcactagagcccagagagttggttttaggttggctggatatgggtttgcatcaggcatggactataagtagcattccctgtctgttgcatgttattttatggagaccccaaaatgaaatgaaaaataaaatggaaatgaaaaataaaagagaaaatatttgaaggttccctaggatggctgggtaatcaataaatatcaagctgctcatagtctaaaagataaaaaagccaacatattttgataattaagtatgtactaggcactgttgtaagagtttcactattaactcacttaagctttatgataaccgtatgaaggttctatgacttgcgataaccctaggaggattctattattattcccattctacaggttaggacactgaggcagagtgaggttgaaaaactcacccaaggttgcatgactaccatgtctattaagtctcagagccaaaattcaaacccggatctacctacagagccagctcttaaaacaactgtgctttattctaaaggatactggttggtttgtttggggtaagttagatgtattcacggcctatgatttcatcca

SEQ ID NO: 34031 - DNA, 1020 bp, Homo sapiens
gatccagaggtatgctgcttttccaggaggttggacacaaaggaagaagggctggggtgagagtggaggaatccatctgtttcagtgaagatggcgtgctggatatggggaatacctgtgcatgcttgaagttggatggtgatacatcctcttcattgtccttggtatcttggaaagtaagtgattgtctccttttgacttgcttatcttgcatatgcgaacccctctatggtgtgtgaataaactattttgatagtttttgggtgggatgattaataaagttatgactcattatttgtgtatattcagaagttcagtaccatcgctaactcacagattacagaatatacgctatctctcctgtgtctgaaaatcactctagtctgtaagcacctccagatcccaggaatgaatccttaaaggcaggttatgcttcaataaagttactgtggggtcagtctgagccaagagtgttctgtgattatttttgctgattgttcagaacctgatctctgcctgtttacctgcagcccttctactgagttcagtgtctgtcttcttcctggggccaccattattggagcggaaccatatgcttctgccctggagactgcagcattatatcaggatgccaagagctaaggaagagctcatgtccccaggtgtcttacagccatttccttttatccctattgaatgttatggcacacttccatgttcacaaatttaaatattcctgctggcctattatttgcagaaaattaaacgtaactgctgattgggaagtatataaataaatataaataaatagaaatctatctatttgttgaaattttctcaaaaacaaagctcacatagaggaaggagactagtggctttatttagaaatggtgattttggatgaaatgattgatttttttgtttacagtacactatcaggttatgtaacatggtgacataattttgtttacgttaaaaatagcaaaataagatggtgtaaaatgtgcattcccctgactt

SEQ ID NO: 34032 - DNA, 1056 bp, Homo sapiens
ctctcagagacttttcttgttctttcagactaggtttggtgcccctgttttatgcttctgtaataccttatctcctacagagggtgttactgtatttctggttctatgaccatcactagctttagattgtaagctctgtaaggaaaaagattatctagttcatgccaaagccccagtaactagcatggggtccagcatatagtagtcagtgaccccccaaatatctgttggatgaataaaggaataaataaatttagaggagaaagacataggtgagaggaacaaaaggatctcaaggagggagaagaagtacttcttgctgatgctgatggtgtaactactaagaactgggagaaataaataaaaaaggcctcttgcctggcccatgatcctcactttagcttccaaggaggtggaactactaaatagagtccttccaggtcttctatggaaaagaagaagtatagactaacactaggacagacacttggcaattcagggagggcactggaggagagcagtccccaggcccagaagtagatctgaccccaactctgtgtacattccaacaaataccaggggctttaaaaaaaaaaaagagacagggtctcactatgttgctcaggctggtcttgaattcctgggcttaagtggtcttcctgctttgccctccccaaagcactgggattacaggcatgagccactgtgcctggttgaccagtggctttttcattgtgaattttgggaagctggattttctctttgttatctttatattccatatcttttccccactgataacaaaagtataaaaaagagagaaaaaagaattcttagggaatgtcaaaaaagtcatgtgtttgtttgtaagacaggcaggcattctgtgtttacattctcagtgagtcaagaagggagactaccatggtcagaacaatgacttttggcaacaaaaggacacaaaggatttattgaggaagagaggcaggaggaaaaggaaagtggacagaagctgctctgggattgtgattctatagatctggcaggcattccttt

SEQ ID NO: 34033 - DNA, 1050 bp, Homo sapiens
ttatgtaacccataaacatatacacttattatgtacccacacaaattaaaaattaaaaaaattttgaaaagcaactaaaaaaaaattgctgttgccatagaaagttttttattatacactgtcttcattctaaaaacctaaggccatgccctgtacagggtttggattcttgtctaaagcagaattattaatttagaagccataaattaaatttccaaacattcaaacaggcttctttctccccagggtagatttttaactctctatgtcaggatctattggcagttttttgttccaactcaggtgtcaagggtcatgtggagaccatcatgatatggcctaatctataatttaagtatcatgtacatttcagtttaatattttaaaatgaaagtaataataatgtgcattttagaatttttactgcttgaattggtgtctcaagtttatttcaaggtgaccaatgaacaatgattttggatctcattaaattcttaaattttctggctgtatagctctttgtatatttctgtatgactacatatcactcttttatagtatattcatataagattttctgcacttttttgtaccatccagaagagccatattgtaggtagaggttattatatactttatgaattgcagaagtaaacagttttgaataattcaatacactaagaatatatggttccacatggacctcctagaacatttttgacaccaataattacatcacaggagtgattaatacttacgcagatatggctggctaggtctttcagtatactgaatgtttactgtatgtgagaatgatcccttgcaccttttcaagcacagctgtctagtaaacatttattgactatttgtccaataggctatgtagctctgatatttgataataggattaatattttgccttttctgtctacattactgtactaatttgattattttccctgggcctatcatgatgacaaggaattatgtctgttgaccttaaaatgaccttgaggaaatgaggtgctaatatcaatttaggtgacagat

SEQ ID NO: 34034 - DNA, 1088 bp, Homo sapiens
aaaatccaggcccatcactgttgggtataaggagtgagagagaggggttactatttattccactcagtgtgtaatctattaagccctctgagccaatcaaaatcatgtgggcattgaagttcaaaaccacaacatagatgcattcatttatagtgacattgttgcttaggcaacaagaaatctgaatctcctattaaactagccaacagcaagaatttaaaatattttattttatatatctggtattttgaatcaattaatagagttttttttctgagaatgactaatagatacttagttttcatacaaagtttaggtgacataagagttacggctgatagctgccataacatagaagcataaaatttcatggtttagcacaaaacatgcttaaattttgttcacataaaatctagtggaatcgttgtggggtgagggggtgaggatcttgtatctctgatttgcgattgttcggggactcaagtttataaagatgtgtttacacggtcatcttgatagagactgcttctaaccattggcttctgaggtctcgttagcagttgacatccagctggtccactgaggaactgagaatgtgcaggatggtgcaggagattgtcacaggccaggcctgaaagtggcgtgcatctcttttgcttacattctgtaacctgttgtatggtcaaagcacatgcagaaggggtaggaaaatgaagtcttccatggagtagtcattttccaaaaacaacgcttctctgtgaaaaagcagcatgaatttttggtggtcagctagcttcctctgctgtgggaagagagtgactatgattgctgtattcaagcaccaactgaaaatcgtcagtgtaatggtattgaaaataaggctatttttaaaaatggaaacgaaacgcgattaaatccataattgaatacatttaggactttgctttagaactagaggagatgttatagcatcaagtagagtcccatttagatgattaaggagatattttggatttctgaaattaaaaatagtttttcctgtttttccctctggaaagtaaaaaatagtttttcccaagggtaaaagg

SEQ ID NO: 34035 - DNA, 1050 bp, Homo sapiens
ccatgttcttaaatacaaattttgatacttatctgaaggggatatttgattatggattcaaaacaatacatccagcactaagaggaccagaaggaatttatgtgatggaaaagagggtgcagcacgtgtgtgtgtgtgtgtgtgtgcatgcatgtgtgtgcgcgtgtgtgtataaacattgaagctgcagtgtattacagttatcttcttgttagcagcttttaaaagatgtaattgacatagatatttagtgtacatatttagtgtggggtacaatttgataaattctgacttatgtataaaccataaagccatcactgcaatcaagataaaaaacacatttagttactaaacatatttagttattggaatgtcagaaccagatttcatcaccagtaaaaattttactttatgttgcatttcaaaaattaagttagatttgtgtatattcatttgtgtttagtcacaaagcattgtttttgtaactaattaatggtttttgtcttgttttttaaaaaatttagggtgtggctggaatgcatgctgtagcatgactggcctccagtggtgtctttgaagaatagcatcactgggaaagtcaaagcaacaggtgaaatttaaaagataagagcaatttgcacatcagctaagatgctgtggcacagtctaattggcaggggctggtgaaatagaacattagatcttcaaaaatggaaggtgagaactaccctcttccaatgttgggattcctcagtggcaagaagtgctctgatgctgagtgatgcttgactgcagttattactcaggaatttttcacagaggaaacatcaaggtttatattgattttctttttctagaagagacttttttaggctgcatttttttctactgtgttgatgcttcagaatatatctttattatttaccttttttccttttgtgcctttttcttcttacagcttttaatttggttatatactccaagaactctaaaactgtacctatatgagtaaaaattgttacacataaaatgcgtttttgatttggagtc

SEQ ID NO: 34036 - DNA, 1034 bp, Homo sapiens
gatcagttaataaaaaagatggttaaagtggagaaaaaactgatatatgcgtagtttaaacattttatttcaacttgaaacacgtaagttggacattcgtttaccaatgatctgatgtccagtcaagaccttttatttaagtatattttatttaagaagtttccagaatttggggtttagctttgtgtttttaaaaataaacaatacctatttgtaggcattgtctcactggtttgttatctgttaaaggcagtcagtaattaaagacacttgcaaaacaatctgattgtagaacttctaaatattttcgaagcttcctccccaatctttttgatttgtttcagacatacccataattcaatagcaatattgtagaaattcctttttattaagttcttacaaagcatgcatcgtaattttcataaagcaataatttttggaactcatttttattagataatctaagatttatttaaattatgtaattgcaatagcaactacaataggatcaaaaggtttgggataaacatacttgactcttgctgagcatataactttactagtgggagaagaatgtacacatattatagaatggctagtaagctacaagcttttaatgtatggtgggcatcagtcagcatttatagagaaaatggaaacattttcttaagtaaagtttcgctgagagagcttctactctgtttttcaagaaattaggggagagagagaatttactccttgtctgtgaagacatgggatttaagctatgtgtatcacaggacttgaaacagaaaaaaaaactctacagatgtttttattttacaaagttagttgggttaaatattgcccaaagtttctacctgaaccatcaagtttggttttcataaaaagcttttaatttgtgagaaaaatgttatttgaattctttcaattacatcttatcagattttggtgatgcttttgaattctcaaatgtttcaagttgcaattctctgttaagatttattacatcattatcaaaactttgtattaag

SEQ ID NO: 34037 - DNA, 1065 bp, Homo sapiens
tagctgggatgaaaaatatatatcaccaagttacacaaaaatatttctaacctttcaaggaacagacaaacaaaatagcagggggagtctctgaagaattatgatgtgatttacactacagcaaggtccctaataataagattacaggaagaaggacagaagagctagagttatcaagtgctgaaaccatctatactactagcacctccaatgatcaaaatagcatcaaggccgatttctaagtcttggatgtcatcaacaggaatctcttgttagagtagaagagaggtgaggtaggttctggcccaaagtatcatatgactggctagtttggagttagtttattaaactgcaatggaagtagctctaaaatttcctgaaagttgtcttttttttttttttttttttttttctcactgcaaccacagagagaacccaaggacaaaattcaaagtaaaatgaaaaaggagggctactgaggtattactcacaacaaatacgaaaagttggggagtgcatagagatctctgaatgcctcttgtgctctgctgaacaatgaggccaaggatctggaagacatctttataccataggaaaattgatccccccttatcttagtatggaataataataaactgaactatgttctccttgttccagagcaaggacaaaaaaactaccttctaccttatcagagatgtttttttaacacttgatctccaggtcagctaaaatcaaatgttattaaaatagaaaaggcatatttcagtaaaattgacattttaaaatgtcagtggttaatgaaagccatagtctcttttattgataattctttttttaggaagaatttaggacaaaattaaactgtcatgacatacttcttggtctactaaatattatatgacctttgtatttagtaaaacttgacaaaatcagattagaactttgccatgtagtttaagttatcaaaatatgaagtcagatcaattttatgaccatagaaacttaaaaattggaaattctaattttagacattagaagtggcatgactaaagttttatggtg

SEQ ID NO: 34038 - DNA, 1037 bp, Homo sapiens
tttatagtgacactgatggatatcctgaaatatccatgatgtgatcaacagtcttactcttacctcatgaaccatcttgtggttcatggctactgatgcttttgtggccattggcatttttgttcttttcattcctcctcatgttcagatggccaccaacagatttggtgcctggaccaaaatcaaacatctgaaaatataattatacaagaactgacagaatagtaatgtgaccaaaacaaaatcatttttaatggtaattggataaatgactgcagattgctattctcggagattcattaaagcatttctgtgagtacatcagtaataatatgcatttgtctctttttatttaaatgttgtgtttgggcctgcgtatagtgctgaatgaatatttgtgagaagaatgaaataaatgtttgcataaaccactcatattttaagtatgtgaaggaagttttttttattgctcatttagtcagtaatcaattatgagtgcctgctatataggggcactatcaggagtactagggacaaacagacaaataaaatacagtgtctgttcataaaaagacaattaaaatacagggtaacaatcatcctgatggctctgtgtccacagcaggctcctaatcttgttggccaggcagggcttccaagaggagtcttgcagatgctgagagggagggaggtgatccaggggaatagttattaataaaagtccagaggaaatttcaagggagagaatgcaaagatgagattatgaaaactggaatacgctaggaatggtggttcgcacctgtaatcccagcacttgggaggaatgcttgagtccaggagtttgagaccatcctgggcaacatggcgaaaccctgtctctaccaaaaatacaaaaattagccaggtgtggtggtgcatgcttgtaatcccagctacttgggaggctgaggtggtagaatcgcttgagccgggggaggtggaggttgcaatgagcgccactgcactccagcttgggtggcagagccagaccctgtctc

SEQ ID NO: 34039 - DNA, 1035 bp, Homo sapiens
gtgtgttgccggggcggggggtgagggggagcggtgggggagtgggagggggtgcttatattctagaattatggatttattctaaaataaatatttttatgtattgaactgaataactagctgagctagaagaggtgaatatattattaaaatgtaaatctgtgacatgacccaggtattgctttgtttcaacaatcactgctgcacctgtggttgataacacattagcatggctttccccaaacaaccccaattagcctatgtgtagttggagaagatagaaaaaatattctgatgcctaaaatatgcatagatatggaagaatacaaatacatacaatttaatgtacattaaatacaaatacaaccaagttatgattagttggattttgcatctgttttattttattgtagcttacaaattaaaaatgctttccaaattcaatgtaaaatactaaataataatgaaccacagaagcttcttcatatcttaaagcaaatttattgaaaattgtggatttctactcgttaagtttgccactccattaattgaatgtttaataaatattacagtttaccaagatagtaattattatacttttcaataaaattacactttcataccacctattatgtgtccataaagcagttgtaccgtagtaaaataaaaaatataaactaagaccataacaaaacccctagtacatcccctagatgaacagcaagtaaaactttacacttctatggctatgttattatacatttattaactgaatagcagaaccattgacttcatgaaaaattggcaactgtattggaaaatatttaaacttgtttttaatgtcttaaatcagagtgaacaatttctgatccaagggcttaaattattccagacctttgtcatgctggttatattattttagtgagaataattctttagttattattattttagagggaatattcttttagagcgaataacttctctggtgttggaatagtccatctttatttcatttaagtagattatacgaca

SEQ ID NO: 34040 - DNA, 1864 bp, Homo sapiens
aggcttaccctcatgttaaagcattattcagatctagaatgtttgagattctggatgttttcattggtttatataattgaacaaatttgtattggtataaattattttaataaatttatatgtgtaaattcacatactgtatcttctcaacaaatacagattctcccaagagaaggcacttttgtttatatgacatatcacattgccctcactgattcctttttttaagtgattttactttattctcccactttcttcttcagaactactccatttatttaaatggcctcttactttgctctcctgatacaaactagtaagaattaaaaattaattcatccatatggctcagttgttaaaaaaaaaagaaaaaaaaatgttaccatgttgctatgatgccatggattttcctgaaggatttctaggtgttttgagtgtttcagaagttttaaatacagactcaagtttgcttttgatttaaagataatcattaaataatcttcatctaggtataaactaatctctaaagaagtgctctgtggaagggactcttacctgaagtctttttatcagtacattttagaagagtttactgagttttcttccttaaccttaatgggtgtaagcccccacaacctaagcctcaatataccaccttcagcagcttatgcatggactcatagggaaataagtacacttcgccacagtaatgttttacatatctgttctaaattcccgccatcctcctgcccatacgtttcagcaaggccgcctctcccagccgttttactccacctttgctttgcatggaaataacttggcttacataaactgtgtgtgtgtcccgtgtgactgtctctgacttgggttgccatgcatcacattttaactttggactcacttataagtttaatcacaattgttgtttctgttgtttttctttcctttcctttatttccctccttggtctgtccattctgtgtctaaacaaggaggttgctccaaggaaaggaccatgcctcgtagcaccagactgtttgtttcattgttaggtgtgaatttcccttagatgaaatgccggtttgcagctgattcagatgtattttatatagtctttgtatattggtagaactaaacatactgaatttcagacttttatatgattaaaaatgtatatacatcattagatgttattctgagcttgctactactggctttctcctagaggaaatcaactttctgcaatttctaatgctttttttcttattttttcctcatggttggttttcttttttttttcaacattgatctgtaacatctgaacaatcttgagatacctctgtgtaatttcactgcgttctttgttttgatatgtagtgtttttttgtgtgtgtatgtgcgtcttgttttagctttgttgtatgtgtggatgtgctacaagtgagaaaaattaagcaagttatttcctgctcatttttccttttcagttgttttttttttcgttagccttgctttgctcttgtaccctgaggccttgtggatctaccattcccagcccattttgttgcccctcccaccaccaccaccacaggaaaagacgctgtgtcgtttcagtcctgattacatttgccaatatcttttttgatttccattttactttcaatgtttttcattcacatcaaagatgatgagacagaatctacagaaacatctgtcctgaaaagtcacctggttaatgaagttcctgtcctagcaagtccggacttgctctctgaagtttctgagatgaaacaagatttgatcaaaatgaccgccatcttgaccacagatgtgtctgataaggcaggttctattaaagtgaagg

SEQ ID NO: 34041 - DNA, 1050 bp, Homo sapiens
tagttcagaagaaagctataagcatgaaggcctagcagagacccctgagacgagcccagaaagcctttctttctcaccaaagaaaagtgaggagcaaactggggaaacaaaggaaagcaccaagacagaaaccaccacagaaattcgttcagaaaaagagcatcccacgaccaaagacattactggtggctctgaagagcgaggtgccacagtcactgaggactcagagacctctactgagagttttcagaaagaggccactctaggctctcccaaagacacaagccctaaaagacaagatgattgcacaggcagctgtagtgtagcattagctaaagagacacctacaggactgactgaggaggcagcctgtgatgaaggtcaacgtacctttggtagttcagcccacaagacacaaactgatagtgaggttcaagaatccacagccacctcagacgagacaaaggccttgccgctgcctgaggcttctgtaaagacagatacaggaactgaatcaaaacctcagggagtcattagaagtccccaagggttagaacttgcactccctagccgagatagcgaagtcctcagcgctgtggctgatgactcattagcagtgagccacaaagactctctggaagccagccctgtgctagaagataactcttcacacaaaacccctgattctctggagccaagtcctctgaaagaatccccttgccgtgactctctggaaagcagccctgttgaaccaaagatgaaggctggaatttttccaagtcactttcctcttcctgcagctgttgccaaaacagaactcttgacggaagtggcctctgtgcggtcccggctactccgagaccctgatggcagtgctgaggatgacagtcttgagcagacatcgctcatggagagctcagggaagagccccctttctcctgacacccccagctctgaagaagtcagctatgaggttacacccaaaaccacagatgtaagtacaccaaaaccagctgtgattcatgaatgtgcagaggaggatgattcaga

SEQ ID NO: 34042 - DNA, 1068 bp, Homo sapiens
ttttccacactcaccaggtctgtttattcagataggggtgatgattctcccgattcttccccagaagaacagaaatcagtaatcgagattcctactgcacccatggagaatgtgccttttactgaaagcaaatccaaaattcctgtaaggactatgcccacttccaccccagcacctccatctgcagagtatgagagttcagtttctgaagattttctatccagtgtagatgaggaaaataaggcggatgaagcaaaaccaaagtccaaactccctgtcaaagtacccctccaaagagttgaacagcagctctcagatctagacacctctgtccagaagacagtggctcctcagggacaggacatggcaagcatcgcaccagataatagaagcaaatctgaatctgatgctagttctttggattcaaagaccaaatgcccagtaaaaacccgaagttacactgagacagaaacagagagcagagagagggccgaggaacttgagttagaatcagaagaaggggccacaagaccaaagatacttacatcccgattgccagttaagagcagaagcactacatcttcctgcagggggggcacgagccccacaaaagaaagtaaggagcatttctttgacctttacagaaattccatagaattctttgaggagattagtgatgaggcttccaaattagtggataggctgacacagtcagagagggagcaggaaatagtttcagacgatgaaagtagtagtgccctggaagtatcagtaattgaaaatctgccacctgttgagaccgagcactcagttcctgaggacatctttgacacaaggcccatttgggatgagtctattgagactctgattgaacgcatccctgatgaaaatggccatgaccatgctgaaggtatttgccagccaccgggattccctgtgctacgcatgtcataaaattgatatagtttttttgtatgtttgttttatttgatgatttgtgtctcattttctttaagctttctgtagtggctaatgtgtttgtgtaagccctttgtgttttgtgctttc

SEQ ID NO: 34043 - DNA, 1045 bp, Homo sapiens
cctgcctcagcctcccaggtagctgggactacagactagtgctaccatacccagctaatttttcgtatttttagtagagatggagtttcaccgtgttagccaggatggtctcgatctcctgaccttgtgatctgcccgtctcggcctcccaaagtgctgggattacaggtgtgagccaccgcgcctggccaaatagatcctttaaatattaaatgtgaatgaaataatgacatctaattggaaagtgattttaatttttattaattttattagcagataatccaccaaagaatagtacatgtttacttagggaatctaatagttattaaaaataaatgtttcaagtgatactttttagatgatttcccattggctgaaatggcctacgctgccaggcagttgctctctgccacttttcaacttctacagccttgaactcttatagcacctaatagcactttaactactgtttgctgttgttgtactgtttttgttgttgtttgtttgttttacatggctctcttaactagaatgtgagtacctcaaaaggttgatactctataacctgagtgcctgaaaaatggttggtactcaataaaactttaatatttaatgaactgtatcaaatagaaatagttgccaaaaataggtgattcagttagtgcaacaatgttaatattataactatcatctgtttgttctaaatttgtgtctgtatactgtcctagccattaagcaacccaaaaatccatgctaagttgttgagttttttttttaatttttattttttgagatggagtctcactctgtcacccaggctgaagtgcagtggcatgatcttggctcactgtagcctctgcctcttgggttcaagcaattctcctgcctcaccctcccaagtagctgggattagaggtgtatgtcaccacgcctagttaatttttatattttcagtagagacagggtttcgatatgttggccaggatggtctcaaactcctgacctcaagtgattcagccaccttggcttctcaaagtgctgggat

SEQ ID NO: 34044 - DNA, 1050 bp, Homo sapiens
aagttttgtaggtctgttgtggcccatttatactcaggcctgactggtatttttacatatctcttactgcagaagattttctagcttccattccaagctcactgaggatttctcacagactttcctaatatggtggggatcttagtagagaatatttatccttgtaaaagaaaatgcccagcccttcatacctatatcgttggcttattctattacttattggaaaatatttattgagtacctgtcaactgcaagagactccattagatgctggagatacaaaataaaatgccgtaaaccttaaagccctcaaagatctttcaggcaatctataagttttctagctcactgtgattccaatgtcctttccatttgtgaaagaacacccaaatggaaataaagaatagcagtctctgactctcttccacactcattatcagactccattcactcagtcattcatcaattctctcagcaaatatatattcagtatcaggacctattccagtcagatactcgaagaacctgccactacaagcctcatcttctaggtgttctgatgtccctggttctcttgtttaacataagaacattcacattctcattaaacctaggtgtagttgaagccaagagttggaatgggattatgtatccagaaagtggtgccatgaaaggtagccttactggcctttagttaatttgtaatgaagaatctgtgttttgtaatctttcccattactttgctttgccttttcttcttttattgtctcttgacttttccataacaactgagcatggtgccttttggaaaccatctttgagatgacctaaggaggttggttggtactagaatgagcacaggttttaacacaaggcaaacctgtgttgtaatcctgggtttactattactagttttaagtcattgggaaaatgatttaatttctcagaacttcaacttatccatgaaatgtaaaacaataaacaaaataaattgtgttaagtacttggcacacagtaaacctacttctccttagttgcctagtgttgtct

SEQ ID NO: 34045 - DNA, 1043 bp, Homo sapiens
tcaggaatggtttcatttttcttaataatgtgtgtgtgtgtatgtgtgtgtgtgtgtgtgtgtgtttgtgtgtgtgtgtgtgtgtcctaattaagagaatttttactggctgcttgttacatttgttgagggtacaacacactcaagaataaagtaaaaggatagtcaggatccagatgtttcttttctagcatttaatgtgtgtgaactcagaacactaccatgaaagaacacttccccccaaaactggatgcagaggaagaaaaaaaaaaaagaaatggcacagttttttgtatttttttttttagttattttttgttgttgttgtttgtattgtttttcttttctgatagagtatggccacttctgggggaaaaacatgtaattaagtaaatgtatacattggttttcacgttttacttttgttttcccactaccaataattttcctctggaagaattttatagttttttctatttcattttaatgagtaacaatatgttaaatgcataattaagacaaagcaatgaaattctgactttattcaaagtactgaagattattgcttctagggcatttttaaacagcaccattgtattgttgaatgtttatgtaactgatggcttttctataatgtaatttttgaatgttcaggtgttacatttccaaagtttaacttttaaaaaaccatcttctgatcccttttattgtctgggccatacaatctatattacataggtgccaacatttaattcttttaaatggaacatttgcagttttccatattggtacctgctttttctggagaggtttgagatcttgttaacaaatcagactttacactatatacagatgtgacagataaattgaaccacttgtttgtgaaaatgagttcctgtcatcttcctcattcactcagccctcaccccagcagccttttccggtcattgtagctgacatggagcagtgacagtattcatttgagaacagggatgcaagtcacagacatcataaaatcagggtctccctgctgaagcattcac

SEQ ID NO: 34046 - DNA, 1053 bp, Homo sapiens
acatctattttgaagtcttactatgtgtaaataaaccttaaaattcattttattcactattcagtcagttcagtagagattattatattttcaaattaaccattatccaattaattttgaatgataaacagcacagttggaatactgttctttttcatttacttcattaaagattcattttaggtaatcagagaattttgtatcagctgttttttaccttaaaggtttgtttctgacactttaataaattgttctgtagtctgtgctggaaggtaactgaattttttttgctcaacagccctctctttgacacatgttcatttattactatttcttccatcagctgactcacttgaggctaattctgatgaagtgctttcaaacaaggaccactattggtttacattaacgaggaagtggtggaacggcagcttcagaacaggagaaattagaaaaagaaaaatgatgaaccttgggatcaatttttctatgagtcataacataattaactataaaatacgaagctgaaaagtattattctcagtagactgatattttgcctcatttaggaattctatattaaaaaaacaagggagaaagattgaaaagaaagatagacttagtcatatttagaaagaaaaattgtgcagaaaagcttgagttaggaagaaacagatttaatcatatatctggagttggatgataaaagtcccttctagttttatgtttgcactctaatttttctatcatgttatcttctctagcggcatttttttttgttatgaaaggagatattcgggggagattattccatagataagcattctctagtaacatactgttcactaagaatgtaatcttcaaacttccatgctgtaaacataaagttttggttaacccattctgtctctctagttcagttaatttcgcaggcctaccaccaactcaaaatatataaaatattttacttctcaaatttccctatatttattgaagaacgataaaaccatgaaccatcttttttacctctctggttttaggtctttcagtttt

SEQ ID NO: 34047 - DNA, 1098 bp, Homo sapiens
ggcggggctaggcggggcggggagtgaaacagcataggctccgcccctcgcggcgcttcccccggaatagcgtcatcagttctataagagagcgtgtgccgaaggcctcggcctttcacattcgggaagcgtcgggattaggtgaaagtacgtagttgtctttcgtaagttaaaatgataattgggccgaaacttactgccttacctaaaaggcagcgcagtcaggatattggtaggtcgggggcggctttggaaacccttaagtttacaagcatgcgcggacttgagtgctcattaggtcgccgggcgtccacgtgcagccctggaccctgaaccccggcgtgcgtgggccgtgggccctcggggaaaggttccgtgcactcggggactccggtgaagcctgttcagccgtctgtgtcatgtggccatcttgagtctactctgtcgctcttgtgccctagcaccccgagaaccgtcagtttgagccagatggtgagtaataacctgtagcagtttggttgctggttaattctggattgtgaatctccatgtatctttgggacctgtcagccgtggcagtctcccttcctagccatggaagagcatatccttgtttattggcaaagctgtcaccatttaattggtatcagattctgacttgcacaagtaacattcactgttaaaaacctagagggtgccgggttattgggcaaaatttctaaaccgttgttcaatgtttctaggaagctgagctgaacacattacgatggatgatggaaacataaggtacatttcttttttgatatttctgagttaatctgaaacgccttagcggcaggacgttggaaagctaaagttggcccgttttgctggcttttgtagtttgagttaacaaccaactgaattagctgataagatctcaaaacagtgaggtaagtacacagctcggagttttataatgctttttttctcttgcagactatcaagaaatccaagtggtaatgggcgaagtttattcagcatccggcaatggacttatcgtagttggggaaacgggtgttccgaataatatcctggaagttatcaggacacctattt

SEQ ID NO: 34048 - DNA, 1056 bp, Homo sapiens
ttaaaccatacaaaaatttaaggcagttatacaaggtggaaaattatgtatttatttacacaaatatgcacagaacacttgtatctttcaaaagtcacacttaagacatagtaaaagcatgttgtatgaaccatgtattcttaaggattgagcaaactgcaggctgcttgctgccttttaggtttgctagtccctgatctacttgaaacagatgttgcttgccccaacactagtttaattataagggcagcctgtgagaaagtttcaatagacatttttctcacctatattgcacgtttttctgaagcccttgtgcaagtgtgtgtgccatgtgtagttctatttacatataaacgctactttaaaagtttatcaaaatcatgagtttttacaaaagtttttaatgctcttctgcattatatgcagcattgcaaatctgcaaagtagtaaaactataaagcacctttaggtttgcaccagttattacagaaatggggatttgtgaaaaggatgtaatttgatgtagaagggcaaagtcctttaatgactggcattcaagaggattacttaaaacaatttgtaagttcatgctaacctcttccctatatttatactactgggacctggggaaggatccatgacatggaagtatcttgagtgtgccttttaaatttgagcattactgctaagaatgttctgtaaaggtgcatagttaagcagctatcccttaactcttggagaaatagccatagggaaaccaatcatttaggtaggagaaccatggggaaaaaaatcagcattttttctggagtttggaatcagtttcaccaactggtctcactttgaggcaagcctgttttcccccatttgaaaacaagggctactaccataagatttactggccttttgcaaattgtcagtgatgtgcaaagctgcctaatgcagtgcctggcatatgttataactgctgtatgtattagaacttttcaatgtgtaggccaggaaagcattttgactagtatattttaagattggattgtatcaggttgggcttgg

SEQ ID NO: 34049 - DNA, 1049 bp, Homo sapiens
ctaatcagtgttttaaaacatatattaatcggggtgggcgcggtggctcacacctgtaatcccagcacttagggagacccaggcgggtggatcacctgaggtcaagagttcaagaccagccttgccaacatggcgaaactccttctctactaagaaaatacaataattagctggacgtggtagtgggcgcctgtaatcccagctacttgggaggcggaggtaggagaatcgcttgaacctgcggggcggaggttgcaatgagctgagattgcgccacttcactcccacctgggcgaaagaacaagactttgtctcaaagaaaaaaaaaagtattatatcaacatgtcatggttttattattaatatgtaatgaatattaaatatttttaaaatcttgtattatatcaacatgtaatggctttaatatgtgatgaataatatttaaaaaattgtttcttattttctagttttaatataattatctacagaaagaaatagtcttagagatcttcaataaagttaaaaaatgtcaagggatgttagaccccaaaagattgagaatttctagtttagaaatattcagagtaagccacatacaacttgctacttgaactattttttttctttgttttttattttaggagatggggtctcaccctgtcacccaggcttgagtacagtagtgctatcacagctcactgcagccttgaactcctgggctaaggatcctcctacctgagcctcctgagtagctagaactgtaggtacacatgacgatacttggctaatttttaaattgttttgtagacatggggtctcactttgttggccaggctggtgtcaaactaatggcctcaagtgacccttccacccctgcctcccatcctagaggtatgtgccaccacaaggagcacttgttcaattttctaaagaaaaaatttctaaagtaaggctgtgggatgatggcaggaagataaaagaaaaacagaagaataagttacaatgacttattcacacatattcttttgacagcaagaagaacttttagt

SEQ ID NO: 34050 - DNA, 1051 bp, Homo sapiens
agctgggcatggtggcacacgcctgtaatcccagctacttaggtggctgaggcaggagaatcgcttgaacctgggaggcagaggttgcagtgagctgagaccatgccactgcactccagcctgggcaacagagtgactctgtctcaaaaaaaaaaaaaaaaaacacaaaactttgggtaattgattggatcagattttgagaagctgcagtagctttggatcagattttgagaagcttttttgaggagttgttattccatgttaacaatattggatagtataatcaagatatttttaggatttatggcctggactacattgtagaaatatttctgaaagaggctcaagaaaaacccaacttctaacttgtaattgcaatatttagttgaaatagttgaaagtattatggtccaaaaaacttacttttgttttttcaagttaattgtatataatagagataagaatgtatagtttcaataaaatctctagaaagttcagtgaaataatacctaatctcgtgaatattgtcttatatgttgcagttctgataatatgtaacttaaatgtttgtgacttttttttttattaattaaaatgttagtgattattttaggtggaactatatgcagttgctgatattctaacctttttgacctttaagcatagcagtttcatattgcaacattggtggtcgtatctttcatgactcaaactagactctaacacttatagtattgtatatgagataaatagttttagacaaatcaatcagcaaaatagtagttacagtaattatttatgataggaaatttttttatgaaaataatcagctagctagatctaataatgggaaagcaaagacttcaatgtttgattttaatgctaatttaaaacatttattaaatcttaaggaaataaaatatgttgagttttaatcaggatgtgatagagaaataacccctatttgtaaaatatttacttaatcttatgtttttcaaggatgaactagaaatgcaacaggatgaagaaaatttgccatatgaagaagaga

SEQ ID NO: 34051 - DNA, 1029 bp, Homo sapiens
agtaattctgtgagtttggacaaatgtataatgacatctatccaccattataggatcatactcaatagtttcacggccctaaaaatcctctgtgctccacttattcatccctacccacaactcttgacaaccacttatctttttactgtctccgtaatttgcctttgtcagaatgttacatagttggaatcgtatagtatgtagcctttttagattggcttctttcatttggtaattggcatttaagatttctccattccttttcatggtttgataggtcatttctttttagtgccgaataatattccattggatgtaccgcagtttttatatccatttacctactgaaggacatcttccaagttttggcaattatgaataagctacaatggaaatctgtgtacaggtttttgtgtggtcgtaagttttcagctcctttgggtaaataccaaggagcacaaatgctggattgtatggtaagaatgtttaattttgtaggaaactgccaagactgtcttctgaagtgcctgtaccattttacatttccaccggcagtgagagttcctgttgctctgcatcctcaccagcatttggtgttgtcagtgttcaggattttggcaattttagtgtgtgtgtagtggtatcataatgttgttttaatttgcatttttctgatgacatatgatgtagaacctcttttcatatgcttatttactatctgtatgccttttttggtgagatgtcttttaaggtctttggcccattttttatttggctgtttgttttcttattgttgaggtttaagagttacttgtatattttggagaatagtactttatcagatttgttttttgcaaatattttctcttattcggtgactgtcttctcactgccttgttgcatgtttatttttatttaattactttctgcttttttattttctttctagtttctttggatttacttgctgtctttctatctgaagtatttttagattgatattcaggttaggggtacaggtttaatttt

SEQ ID NO: 34052 - DNA, 1035 bp, Homo sapiens
ctagtgttgagaagttaccaaaaccttaatcaaatcaagaaattatttaagcagttaatataatctgttcacgaggtcattaacactgtaggatttctagattggtcatagctgctttttgctgttgttgttgtttttttttttttttttggacagtaaccttgcaaggagaaaaaaaggattgagtttatacatgtaggatgaaaagtttctataaaactgctttagatctttaaattcttattaatttttcagttgcaatgctagttaacatggtttattctgaaagagatactgatggttatagagaccagttttttggataaactaggatttacgtgattcagagatcagttttagcgagatctcttgattgctgtgtagacccttgtatgcagactgcagttggtctcttttcactttctgagaatgggatactactttacacataattggataagaatcaggaataatttatttgcatgtgtgaaaaatacacttaaacagcttaaatcaaaaggagactccactgacccgtgtaatcgaaaagtccattgggacacctggcttcgaaaaggctggatctactagtctcgtgatgtgatcaggtccaggtctttctctcttcaattctttgcttggtttccttgttgctgacttcattctaggcaagatctctcctgtggttctaagatgactaccagttactgtagagactacatacttctcaatgcataactcatgggaagaaagcatattagtcccagaattctcaagacatcagaactggattaaattacatgctcaccccaacccaatcactgtagccagagaaatgaaatgcaccaaatacttagcctagcttcaaaccccttcccaccactccacaatgcaatgccagtgaactacacaagtcatcaaatggaaatttatggcttttagagtggtgagaatggatactggagacataatcaactctacaatggaatcttagaaatagaatgagactttagaatcttcagccaaatgcttact

SEQ ID NO: 34053 - DNA, 1083 bp, Homo sapiens
gctctgtatggttgtcccatacacagcagagcaaaggagagagggggatgattttgaaatcaaacatggacataaactgcattgcactgaaaacttaccacaatatacaatagcaccttgtgcttctctttccttctagtgccaccctgaagaagcaaacactttcaagtctttcagctgattattctatagttttatttatatttctaaatatgaattctgtattgctatttggtgatttttcaagcttaaattaacattaattttctatgatggtggatataggtttagtttttttattttcttccttattcttgcaatagaattgtatctttttttaattttaaattttatggatatgtaatagttgcacatctttatggggtacatgtgatattgtgatataagcatacagtgtataatgatcaaatcagggttgttgggatgtccatcgccttaagcgtttgtttctttgagttagtaacattctaatactacccttgtagttattttgaaatatacaatacattactgtttagtcactgtgttgtgctactgaacaccagaacttattccttctaattgtatttttgtacattgaccaacctctctttatcccttctctccacttcctttcccagcctctagtaattgttattttactctctatatccatgagattatttatttattttttagctcccacatatgagtgagtacatgggatatttgtctttccgtgcctgtcttatatcacttaatatccttcacttccatccatgtcgttgcaactgactggatttcattcttttttatggctgaataatattccattatgtatacataccacattttctttatccattcatccattggcggacttaagacacttagggtgattccatatcttggctattgtgaataatgccacaataaacatgggagtatagacatctctttgattttctttcttttgggtatataccactagggattgctggattttgcattgctcttttttctcctggaacacatgtaatacaaaaaataataaatatattcccactatttttataattattt

SEQ ID NO: 34054 - DNA, 1021 bp, Homo sapiens
attcctatggtgatgtattttttttaagaatgaacattctgctgacatttaccatgaagactgtttacttatacatatctgcatatttgccatttctggtgctcatcacttttttgcatagatccacattccatctgatatccttttctattgcttgaaggatctttcttgtaatacaggtttattggtgatgaattctttcagcttttgtatgtctgaaaaagatctgtatttcacctttatttttgaaagatattttcactcattaaagatggtccaagttgacattttttctttcagtactttaaagattttgcttctctgttttagcttgcattattctaatgaaaaatctaatattctgatctttgtttctctgtatgtaatttgttctttttctctgggtgcttttaagattttctccttatcattggcttgaagcaatttaatgatgtttcttgatataggtttcttcatgtttcttgtgtttgggtttgttgagtgtcttgggtctgtgcgttttggatttaaatcaaatttggaaacactttgttatttcttcaaataatttttctgtctcttccctcctttggggttttccagttacatatgtagtgagttgcctgaagttttccagttgttccacagcttactgatgctctctttattttctttctcagtctttttttctctttgtgttttactttgtgtggtttctgttactccattttcaagttcattaatcttttcctttgcattgcctatctgctattaatcccatccagtgtattttttgtcttagacattgtagttttcactttgagaagttttatcttggtcttcttaaaatctctttcatgtctttacttagcatttgctagtctgttgaacatgtgaagtatagttgtaataattgtttttatgtacttgtctgctaattctgttatttgtataaatactgggtacatttcagttactttttttgttgttgttgttggatgtcagacaaggtttaccttgt

SEQ ID NO: 34055 - DNA, 1068 bp, Homo sapiens
taatttaatccttacaacagccctaagaggtaagtactacatttgtctttattttactgttgagaaaactgagtcccagaaaatattttgcctgagtcagtccaggatttggtaaatagtaaacccagaattagaaaccagacacctgccttcagatgttttttattaacctcagtggtacattgcttctaaagttgtgctgtcattaatcatcttctttcttggtaaaatggatttccgtgtattttttaaaatatgctaggatatgatactcaagaaagttattaaacatcatcaagtgctttgcaaaaacactgagttatctgtgacagaaaaatggatcctattcattatgctttaataaaaggcaacgtttaaagagaaattttgaaatgacctttagttgtggagtagttgaaaatataggaaatattaaagccagtttgtttttattaactttttgtttttatttgggagaaaggagagatcatgaatagattttcttagttacgttatctgaggacacgactaaaagagaaatttgaagatcttatttgtttgttgtaatagtagtaacagccacaaatagcagctggtactcattgcatgccagttgagtaccataccctgctctagaaacattacatattatttaatccttacaagaactctatgagacacaagtactattcttatcctcattgtctagaattcaggtttttcagaatgattttaagtattggactgatttgttttgacagttgccgtctttgggtttggtttgtctttgtctttgctttgtctttgtcttttagtagcagaagataagtggataattgcatcaagtatatacttaggtaatttattaatggctgctgcttactatgctgtacccccattaccacacaggccccctttcttgttccatgtacagtgaccacatacacctctgctcacccctttttcttgccataatgtgcagaccccaatttagtacactctggctttaaagtctaattatatttcctttcaaaatttcagtttgttccaagtattataatcacttcc

SEQ ID NO: 34056 - DNA, 1035 bp, Homo sapiens
tttgtgaacttgggcaaatttctaatttctctctgcctcagtttccttacccaaaatagagacagtaattgtacctcaaagaagtaaatgagtaagacaactggcaaatagtgaccattcagttacctttagctcttattattttaatggcagatctctttctttttttatacttgttttaggggctatacaaggagttttaaaatacaacatgcatctccagtgtcaagaaaaatcacatctagtttttaatcataaaaataccattgtatactatatatctacatatctatgctctttttaaatatatcttaacatttttatatagatcaatttttatttttattgggcaatttgaaaaatgatctgtatcatagtaagaatgatttcttttacagctaagttaagtcacattgatcaaagggaaaagataaaagacatttccagagaatgtgctctgaaagctattgaacagaaaaacttactttcttcacaaaggaaagatttagagaagggacaaagaaaagatttaggacgacatagaggtaagttaagatcttgtactattgattttaaaaggaacttctaaaaatcttattttaaaactgaattttataactttaatttctgtatatgttaaataatatatattaaaaatacataaatatataagttaaatatatatacctatatctaatatagaaatatataaattacatatatttctgtatatgtataaatatataaattatatataatttatatagtttatatatagaaattaaattatattaaagttatttttaataactttattttgaagaggtgagagttcactcttgtccagcctagagtgcagtgacacaatcatagctctctgcagtcttgaactcctgggttcaagctctcctcacgtcttagcctcctgagtagctaggactacaggcacatgccaccacacctggctaaattttaaaaagttatttgtagagatagggtcttgccatgttgctcagagtggtcttgaactgctgg

SEQ ID NO: 34057 - DNA, 1049 bp, Homo sapiens
gttggtggggagatgttttagagtactgtttgactgttaacactttcctcaagttctatatattgttacaaataaatgtaattttagtgttttgagttgaagtgagtttttaaaattatatttctaattattagaaatgggattctggtaatgatgggtgtttctggtaaacactcacatattctgacataaagagtttggatttggagagagttgaaaatgttaatggttgcaaatatctttccatttttgtggttttgttgtaaaaataatataaactgtattttgggaaaatcaaactacaaaacaaatgtttattttcccctagtttcatatatttgcatagggtgttctagctttgtttttattttcatatttcagatcacatgtacatgaagacaatggaaagttatttccttcatccagtctacaaatacccaaggaccataatgcaagagaacatatccaccagtcagatgaacagaaacttgaaaaaccgaatgaatgcaaattttctgagtggcttaatatagaaaattctgagagaacaggtttgccttttcacgttgataactctgcttctgggaagagagtgaacagtaatgaaccatcttcattatggtcttcacacctaagaactgttgggttaaagccagaaactgctcctctcatccagcaacaaaatatcatggatcaatgttactttgagaactctctatccacagaatgtataattcggtcagccagcagatctgatgggtgtcagatgccaaaacttttttgccagaatctaccaccccctttgccaccaaagaaatatgctataaccagtgtgccacagtcagagaaaagcgaatctacacctgatgtcaaacttacagaggtgtttaaagctacctctcatcttccgaagcacagtttaagtacagcttcagaaccaagtttagaagtgagtacacatatgaatgatgaaagacataaagaaacatttcaagtgagagaatgttttggcaacacaccaaactgtccatccagctcctcaactaacg

SEQ ID NO: 34058 - DNA, 1048 bp, Homo sapiens
ggatttacactagtagtgcttatgaagaccactgaacttctttcttaagatcaggcagaaggttttttcaaggtgatccagagaaggaaattcactttatgttgcatttctgtagtgttctaccaaatccaaatgcatttactctttatgatgaggtagtttgagtttttaatttatatttattgagtgcctactatggccagattttggggatatctcagaaaacaaagttccttttcctatgattgaaactaatagcaaacaaatatgtaatattgttagtagtattacagtaaacaaaaatgaagcaggataaaagggtagagaataataagaataataattcagatagggtcagggtgtctttgacgaggtgatattttagcacaatccagagggggaatagcattccagctagagagaatagtaagcacaaaggcattcttgaattcttcccctgatgagataattgctgcagtgagtgggtccgtaactttttgtgtgttacgcactgtactttcttacattttggactattggcatttgctaaaatattcctttgaccagttccattctctgattttaccttgaaaaacaagcccctgctttttatgatagctctttttcttgttttccttctctgatttttaggttgctaaatgtgatttgcatactttatcacttaatctcgcttagtcttgtcaacaaccttatagtggtaggtgtcttatttatcagatgaagaagtagagtttaagttactttctcaagcttatcaagtattagaaaaactgggattctaatctctctgttgtatcacttttttctgtcttgcatgacttctcttctatcactgtttgtgggcagtatttcctcacggaagtaggccttggccagttcttttcaatcaactgttaatctctgagctctagctccatctatatcttaagtctgggctctaggtctgtgctttggtgtggaattttgaacttctcacatctctactcttagctcatgcctctaaacccaatacatccaaaactgatgt

SEQ ID NO: 34059 - DNA, 1188 bp, Homo sapiens
aattggaatttgagttaactataattaaaaaagctttcatagcccatggtatatgaactctgaaaccccaaataccaaaatcctactatataaaaatgatccacatactaaaaaaaaaaaaaaaaaaccagacacacaaatcgagtttaatttcgtatcatgctattttcctaaaatatagtttctaaagttattgcaaattagttcctgctgcttggtaaaataccatatttaaacttaattacaactgccttcctgcaatgaagggccaactttttcaaataatgtgttacagcccagtgactctagggagtctatggtcccattgctgcaaatgagcagatcggtgaaaacaaaaacatattaagaagtccacatttctaacaaacaccttgcaaagaataaaatggtaatttaaggaatatgtccacttaatatacatttcatgtatataggacacataatacaataaataccctttttactacccccaatttaagaagtagactagtataatagaaggcatatctccttggtactcagtatttctaaaaggcagtaatggctgtctcctctaagcacctgagatgatatgcctctgtgcactctagccttagaaatatgcttatctcctgcaggcagagcatgctggaagtgccagggagttaaggttaccaggaacagccctcaactaataatgaggaaaagcttgtggataaatatccaagccccctgccttcaggtaggaacactgatattttattagattggtgcaaaaataattgcggttatatagtctcaaagaggaaacagtctccacgtgaaatcgagccccagttgtccacagtaataacccgcttattaacttagcctatatggatttactttcttctcatctgtcttctctgctttcgcagggaaataagtagttcactagtgtttcctgtgataacctcctgaataaactacttatgctcaaatccttatgttggggttttcttctggaggaattgccaaactgttgaagttccctgtgttcatccccaatctcagctctgtccgtctccccaccaagagttactgttttgattttttgtgtttcttgttcctttcctgtttgtaataattatactaatatattaaaaatattagtaactacactggtttgctataataaggtatatcttc

SEQ ID NO: 34060 - DNA, 1037 bp, Homo sapiens
aaaaatcagaatatgtagaaaagcaaaaacaactccaacaaaatcacaaaaaattttctccattcagagatagccattattagcaacttgtctatccaatcatatcctttttttaattaaaaaagttctatataataggattttgtaatctgtttttttcactaaatactgtcatctcaatagagcttatttttacatgattttgaaatatgcctgcatggtattcttctataggaatgtattgtaatttatttaattagtcctctaagggatgggcatttatatcatttgaaacttccattattataactttgtacaggttttttttaatccacatctttaattatttactgatgagaaactcttagagttgatttgttggagaaatagccatggtacagtcagctctctcacagatgagggtgagtgttcctacctctaggatgtgtcagaacaccctggctgcctacaagtgctctcctcctatttcatttcagattgtttgctctgccctggcatgcaataccctgggttaatgttgcctaggaactctgctctgtaggactggattctatcaccaaattgttttgcaaatagcttataaaaagaaagataaaattgtagttgacaaatacaaagtgaggtattctgtaatggttaaataaacccccaatggggaataatagatacatattctaggaagaaaggagtttgtttccacaagggattagtttggctcacttgaaaatgattaaacaaacttcacagaaaatcattctcctgatttagaccatcacaaatgaatgattaactggctgaactatcactgaggttatatatcaagcttgtatatatatcaactctgttatgtatcaagcttgttcagggcaaaggaaagagcacttagaggattatactgaagcaagcagattgctctctgattacctctgtaaaatcagattacctctgattatactgaagcaagcagcaagtgctctctgattacctctgtaaaagggttcaccttagtctttttt

SEQ ID NO: 34061 - DNA, 1004 bp, Homo sapiens
tgtgtcaacataggtacattaattataacaaatataccactctggtgcccagtgttaatactgggggaactgatgtgtgtagaggacaatggtatatgggaactttctgtaattttgggaactgaaaactgctcttaaaagaataaagtgtattaaaaaggatcacaccaaaaaatgaattgcaaaattcatgacctcatgtgaaagatagtgactgtggtagatagaataatggcccctaaagatgaccacatcctagtccttggaacctgtgaatctgctactttacttggtaaaaggggctctacagatatgattaagttaaggattttgagatgggaaggtcatcctggattatctgagtgggtgcagtgtaatcacaagggtcctttaaagatggaggcagactgtcagaggaattggcacaaaagcagaggtcacacacacacacggggggatagagagagagagagagagagaggaagatgttacactgctggctttaaagatggaggaagtggctattaagtcaagcaaggcatgcaacctcaaaagctccaaaaaacaaggaaatgaccttcagaaggaattcaaccttatattccttgctgacccattttagacttttgactatctgaactttaagttaataaagtgctgttgttttaagccaataaattggtggttatttgttacatcagcaataggaaactggtataatgatttttcaatgaaaatttagacaagattagaaaaaaaaaagaataaaaaggaacaaacaaagcctccgagaactatgggactgtgtaaatagaccaaacctatgactaattggagtacctgaaagagatagggagaatggatcaaagttggaaaacacactgtaggatatccttcaggagaacttccccaacctagcaagacagacaattttcaaatttgggaaatccagagaaccccaataagatactccttgaaaagatctaccccaagacacataatca

SEQ ID NO: 34062 - DNA, 1152 bp, Homo sapiens
ggttttattttgaacaaatggtttgtgaactggaaacatgtttttctgagctataatctgaatacagcttaaaactgtgaagaatattttcttcaagttttaagtatttcttctaatttaatgttatgtgccttaagaatagaaaatcataggctgacatttccatatatcaaatgtaagaatccctgtttgctaagaatgctacagaactaagagcaacaaagcaggttcaagagttgtcaaatgtgtcccttttccataggaagggtagatgtctacccaaatggaatattgagtatcagagacttcaaatgataacttttgtttgtttggagaaaatcttgaggacgtgatcactgtacaaaaggtaataagcaagtcttaaacaattttcccccctaccttttattttctctattgatttttttccatttatttttatttagccactaaaaatcttaaaaaaaaacacacagttttattagttctttatggtcaggaaggaagattacttctttaaatataactaaaactctggcactctctagtggtcagagaatctaaaatattgttctacatgagcttatactttacttcttcctttagctttatgaattagacataacctagatattctgccccacatgaagaaggcttgtctaatggcaaaataatgaaatcagaaattctgcatttactcataatttcacacctctagactagaagcactgagatacagtggtgtgggagtctgtgaaggcattttcttagctattaccagatgaactaaattaagaaatgttaactgtaaaaactcagacaaaccaaacctgctgggtgagggaattcctgtctctaatgcttccagatagcccatttggcttgtaagagtggatttgagacctttataaatttaaattcaaaaagagaactaaggaatagaccccttgctttgcaactagacagatctgggctcaaatccagctcatgccatttggccaagtattcagctccaagcctcagctcctcatggagcatcaggctggtaataatcaccctccaaagagtcattattgacttgaagtgagaaggagatggaaaacattgcccccaaattggcaacaaagagtattaataaaaggaagactatta

SEQ ID NO: 34063 - DNA, 1085 bp, Homo sapiens
tcttggctcactgcaaccccctcctcccctattcaagcaattcttctgcctcagtcttctaagtggctgggactacaagcgcgtgccaccacacccgcgcttataatagaaaataatttttctgtttttttgtagggatggggtttcaccatgttggccaggctggcctcgaactcctgagctcaagtgatcaacctgcctctgcctcccaaagtgctgggattacaggtgtaagccaccatgcccggcctctgatttttctatagtgagaacataactatttctgtaataatattaaaaatacttgtcagtatcacatagaattttcaacagcagattcaaataaaatgaatccttgtgtgtgtgtatatatatatatataaatgtagaaggataacatctataataggtgattactatgttgactgtatttacagggatggagaaaactcaaaagagccattagtatttttaatggagaaactcttaatccaatcaataaggaaagcaactgttatggaaagaatgagatgtccaagtgtttgaaacaatgctctgaacacacttcatacttctgaggaagagctttgaacaaaggagtaaacaagtagaatgctgagaaaaatagggagacgacagtggcacatgacacctagtttttttttttttttttctccatggttcttttggtatctctccttcctttccctgtcagccacagttctttatattaaattcttttgatggcgagaatcctggagtaggagtgagaactggactgtagatgcacctctcccactaaccacctgtttggggcaaatagtctgtctcgttgggagatgaactttacaagttcaattactaaatctgaaatatctggattagaatatttctaggttttttttctgctcttgacattctatgataactccatgacaaatgttctttttccaaataattaaaacttaaaacatttccgtttaaaccttcaaagacaaagacaacttcttctttctgcatttgagtcataaacatctaaactaataagttagatgttttagggagaatctatttgcctacaataa

SEQ ID NO: 34064 - DNA, 1032 bp, Homo sapiens
gctttaaagcacgacaagcacaatcctccacctcatgtttctcatgacccttcacacgtgaatattaagcatagttttcactatttcttcataagaaaaagatgaagtttctgaaagcctctgttcataaaatttataggaaaggggtttgtgaattgtaaagctccatatacaagtgttggataatacaactgatttgttatttcttcctattactatctgaacgattattttactttgcatttaatttgttgaagatagagaagctacctaagactgaagaaatgtaatgtgggggaaaaaatgggtaaagtgagagaaatctgagggaaaaagaaaatagtaaagtgaaaataaaggtaataggacagataatctcatctattcttattgtttaaagtgttgtttatatttactgttgtcctaacctttcccaaattaattcttgcccttcttgtcttctttgctccttccatatttagtgagttggactatggatcaggtactgtgctcagcatcagaaaatgggatgacaatgaacagagtaacaggactatatttctgaaaaaggatgaacttactggaaacaggattgcgtatgtatcgagactatgggagttagttaggagactactgggaaacttctagtaatctaagtcagagagagcctggattagagtggtagcagcccaaaggaagagaagcagacatctgagagctgtttaagagtagatcagataggaactggtaatgactcctgactaggagtgggatgagggagataaggggatgagggagataaagggaaaaagtatgaatgttaaactttctgccttgggatgctgacctcatttactgacacaggaaaagggagaagatgattaaagatgggggatgaagcaggggaacctgactagctgaatgttggatctgttcattttaaggtgcctgaaatatatccaaatggatataaatgtcaactcagttctgggctggagatatagatttggaatgcaccaacaatgcagatgg

SEQ ID NO: 34065 - DNA, 1052 bp, Homo sapiens
gagaagtaagcatgagcagtgaactcttctctcatatatgccactggcatacctgtagaactcctctacgagggtagtttcctaatcaaagaaggcatcaaataatcaaatgatgactcaaggggcaactttctattggagaaatatcttcttccaaggtaatttcagggtaattttctgaaaagatgttcaagaatgaatgaggaaaatctcagtttctaattttgccaccacatgaccatttttctctttttgataaattactttcatctctgtgcattgttttattttttgattttctctaaatattagtttgaatatctgatgagggctggacacagtatacctttttagaagatagtactttacatgggaatatttatggtactcatagtttcctgggtctcctggctaagaaaattctactttaagtatcactcatttaccaacaaggaaagaaaaaaaaagaaaaatccctggaaaattcttggtttcctctactgaaaccacagggatgtaggaagaaataaaaatctttgaaactgctttaactttttttttttttttaaagttgaagtctgctttgtggtgtgtgtgtgaaagcaagattctgcagtcaatgactttttcccaggatgttttctttttctttttctttcttttttttttttggagaagatgacgtttctccagatgtttttggggtaattatttttaaataaacaaaggaaaaaatagttgagtgttttttttttcactctaaagcagggcaatatagcatcttagagcaatccatacactaataatacacatactaataatattatgttcagtgtagcacatgcttattctgatcttttggttgtgctgactgtggagaggcgtactatgtggcttgactctgtactatacatcttttcatatcagtgtcccctttcataattattctgtgtctgtgtgaggctcaggattgcaatcacatgacaaagcacaggggacaaaggacatgtcacccagtcagttctccaaaacatgagatttttcaagaggaa

SEQ ID NO: 34066 - DNA, 1032 bp, Homo sapiens
tcattttgttattcctcacagagaactaggacagttttcagtgttgataatccttgtgaccttccctaccccaaaataagtttacatgatttcttacactggttgagtatccctaatctgaaatccaaaatgcttccaaatctgaagctcttggagcaccaataagtctcaaaggaaatactcattggaatattttggatcttcagattaggtatattcaaccagtaagtataatgcaaatattccaaagtctgaaaaaaatctgaagtccaaaacacttcttgtcccatttcggataagggatactcaacctacacgtgtttgctaaggtaggaaaatactactattgtatttaattgcacctcacttctttaataacaatcacttcttttagatttagccagttaaaatgtgcaccctatgaaagtagagacagagaataacattttaagaatttatttacaaaaagaaaaaggcagggaagctctgaattaaaaacagttatatgatggatgcctggaatcacttacctagaataactagtcgattcccactgaagttagaatctaaggacagagatatggataaaatttggcctggaaaggaacgaattacttgaacgttttctgcattgatcttccttttaaacagtctctggtcaatgtatatgaaaccaaaaccctttctatgaaacagtacttacaaaatttactgagtgctccagagaaaatgcgatacagacccctaacttatcaatgaagcaagttcaggaactaggtggtttttgaggaattctactatggagcaggttgaatgtgaacaagagaaatgtgatactttttcttactttttcttaataaggcagtgttttcctcagaaggaaatatttatttgcccaaagactatttacgtgcaacatgaagttattttgaaggttttctaatatgccatatatatcatatatggaagaaaattagcaacgaagtagttttgccagattagtcctctttaattaacgaaatataacttatt

SEQ ID NO: 34067 - DNA, 1029 bp, Homo sapiens
ttggttagaatttctttgggcaatagtttttttttttttttttttaaataacaaattctttctcagttactcccatgaacaattctaaaatcctcttgagttagtattggttattaccaatttttatagaaattccccatttcaccaaatgttaattcctatttgctacactgtaatatcaagtatcttttaaaatgtctttgatatctgtacttacattccctctctcattactatttgtgtttctctcttaatatcctcattatccgttggaggttcatctattattattgtgtttgcccattatctcttatttcttctcatttcataagtttattttttcaattttttcttctactttctttcttctcatgtatatacttatttggggaaggcaacagagtgagaaagagaaaggtgctgtttttctaatttctacggttgaatgcttagttaaaattttttcattatttcttaataataataaaatatttaaagctacataatttcctctgagtatagctttgaccatgtaccttcagtttttatgttatgttaatagaacaattacttttctaaaatgctgtaatttaattatgacttttgatttcttctttgtcatttaggagaatgcgtttcaggttctaagtgagttttttccttccaatttatcttttaattatatattaacagttttaatgcactgtgatctatgaaagtggccaacaattctgcttttcagaaacgactgactttatgttgcatatcaccaatatttgatttctgacatatattttagaataatttatatttttaaattctgaaacatgaaagtaaagctatatatgtcaattaaatccacttaatttttatcaattctaatgtttattttttcctataatttaacactgacaagtatatttcaggcccactgtgatgatcactttgtccatttctccgtgtattttttttttttttttttttttgagacggagtcccgctctttagcccaggccggattgcagtggc

SEQ ID NO: 34068 - DNA, 1023 bp, Homo sapiens
atttgtttctcacactaatatagagatcttgagcatcttgtcattaagtgtacatcctgctttctttttcctgagtgacatgaaaattaggttttcagatattcatttgaaagttgtgaggctatttggtcacataatggtggtgaactatgccatgtgaaaacctttaagaaatctcaggttttcatgccatcttgtatcaataaatacttgctttagaggtaaaggtcactgatttttaaaacaatctgtggaatagtaaacattgtaataagaagagaggtgttttttctgtcgtgtttttagttgtaccaatttatgttttatttctgtgtatattatactttacatataatttttatctcctatgatttatttggctgagtatgatattactcacattaagattgaaacttgttatctgtttcagttttttgttttggaaggagagtctatttggttaatactttgtaactttatctttgcagagttcttggacaggtttcctgtgaacttgtgtctccaaaactcaatcgggcaacagaaggtattcttttttttaaccttgaactctctcagatggccgctccagctttcgaacctggcaggtatttaaatctttttcttaagttgctttagtcataggagaacctaacagcagtgagcttttgttttaatacctggtgttatatttcatgacattagcccattcctattttctccttataggcagtcagatctcttggtgaagttgaatcgactcatggaaagatgtctaagaaattcgaagtgtatagacactgagtctctctgtgttgttgctggtgaaaaggtggggaatatgcccataattcttaatcttaggatgaatactgttgatcatggatcccggtatctatccttttattctcagaactttagttaactcagtattgtactggtttgcttcacttcagatgttcttgagtgatacccttagaactttgtgctacctctctctctctgaagggacaaaaagggtgt

SEQ ID NO: 34069 - DNA, 1032 bp, Homo sapiens
agccgcaaactctgtgcatcaactttgatgatgctttcttaacttatactacaaaaccaccttcaagtcatcttgaccaattcatgcatattgtgaaaggaaagcttgaaaatgttcgagtcatgcttgttcctagtccaagatatgttggtcttcaaaatgatgagtaagaaaatcttataaaaataataaaaaacttcttataggtaatacagatacagctagaaactttaacatccttttactttttttgctacaagttgtacaaaaattaggtatatttctctattaaagcagttaacaatgtagtccttctttataggataaatggatatgctatccagtgataaactctaattttaaatatttttctgcatgattataactataatttttttatccttttctccttctaattgtattttggaaacttactttgtgcaattagttcctgtttgtatgttaggagatacacattacaggtaggtttttgtttctagaagatgtgactaaagagtaaattgaacagattcattgcagtggaataccactttgagttattgaaagtcgaaaattgaatcgaaattactcttggaaaatttggtgaagttaagatggtatagttttgagacccacttgacatttctttaagttccaaactgtcagttttccatctagctttccatttttttttttttccttcagtgaagtagctgcttgtatttataagactcattataggaatgatgtacactagactcagtgtgatgggatgctgagtgggagatgggctcttgtgatttttatgttttttctcaatttttgtgtgtgtaaaggatactctggttgaatttaagtgttcatatggagagttttcagtacagtgtctcagcttttatctttgtgtgtaggtaccttatgaggttttatgtgaaacatgattattcctttttagttgtaactcttggctggcctggtattcgattttccaggatttggctagaatgatagaaagagggtttttcctttttg

SEQ ID NO: 34070 - DNA, 1048 bp, Homo sapiens
gaagagagatgaaagtgagactgattattttagttaactatttatttaatatatattggcatttcatgtgatagagtagaagagtgaaaaaaagaaatttgaaaatattcctagccaaaaaggggccaattatcagaaaccaagtttgttttcaagccagaagagtttagtgatcttaaaaaatgcctgtaattactgtaccattttttctgtctgcttctctgtaggctgatttcaatttaatgtgtattacttttctcaaccatgatgctaccagtctttttcctagcttatcgaaagtttggattttaaggtgggatataaaactagaacgcagctggcacatagataggcatagaggggcagcgtgaataagtgagttgctgttgtggatgatgtggaagttatgaaaagcttgtgaaataatttcacttacgatctttttagttatcttccaaacaagacattagaggaacaaaaactgagcagtctacaataggaacgactaaccaaggacaagcacagacaaatcttacaatgaagcaagataatgtaacaattaaaggtcttcagactaatgttagcataccaaaggtaacaatttaatatttaaaaattttttcctgaaagaggagagcattttgatggtgtttgtccttttcagttaccaacgtgaataatggtagaacagtgtgtaatattaaaaaaatatgttttatttctatgatctaatgtagatctaatggaatgtaaatagtttacttaagcagaatattaggtaatagtagaatgttccacatccatccagtaaaaatttaattatgattattttatgagaatctgtattcataagctttgtcttcactgtcaaatacatagatatgccattcttaacagtagtttttcatttttgtgcatattttatgtttaagtggtaatttttcacttgtcagttctgaaattttgtgtgtgtgttaggtaaacttatgtttgttacaagcctcagtggaagaatctccaactacggctcctagtaggagtgtgactc

SEQ ID NO: 34071 - DNA, 1056 bp, Homo sapiens
gtgaactcaccaacccacaatatagcctaagaattggcacattaccaatactttgaagccttctttggccgggcgcagtggctcacacctgtaatcccagtactttgggaggctgaggcgggtggatcacccgaggtcaggacttcaagaccagtctggaaaacatagcaaaaccccatctctgttaaaaatacaaaaattagctgggcatgatggcaggcacctgtaatcccagctactcaggaagctgaggcaggagaatcgcttgaatccgggaggcggaggttgcagtgagctgagagtgtgccactgcactccagccttggcgacagagtgagacttcatctcaaaaaaaaaggcagtcttcacttttcatggaattactgctatcatgaattttgtcttacccattcttttgctttcccatatagttttaccatatatgtatatactcataaatgatttaaagtttgcttttagctgttttgaactttgtttatatggaatctcacattttttaactaggaatttttttatttgactaagagctccttacgagtttatatatataaaatgccagttgatggttctttttttttgctcactttaccattgagtcatttgtatttttcttgattcgcaataattcttcataaattctgtatattaactctttgatatcatgtttatatgttgtcacctagttggaggcttatcatttaactttttcttttgatcagcagacattcttcattttcatgtaattgaatttaccattatttttcctgtatgatgtgtatttttatgtcctgaagaaatgcttctcttcctaggataataaaaatattttgttacattttttcttgaatgttttgagttttgctattcatatttaagtttttaatctatcttaatcaattattattgttcttagatttggcatgggatagtatataaccagtgatcattgtatataaccagtgatcattgtatataaccaatgatctcagcatcacttattgattattctttttttccagtggcatataatccaga

SEQ ID NO: 34072 - DNA, 1026 bp, Homo sapiens
gagagatagaagagaatccataaacttaagtataagttgtattaggggcaacagaggagacaagaatgcctcaaacttttagcttagatgactgaaggagcagtgaagccattaacttagaaaataaagaaggaaatgtctataggacatttaggtggaaggttctggtagacaactgacttagcgggtatcgctatgtaggtatgggctcagacaaaaacagaaattttagctgtgggagtcattggcatgtaaaccctatagaaactatggtagaagaatagaagagcacatacaacaggagtagaagaatgctccagagcagaactctggaagaaggccatcaaaatgttttttgtctaaagtcactgctattagtctgataggaaaatagtagtccctgccacacagctatttggtttacaattccttttgagaaaatttgtataccagctcatcctgatgattcattttccataatagaaaagactgctgtgttaaaattgaaagctggctatcagactgatctttagaacttctctgaggatttcatgataaagtgataatagaattccaacttgccatcacctcaaaaaagggaagtggtactaacagtgttagaatgtgctgtttttgtaatttgtggaagaatgtaacactaatcataatatgtaacttaagtataattcagctgtgtaataaccctgtcttatacctaccatgtgaaaacattaaaggttttagaaatctgtactaacaaatgttatttatgtatcagctgtttgtgatatagggtctgcctcctttaaatatgatatgcgccgactcagtgaaattctggcatttccaagagcatggtatagaagaagtattgcaagacgtctattccttggagaccaaactataaatttgccaagtaagcttgttatgtaattttaattttggttactgtagcagcaagacctacaattgataacacaaacgtgatcttacttggcagggtgtaccatgtgatgcgttcagtca

SEQ ID NO: 34073 - DNA, 1032 bp, Homo sapiens
agagagaagtgctaagcaaaagaacaaaacgggaagaatatagagaatgattaaatgtgaggatagctattttagaaagggtgatcatttaggccttttctgaagtgacattttagtggaaatgtgaatgaaagaacaaggctaagatgtgggggaagagagttccaggcatcgggggatactgagtccaaagttcccctagtaggaacaaacttggcttgaggatcattaaggttgccactgtggctggaacagaaatgagcaaggacgaaaatgccggacatgaattcacagaggtctactacaggtaagatttttaatatgatggttagctatcagagagttttaaacagatttgatatcggatttatcttttcaaaaaatactcccttttaaagttcactctggctactgtgtgaagaacagactataggcagttaagaatggaaggaaaccattgcaataattaccattatcattgttatgtacatagttacatcattattgtaaggaagccattgcaagagtccaggcaagaaatggtggctttcactaggatgatagaggtgtaagtggtgagaaacagtcagaatgaggatagctttttaataactttattatcacagaagtaatacgtatacattgaaaaaaactagaaaacacaagagaagcaaaaaataaaaccatcacattccactcagaaatcactgtgaacaccttagagcatacacctccagatatttttctgtgtatctgtatatatgcgtacattttaagaaaatatcaaaattcataccattttgtaggtcaacaatctccaactttccattttgctaattatctcctttagctttcaaaacacattcaaatttccatgattgatctaaaaatgtcctctataatggttttgtccaaaccagtttatccaatccaaagtcacaggttaaatatggttatgttcctttgccttcttttaatttagcacagttcattttttatatgaactgacttattgaagagatgtagccaact

SEQ ID NO: 34074 - DNA, 1050 bp, Homo sapiens
tctccacgtataaggaaatagcaagaatagggaaaaaatggttctcccttcaaatatgtttagcacatagcactcagtaaattttagcctttttctcccattatgccacatgcttatgaaatctactaaaattaaccagatgtccttttatatgtttaagataactgtataacaggcctaaaatattcaggatgaaatatagtaaacactattgctgtgtttaggttgtcaaagagatttataatcatacatatattattttttgaatgctattattatggtgaatccaggaattatgggctcatttatacaaatgtacctactgaaaatattttgtcttgagtatattatagaggcttagtgatgttcttttcctaccattagaaccatgctttagggcattacactccttaataataactgtaatttttattttagattaatttcttggactggaagaaagattgatccagtaggtgttgattatattcttcaaaaattgggctttcatcatgctaggactactattcctaaatggcttcaaagaggagtcatggatccactggacaaggttctgtcagttcttatcaaaaagctcggtactgcactacaggatgaaaaggaaaagaaaggcaaagacaaagaagaacactaaaaaagtaatttgatctgtgaacaaattatgattgtgtctgttttattacactggagtgtttttttagtataataatttgaaatataactttaaaataattctaaatttgtggctataattaaaagtttgtaagttaacctgttctagttccatcattctgtgtacagtgaagtattgcatgataatgtaaattttgtgaaaaactagattaaaatatataactgcttgttatggtttataattatataatgtgcaatacaattcctgcatctttaaaatgtctgcagaataactgtgaatttttttgttattggattggccgtaacttttagaaaaaaatcttgttgatgataatgtgattttggggaggtcattaattgctttttcttttttaa

SEQ ID NO: 34075 - DNA, 1034 bp, Homo sapiens
tcctgaatgagcttcttaccacctggtcccttgccttctcttcctgccatccctcagcctcagtgcgctcttcattccaccatagagtgtgccctgctggaccccactttggttaggcttcctccatttcagggtagtgagctgctagcccctttgaagagttcttactagtttacgggtgcctcaggttgatttcctggggttttggataaagccacctttccatctcttcactactgcctttggggtaaatagaaccattgatttaataatacacgtactagattctctccccccacctctctttggtaatatctggcaagtggatagcaataattttacttaatgaacgtgatatttactgtaataaatattgggtgcagtaaacaaatgaagtcagaatctaatagctcatttaatcttggaaatcatgtaatcagtacagcaatgaaaggacaattcatgagtcatagatattaccacaccttaggagccttttaagatgagtttgatgccaagtgacttcagcctagaaaaggcaatatcccctcatgacatgccctgaggggtttcatttgtttataaaatgaccgttatgtaattagactttgacaatggtgtaacaattgggttttaagtattctcattttgatttatgatgccattttatgtggaaggacataattttaaagtttaattagaaaataaaatgttacagatgtaatgaacaaaacaagaacggttctttaaatatcataagcataaaattgactttcttcatctatacactgattctgagaactcatcatcagtgatgttgaaaagacaatttaaggtctcacattattggaactactattttaaaaccacgagatgcctgtacaagctggtaattacacatgtgctgtagtctttgcttgtttttccaattctagtgtttgttgattttccagataccctacttgggcccctatgtcccgtagcacacgtctgtaagaaggctggcatgggataaaagtctatgaccatgaaac

SEQ ID NO: 34076 - DNA, 1048 bp, Homo sapiens
agacagccaatattcagtgtttatgtctcatccagctgtcttctgtcactcttcctgcacaaggtgacttttgacttgaccggtgtatctttgatacttactcatttacagaaatgtataatggatgtgtgtgtgtgtgtgtgtgtgtatgtgtgtatttgtatttttatagagctattgacttctgcaatttaacctctaagatgaattatccaatagaattctgaaatgaaaagttcacagattttcaaggtattttggagatttaaaaattgaagagaagctatgtgaatattaagtgtatgttccagatataattgaacaattgaaaggaatgatcctggtttaatttataattaagctatacattaatttataatgaaaacttgtaattaaatgataactcaaattagccaagaaaaaagtattttttaaaagaaatttgtacagagtagtaatgatctggctgcattctgtgaacagattattctctgttcataatttaggcaccttaagatgctggcaccttaaggtaggaaccatgacttctttatataaataaacatcataaaaagctcagtactttttactcagagagtgctcactaaatgtcagctgatgaggaaaacattctctgtggaacttgctgtgaaataactactcatgaggcatatgctgtataaagcttggtcaaagtttacagttttcttggtgtcttgacatctgtgtttagatacttggtcaatctttaaatgaagataattatatatagcaaagttatatttgggaaacatttcggaattttggagactggctattagtttttcttagaataatctagagaaagatgaatcatttttcaggaaaaattgtttagaacttttattgggaattctgatttccttaaaagtatttaagatttttatcatgtactattgttgtaggaaaatcctggttcttgtcacacgcccaggaaagattaggctcacagacactttggagggtgaggggttatggaatttattggtcagaaagaaaaaaggaaaaa

SEQ ID NO: 34077 - DNA, 1035 bp, Homo sapiens
ttgtggcaggaactgtgcccgatgcatggccaagtacaaggctattaagaagtttgtcatttgaaacatagtagaggctgcagctatcaggtacgtttccaaagcgagtgtctttgacacctccgtgcttctcaagttgtatgtgaagctacattgctgtgtcagttgtgccattcatagcaaggtagtcaggaattgatcttgtgaagcccacacgaaccaaataccccgatcccgatttagacctgtgggtgctgccccacgacctccactaaagcccaggtaaggagctgagtccttaaggtctgaagaaaaactatcttctggaaaaaaataaaatgaaaattgtatttaaaaaaagagaaaaacatcgtggacttgaaagacttcaatctcctggtacgcacattgcccccagagctcacagatgtttcaagtctgtaaaaatcagaaaacataggaaagttaccagcagatgtgtggttgtcatagatataaaaaagtgggatacagggtgtttttggaaactctaggtaagtagtaagcttgatacagatctctgaaaaaaactccaagaggtttgagaatactgaaaaagaagataacagagtaagtagtaactagggtgctacaatgggagagtcataatatatacatagccttcgtgtgttaatttccatggaatatttgaccgaatttctcatagcaaccttctgtaaaagatgtgtattttcttcaagagagtctagagtttttcgtatttaggattcttaggccaggctccaacagctaaataagttttattggcacacagccaccctctttgtttaaacattgtctgtggccactttcacactacaatggcagatacccctcaaggtgtaaaatatttacttcctggccctttaccccagaaaatgtgctgacccctggcttaggccatatttttcatgaggagtggacactccttagtcatggcatttctgctattccgcactattacatttaatactaatttcctgacacttgatgtca

SEQ ID NO: 34078 - DNA, 1771 bp, Homo sapiens
ttcaggccttcaactgatttgatgtgggccccccacaatatggagggcaatctactctactcaaagtccactgattcaaatgtaaatttcattctaaaacacccttacagaatcatccagaataatgtttgacctaatagctgggcactatggcccagccaagctgacacataaaattaaccatcacaaggcatttgttgacataaaccctagactggcctgactgtccaaagagggtggtgaataagccctggcttgggtaagaccaacttattcactatgatgccccaaggacacgggtcagagacttcctaacagaggtactagactggcctcctgttgacactgagaggttcagttttgctttgagcctcagctcaacactgagaccctaaggagtctccttcttccatggctagtgccttccaggggcacatggagtccaggttctttcttctggtttctcttgtctttcccctgaggtgtgtgggttagtttttcttcttcaggatttctgaaaataggaataataatcttattccagaagaaaggacataattatgttaaacaaaaagggaacattcccaacttgatcacagtgatcgtgatgtggagatgttgtgggctgctgttgcctgtattctggagacttgtggtcacagcagtaaacaattgctgctgggcctgttgtctgtcagctgccatctgctccaaagcaccccctactcttcgcttgtccctttagttgacctgggcctcagagcctgtttctgaggatatgggccacagaggggaattgaggctgcaggctgattacatagcactggtggtagtttcttttaaagtcatgttctgatctgtggttgcaaatgtctgctgcttctgtcagagcattattcccctttcatgtggaagaaaactgccattgattagaagcaggagtatcatcgtcagtagaagcacttgtgctttaggttctttgagcctcatgagaggtccaagatgacactgaagtaaaggaaggtggataccagatgccttggctactttttagaatacatcactggcactgctaggagagagctgggattcatgagagtgggattaggtgctgggccaggagcagagagtgttctttgtactgtggatctcccttacttgcttcctggacaactggctcttccggactgggtctcttggtctatccttgtgtccttaggggcaaggtgcttctccactttgaagctaaaacaccatatcagaatcctaccaaatacatagacattttaacatgcagcaaaacaataaaatctctttggtggcttagttgctatagaaaaagacaaatgttcccaaccaaagtgcccatcaatgatagactagataaagaaaatgtggcacatacataccatggaatactatgcagccacaaaaaggatgagttcatgtcctttgcagggaaatggatgaagctggaaaccatcattctcagcaaactaacacaagaacagaaaaccaaacaccacatgttctcagtcatgagtgggagttgaacaatgagaacacatggacacagggaagggaacatcacacaccagggcctgtcagggggtggggggctaggggagggatagcattaggagaaatacctaatgtagatgacgggttgatgggtgcagcaaaccaccatggcacgtgtatacctgtgtaacaaacctgcacgttctgcacatgtatcccagaacttaaagtaaaataaaaaaaaaaagac

SEQ ID NO: 34079 - DNA, 1025 bp, Homo sapiens
agtctcctagcacctgtaaaaaactccagtatgacaccaatcacatggctgcaattctttctttttctaaaaatatatatgtttagagatgtattggaaggagttggcttacaccatagtgggggctggtgaggcaagtctgagatccataggcaggctggcagaactggcaggctagaattctctggcataggctgaagtggctgtccacaggcagaatttctgctgggaagcttcagctctgctcataaggcctttcaactgattgaaacaggcctgcaacattttcaagaataatgttctttactcgaagtcaattgttgaaacaggcctgcaacattttcaagaataatcttctttactggaagtcaattgattatggactttaatcacatttacaaagtaccttcacagcaacacatagattagtgtttcattgaattactggggactgcagcctagccaagttgatacattaaaaaaaaatcacactgcatcttttgattttctttctgaatctctgcttttctttttcctaattttggcctctgtaaacctttcatttttttcatgctttagcattgtgagggacttaatactgggatattttttcacaatatcttgttcaccatcttacctgtcactcttttccctgaggtactttgatccaacagacattcactcgattctgttgtgtgtcgggcagtgtgccactgctagggatacagaaatggataaggtatagttccctaccctcaaaaagctcaccgtcagttggtgggggacagacaggtatggtataaaattactgtgagtggtataaaattacctgaaggcataaaatatccagctagtgttaaaattttcctgatggtctcatattttctttacagttggtttattctccatcagaagttgaacaaggttcacatatcccttttgggtgatacgtctccaaactccctttataattgagaaattctctctttttccttgaactcatgaatgtgcgtattttcagtcat

SEQ ID NO: 34080 - DNA, 1034 bp, Homo sapiens
ctgatctcaagcaatccacccatctcccaaagtactgagattataggcatgaaccaccacgcctggccttctctgtgttttatttggaaatgcattgcctaatttccaaatatttggggattttccagatatcatattgctaacatttctactttaatacatcatatgatttcagtcatttcaaatgtattgaggcttgttttatggtcaagcatataatttattcttgggaacgttctatgtgcccttgaaaagaatgtagattctgcagatgttgggtgtagtgatctttaagtgtcattttgggcatatctgcatgcaaaagaatgaagttgtgccacataccacatacaaaaattaactcaaaatgtattaaaacctaaatagaaggggtaaaactaaaacttggaggaatgcataggtgtaaaccttcatgaccctagattaggcagtgattttttagatatgacaccaaaagtacaagcaacaaaagaagaacattgataaattggacttcatgaaaatttaaagtgtttatgcttcaaaggacaacatcaagaaagtgaaaagaggccgggcgcggtggctcatgcctgtaatcccagcactttgggaggccgaggcgggcggatcacgaggtcaggagatcgagaccatcctggctaacacatgaaaccccgactctactaaaaatacaaaaaattagccgggcgtggtggcgggcgcctgtagtcccaactactcgggaggctgaggcaggagaatggcgtgaacccaggaggcggagcttgcagtgagccgagattgcgccactgcactcccgcctgggtgaaagagcgagactccgtctcaaaaaaaaaaaaaataaataaaagtaagtgaaaagataccccacaggatgggagaaaatattctcacatcatatgtctgaacgggatttgtgtctagaacatataatgaactctttcaactcaataataaaaagacaatctaaaaatgaatcaaagatctaagtagacagttcttcaaagaag

SEQ ID NO: 34081 - DNA, 1291 bp, Homo sapiens
gctttattcgaaaagaggcttttaaaatgtgcatgtttagaaacaaaatttcttcatggaaatcatatacattagaaaatcacagtcagatgtttaatcaatccaaaatgtccactatttcttatgtcattcgttagtctacatgtttctaaacatataaatgtgaatttaatcaattcctttcatagttttataattctctggcagttccttatgatagagtttataaaacagtcctgtgtaaactgctggaagttcttccacagtcaggtcaattttgtcaaacccttctctgtacccatacagcagcagcctagcaactctgctggtgatgggagttgtattttcagtcttcgccaggtcattgagatccatccactcacatcttaagcattcttcctggcaaaaatttatggtgaatgaatatggctttaggcggcagatgatatacatatctgacttcccaaaagctccaggatttgtgtgctgttgccgaatactcaggacggacctgaattctgattttataccagtctcttcaaaaacttctcgaaccgctgtgtctcctacgtaaaaaaagagatgtacaaatcaataataattacacttttagaaactgtatcatcaaagattttcagttaaagtagcattatgtaaaggctcaaaacattaccctaacaaagtaaagttttcaatacaaattctttgccttgtggatatcaagaaatcccaaaatattttcttaccactgtaaattcaagaagcttttgaaatgctgaatatttctttggctgctacttggaggcttatctacctgtacatttttggggtcagctctttttaacttcttgctgctctttttcccaaaaggtaaaaatatagattgaaaagttaaaacattttgcatggctgcagttcctttgtttcttgagataagattccaaagaacttagattcatttcttcaacaccgaaatgctggaggtgtttgatcagttttcaagaaacttggaatataaataattttataattcaacaaaggttttcacattttataaggttgatttttcaattaaatgcaaatttgtgtggcaggatttttattgccattaacatatttttgtggctgctttttctacacatccagatggtccctctaactgggctttctctaattttgtgatgttctgtcattgtctcccaaagtatttaggagaagccctttaaaaagctgccttcctctaccactttgctggaaagcttcacaattgtcacagacaaagatttttgtt

SEQ ID NO: 34082 - DNA, 1090 bp, Homo sapiens
gaacctatcttctttcacagatgccgttacagctgtttcaaagactgctggttttgaaaacgctcagtccctcccaccacgctgtgcactgctgcgctccactcaggggattacggcgcaggggcggaccctcgctgacttctgccccggaagtttttctctcagttgaagcgcgcacattgagtcggcttttctactgcttcggctagggtaccttgtgaccatgtcttccaagaagaatagaaagcggttgaaccaaagcgcggaaaatggttcgtccttgccctctgctgcttcctcttgtgcggaggcacgggctccttctgctggatcagacttcgcggcaacctccgggactctgacggtgaccaacttattagaaaagggtaaagaattccgggtgggagactagaggccgagggggcgcaacctgaggggcgggagactcagtgatactgacttggggtgcagagacttttgaaagttgggcgtggcatgggtctgagagcggcacagaagcgtgtaagacttctgtatgtaagaagcatgcaaacgtagccgcgcctgcactggagaagttaggctgaaatggtttatccgtgtccaaggtttctcttttgtaaattattttgaatttttaagttgcacttgaaacgctttgtctcatttaacattaacgacacatttaattgcaaaattgttcataactagcgaacatgggatacttatcctaaaaaactaaataaccaattcagtaaaaatgtggatcactctgcctttaggagtgatgatagcattttcttccagtactacgcaggttatgatatttaataactgctagtaactgcacactagtgttagcagtatatatagctcatctaatttctacagaagccgtgaccgatgggtatagtaatgacagttttatagagggaggaaagttaacgtgattccattcaggctacacaggtgctaagtggcagagccgatatttgagtccagatgtgtttgacttaaaagccattcctagatgacagctcctttgatttgggagaacgtatttatactgaaaagtcttataaattgaatt

SEQ ID NO: 34083 - DNA, 1041 bp, Homo sapiens
gttattaattagagtctttctccaagctaggcaactttataaagggaattattagtttaggtcagcattttaaaaatgtttttgcctatgacaataaaaaatggatttttcatcagattctttgtatatacacatccatagataatagtgctcatatgtgtgcatgtgtgtatgtatgtgttagaagttaatgttttacaaagcagtatttaccctttctatattcagtgtaccctgcatttcttattctattaacaaagtgctgaatgaggctgactgaaatgatttcattacccttgtgttttgaagaacattgatttaggccactaaggcaccagattccaaatgatattttcatggctatatgtttctgaaaaatgcccatcatttcaaaattgtatacattatttattttaaggttgcaggtggattattcttttgattaagtctatattataaccatatacatgtaattttacatcacagtttagtttctggtgtacctaatgctgatttctgttcccttcttatccttttacagtgacaaagatatggaaattaatgaagaagaactgactggttgtatcctgagaaaactaggtgagacaaatattttaaattgttttcttaagttttaagctgcaaggcatcagcaaataaagtgtctttgagggcttatatatgcatagtagttttcttcaaaatagctttgagaatattcccctcaatgaatgaatatacttttaagatagggatgtgctacttttcctggttaattggcagttgagcagtggaaagaatatatgacttgtctgtggaaagagtcagtggtagaattgagacttttaacctttgcattcttgccctttccagtgacagatgctatcttggagtgttggtttgggtgtgccattttcatttagtttattattgaatatggaatgcctggctatttgttgatgtgattgatagaatctgagatctactgagtgtggaggatttcagagaatcatttccttctgtctccagatggtgttatag

SEQ ID NO: 34084 - DNA, 1026 bp, Homo sapiens
agtgaaggacaagtgttggttcttggggccacaaatcgccctcatgccttggatgctgctctccgaagacctgggcgatttgataaagagattgagattggagttcccaatgctcaggaccggctagatattctccagaaactgcttcgaagggtaccccatttgctcactgaggctgagctgctgcagctggcaaatagtgctcatggatacgttggagcagacttgaaagtcttgtgtaatgaagcaggtgagtgtggtttgctatggtgagtctctattgatgcacttatctccagtttacttacatacaaataatttatattttacagatttcttaatggaagtagctttgtttctaattataaaatgtgtaatttttatttgaaaaaatttttattggaaaaacctagatgattcagaagactataaaaaaaaataaaaatcactcaatcctacctctaaaggataaccaccattatagtgtatacagtcagccctccatatccttgggctcagcatctgaggagtcaaccaactgtggtctgaaaatattcaggaaaaaaaagttaaaacagtaaaaaataataaaaacttaaaaaatatagtatcacaactacagttgacccttgaactatgagggcttgaactgcatgggtccacttatatatgaatatttttcaataaatatattggaaaattttttggagatttgcaacaatttgaaaaagcttgctttttctttagcttactttattgtaagaatacagcatataatgcatataaaaaatatggttaatcagctgtttatattattggcaaggcttcaggtcaacaataggctattagtagttagtttttgggggagtcagaagttatgcatagttttttgactgcacagggattggtgtccctgacccccaagttgttgaggggtcaactgtatttacatagcatttacatgggatcaggtaaaagtaatctagagattatttaaattatacgggaggatgtgtgtagtctata

SEQ ID NO: 34085 - DNA, 1075 bp, Homo sapiens
agtggagtgacccttcaattggttgaggctttatactatattttcacattttcaaacaaagtatcaagaatgtttacctgtatgttggatatttattaataaaccatattaatctttctattgataccaagatattgacattgtacttagcagagaaaaaaatcatgaaatgaccataatcttgtactttctaacattaatgcctaggttatcttcatcatctacagagaacaatgaccatttttccaggttctctaatctctttccttcagttaagccagataattaaaaagcagtatatatacattcagttacattgcctgaataaagaaatctcttcactggattattattttatgccatatccttggcttttgcagacaattgctgtaagaacaacagcaataatgtagagttggcatgatggtaattgcaataaaaacagtgaccccagcaatttcctttctgattattgtcaggccacagtttgcctaggtagttgctctaaactgaataaaatctgcatacaaatttcttaccacccctaacccctcaacaaaaacacactctgctgtttatctaaagcttgttttattgggtgggccctgatccttgttttagtgttcactttcttaattccttgtccacagtcccccttgtgtaaaacttaatttaccacatgtaaatgaaaagtactagttttgtttatttgactttatattatgttatgaataggcatttcttgctttgtactacaatcgtttttacagccctatactacaggcatttcttgctttgcagtctagtacaaagcaagtatagggctgtagtatagggctgtaaaaatgattgtgcaaggtgaaattatgcagaatgatcttaatcagtgggaaaaattacaagtgttacataacttttaaacattttgtcaaaacattaagaacgttcattcttggttataaatgttgaggcagtgcattttggctgtataacagatcccttgctagtttccctacctcttaacttatttctttgactagcccttcattcacacactgacagcctagtactccat

SEQ ID NO: 34086 - DNA, 1029 bp, Homo sapiens
accagtccttttaaactattactaccactttttccctaggtcataatttaataaaggagttcagtaatttaagttcctcatctatatctaatatgtaatattttataaggatttaagttgagtaaacatttgctctcagagcgtgaaccagtttctcttttttgttgttgctggcattattgccttgtgtatgactttatgagctactttcttcctgtgtacatatacacattctttcagttttaaaagatgtgatttttaaaaaagacccctttgaatgtaactattatgtggcaagaaagccttgctttggttaggtattttgctgtgtgataaagatcctttggtaaaattcaggaaagctttggaccttaaaaaatcattcccttcctgatgcagtattttattagaagataggtgagttctgagtatttatagaatctgggttggtgttaaggcatctctgaagtctatacaaagtataagactgtatcttaacaaggactgtagaaactgctgaaagagcccttaaagtttacctaattctgcctctggtttcacaaataaagggtgctgaatccagaaaaatctttctcctggtaagaattcattgtatttttatgatatttatttcctggtttccctgtggttaataagctctaaaatgtcttaggatttttgtcactacggcttaatctaatagtagccttctttggcttcctaatgttgggtgtcctcgatattagatatatttcttgaagtaggatgtaaggcttacagtaaacttaactgcatttttctaaatcaagctgtctgacttggcctgtttagtgcttgtattgttgttttctttctgtgtaacaaattaccacaaatttagcagcttcgcacccatttgttagttcacatttcttaggttagaatgtgggcacagcatgactagtttgtctgctcaggatttaaactaaagactgaaaacacagtgttggctagactgcattcgcattaggagctcatgtttctaaactc

SEQ ID NO: 34087 - DNA, 1029 bp, Homo sapiens
tttagtgatctggatagaagatcaaaccaactacagcattctcttaagccaaagcctaatccagagcaaagccctaatgctcttcaattctgtgaaggcggagaaaggtcaggaagctgcagaagaaaagttggcagctagcagaacttgggtcattaagtttaaggaaagaagctatctgcataacataaaaatgtaaagtgaagcagcaagtgctgatgtagaagccgtagccagttatacagaaaatctagctaagataattaatgaaggtggttaactaaacaacagatttttaatgtagcaaaaacagccttatattagaagaagatggtaatctaggactttcatagctagagaagagaaattaatgcctggcttcacgcttcaaaggatagggtgactctgttgttaggggctaatgcagctggtgactacgtggaagccagtgctcatttaccattctgaaaatcctagggttctgaacagttatgttaagtctactctgcctgtgctcgatcaatggaaaaacaaagcctggttgacagcacatctgtttacggcacagttttctcaatatttgaagctcactgtcgatacctattgctgaggaaaaaaaaagattccttttgagatgttactgttcattgacaatgcacatggttactcaaggctctgatggaaatgcacaaggagaattaatgtttttgtgtctgctaaaacagtatctattctgcagcctatggatgaaggagtaatattgactttcaagtcttatgatataagaaatacgtttcttaaggctattgctgctgtaatagtagatatgggcaaagtaaacctccttgaaaggagtcaccattctagatgccatgaagatcattcatgatttatgggaggaggtgaaaatacgtcaactttaacaggagtctagaagaagttgattccagccctcagggataattttgagggcttcaagacatcagtggaggaagtaactacagataaggtagatacagcaaaagagct

SEQ ID NO: 34088 - DNA, 1070 bp, Homo sapiens
agaggctgtaaaataaatatattctctattttgaggggctgggatttaaatttggctttaactcaggggtttcattactaaagagaaaaactaacagtctctgcgattacctgttagcaccatcagctgtcattgtccactccttcctctttgaaacattcctctttgttttacgtgacacagtaatacctaatttttcttctatttctttgtcctccttgactcctttacatatttattctggtctgcctagccacagaatgttgcagtttgtcaaggctgggcacgggacccatcttctctcatccacatccatggcttcagttgtcagctgtgattcagtgcctaattcagctcagatctttgctctgaccgattcaaccatctacttacatgtctcaaaggcacttgcagttcaacatgtttttaaattttgttctaaattatatatataattatataatcttaattttatgaagtaaattctattaccatccttgatcatacacgtgagaaactgaaacacagatggttaagaaacttgaccaacatagctggtaactgttatgtgaggttttttgttgttgttttgtttttgaggtagggtcttactctgttgcccagactgaagagcagtggtgcaatcatagctcattgcaacctcaaactcctgggctcaaaccatcccccacctcagtctcccaagtagcagggactataggtgcaggccacagttcccagctaatatatatatattttttaatttatgtagatatgaggtctctctatgttgctgaggctggtttcaaactcctggcctcaagcagtcctttcacctcagcttcccaaagtactgagatgacaggcgtgagacacgatgccaggttcagttctgtcagttttgataaatgcatagaattgggtaaccaccaacacaatcacaatgcaaaacaatttatttactccaaaaatttattcttgcagccaccactggtgggatgtcttctttccaccactgacccctggcaactactgatctgtcctgtagttttgcccatttcccaaatgtc

SEQ ID NO: 34089 - DNA, 1032 bp, Homo sapiens
cctttctactttgtttctatgaatttgactgctctggatacctcatataagtggaattgtgcagtatgtgtcttttgtaactggcttattttaatttagcataacgtcctcaagattattttatgttatataatgtatcagaatttcttttttgaggctgaatattttattatatgtatataccacatcttgttatccattcatctgtagatggacagttaggttgtatccacctcttggctattatgaatagtggtattacaaacatggtgtgtgaatatctatttgagatctgctttcaattttttgatatgtactcagaagtgaaattgctagatcatatagtatttctatttttaatgttttgaataactgccatactattttccacagcagctgcaccattttatattcattccaatagtgggaacaaggttttaaatttctgattcttttcttttttcttttttgatagtatgtatcctaatgggtatgaggcgacatgcattgtgattgtgatctgtacttccctaatgattagtgattttcactatattttcatgtgcttcttggccttttcccccccagatttattgaagtatgattgacaaacaaaaattgcatatctttagagtgtacaacatgatgtttatatacacagacacatatacattgttattaactgtagtcaccaccatgctctacattaggtctttaatacttattcatcttgtggctgagggtttgtatcctttgactaatatcgcacttttcccaacccttaggtcccaaccattctattctctgttaataggagttcagctgttttttagattccacatataagtgagatcatgtagtacttgtccttctgtgtttggcttatttcacttagcgtgatgttttcagagttcatccatgttgtcgcaaatggcaagatttccttcttttttatggctgaattatatttgtgtgtgtgtgtgtgtgtatacatatatgtacattcacaatagccaagctatggaaacaacc

SEQ ID NO: 34090 - DNA, 1130 bp, Homo sapiens
ccagtttttaatagggttatgtgttctcttgatattgagtagtttgagttccttgtatattttagatattagctctttattagatgtatgatttgcatatgtttctcccaatctggggtttttctcttcactctattgtttctttggtgtgcagaagctttttagtttaatgcagttccattggtttatttttgctttcattgcctgtgcttttgaggttatatccaagaaatctctgtctgtggagctttttctcttaggttttcttctagtagttttattttcaggtcttctgcttaagtcttcaatttattttgacttgattcatgtataaggggtgagaaaagggtccatttttattctatatgtggatattcagtttgctcgtcatcacttattgtagagactgtcctttccccattgtatgttcttggcatcatcatcaaaaatcaattgactatagacatgtggatttatttctgctctctctgtcctattccattcgttgatgtgtctgttttgatgctaggtatggctttgcagtatattttataatctgtttgtgtgatgcttccagctttgttctttttggtcaagattattttgactattctgggcctttgtgattccatatgaattttaggatttttttttttttttttgcaaaggatcataagaaactactatgaacaattatatgtcaacaaatcatgtaacctagaaaaatggatagaaacatttaacataacaaaactgaatcaagagattggaaatctgaacagaccaataattagtaaggagattgactcagtaagtagaagtctgtcatcagtggaaagcccagaaccacatgactttatggctgaattctaccacacgtttaaagaagggctaatactaatcctcctcaaactcttctgaaaaattgaagaggagggaatacctccagactcattttatgaggccagaatcaccctcttaccaaagccagacaaagacattacaaaacaaaactataggccagtattcctgatgatcattgatgtaaaaattctcaacaaaatactagcaaaccatagtcaatagtacattataaggatcatttaccagtagatcaagtgggatttatt

SEQ ID NO: 34091 - DNA, 1049 bp, Homo sapiens
tgagctgggttgtttgttttttgtttgttgttgttgggttttaggtattccctatatattctggatattaatcccttatcagatagatgatttgcaaacattttctttcattctgtgggttgcctttttactcacttgccacttttttgtagcaaacgtgacccctcctaaaaggggggatatatgtattttaagaccattccttggcagtattgtccttagagctttaggttgactatttgaattcgtatggtctttgactcatctcatcatctaaaactccttgatgttttcctcctttctttaatgttatatagacacaactgggacagctgacagtgaatataggttatatttttgcgaagaatttagcaagagaggttggctgtttggcattaaatatctgtatcactgtgaagtttttaattgtttttggatactaattatcactgaacatgacctagaacaataccttattacatagagttactcatttgtcaaatgtaggaatgaatgtatgtatgcatgcatgtaagtacacatgcatatagccttggtagttactacagtgctatcatagatgtaaagtctttcacaggcctgggtagacagcagtcatgttttattcatggcctagtctagcatggttcctggtactcttaagttttggtgaatgttcgtcatataaataaatatatttaatttagaaagcatcagaaaaactaacatttggataaagcagatataattttgtattatatatgtgagtaattttctttcatctttaaattgtcatatttccaaggaatctattcattgttgatttcatgtccctcttaaacaacttgagatacgttaactttggtaatctgtcatagacttcacttcattctgtggcctttaatttaagagaatggtagttctttagatgctctctcagggttaatctcccaacagctggaaaaccaagaatggctgtgaaaagtacttctttacctaatacaggattgcataactacttgcttttcccttaaaaataatctgcagta

SEQ ID NO: 34092 - DNA, 1028 bp, Homo sapiens
gttatcttactctaacacttaaatgctgtatgatcaaagttaactaatttcttaaatttaatgaatctctttaaaccaggagatgtcatgtcttggttgtgcatggtatacataggaatgatagtttaaggaaacccatttctagatctttagtgcctaaaactgatctgcttgagaattcacttgtgatgggggtggaagtttctcttctccaaactcctctttacctctgaagcatcaaacaagtgggcagtgggaaatacaggtattacgtttgagagaatagatggcactaaagccatctattattaaactggtactcagtaccagtttactgagtgtggtctgaagatcataataattaccatttgcctttttcattcttattttctcagtagttacaattaaaaaagattttcagttgttatctgtcatcattcctgatatataatatagacagatttcaaatacttgaggaatatgattagaacagaattacttctcgcttatttgtatgaacaaggtttctctgtactttattccacaaattttttttagaaattgaaatagaatctaaaaaattgaattgtagcaataagtaatagtttacaatgtctataaaaattcactggggagggagactaataagaggattccagctgtctcattaagaaacgaactttctataaccttaatgtttaattatattttccaaaaatcattaatacatttatgtaattgtacatgaatcattgtaatgctcattcaatccagaagaaacgtaatacttagaaccttatgttcatatgagtgaacactttttaaaatttcaaaatatgtgcatatttttctaagaattattacaagatgatcagagaaagaaggaaattctattgggatagtagagtagaagtacaaattcaaggagaaaaaaagagcagtgtaaaatttctcaaagatatcttttaaatagatggtagtgttaaatcactgtatatttaaatctgttgaatatgttgaaagagttg

SEQ ID NO: 34093 - DNA, 1034 bp, Homo sapiens
taccccctactttgtatggtttacattggtttctatgtgaatcatttgattattgcattcatgttttatctcccaaatactgctagctcccttaggatgaggttattgttttatataaaagatccctttcaaaaaagtagtctcaaaaaaaaattgtaactcttgatttacatagcaaagtattaattaacagcatcttccaagatcagacgagattgagcgtgttcggggtggtatggcagtagacaagtaacagcatcttaattagttcacgtaaaacaaatctctagccacattcactccaactttcaatatcacaaaatgtgtggtatttcctaaaaacatagctttctatgtcatcatcaagtgaaagtaaatacctcccccctctataaaagaacaaaacctattcaacttaaataatgaaatatgttattgttaaaagaatcctagagtcacagaaactggatactgaaaaggaagtttgaactaagtcgatagcattgggagtgggtgtaaagagtggctaggaatgacatcttccttgttccccatacgcacatataccactctattttgccagatacaccaggcagctttttcaaatacacacacacacacccacctttacaccttaacctctcactgtggcattactagggtagtgagcctctgtgaatgatgaaagtgagtagtgtctttggtgtgttgagccaaaaaatagattgaaatcactgacaataccaatcctcatttgacacatatgaccattacagctttgagaagataaaatgacttgttccaaattacttttggcagagaaaataacctgaatctcaggtcaagttgtgctctatttcttttgtacatttaaaagtgtggggatcctcttggaattagcctgtgaaatgtatttgcattgaaaggtcaatctcaggaatttcagagcaaaggttttttttgtatgtatgggtgaaaggacacttacagttttagtatcaatgcaatttgatataaactcattagaaagtcta

SEQ ID NO: 34094 - DNA, 1052 bp, Homo sapiens
aaagtgaaaataaacagtgaaaagccattagtaagttgccaataatgttgattctttggttagcgtgataaatcaaatttcccagaggcagtcacataaattatagcattatgttgctaagatgaatttggccaaattatgcttcatttgtagcagagtcaatcttaaaactcaggtctcgtaactgcctgccaagactatccctttattttgtaggtgaaacctaggcaaagccaatttggtgctcactcaccccttcccagaaatgaagttggttgatggctcttttgaaagtattaagttcaggtatctgaaaaattggaggaatattagtaatagttaacctttatttagctactgagttggtgctgtacctgtttatctcgtttaatttttattctatctcatatgaggtagatgttgttatgcccattttactgtgttttattatctatctagtattcaaaggttcataacatcaaaaaagtcataataactgttacaatagctactgtagatccttatttttgacactaccctttactctgttttacatatcattttatttgtcatgcaactctgtgagagtctaagtatgaatgtctacattttaaatatgtaccaccttacactaaataggttgaagtaattttgcccaaactcacacagctaatagctgaaataagtgaagttttaactcaggtctgatttcaaatttcatttctttcctgctactttatcttacttcacatatataattttacctcttaccaaaataagactagtgttacctaggaagtggggtaggcatgatagatatgtttttttcttatacatgaaggagttcttatgattctcacgctctgattttctaaactaaaaatatgttcctgttccattgttatcaaaatgtaaaaatcagttaagtaccacaatatatgggggctttaaaaagttacttagaaaatatgcattgtacagtgagccgagatcgcgccactgcactccagcctgagcaacagagcgagactccgtctaaaaaaaaaaaagaa

SEQ ID NO: 34095 - DNA, 1064 bp, Homo sapiens
gccagagcaaagagattggacacaaaagatcattatattcaaagggctgcacatttgataagacattgcagaggttgaagagagcatagtatgttcttattctaaagacagtgggaaacaaatgaagctttttaaggatgtgggtggagggttgctggcaataatcatgttagccttaaaaaatcatttcatcattccagcaacctctaagaacagtctttgaggaatgtggcaagagtagacacgaggataaatgtgaggaagtggttcaaacagtgggaacagaacaaagtggacaaagctacttacatggaatatacaaaatttggcaattttggatgtaggaaaggagaaagaagatgcacagttcttaggtttctgggatgatggaaatgccgtttcctgagaatggaaatatcgcaagttttgagagaaaattattagatatctttatttggatatacctgtatgctgtgtcagttagagagatatcaagtaggcagtttgacacactggtgctctgaggagaaatttggacccaatatctagattttgggaatcatttatatgcatactttagagatatcgtatgttcggttccagatcagcaaaataaagtgagtttctcaatctattaaatgtgcaaaagaattatgtctaaaaaaacaattttttttattgtttcagaatactttattgctaaaaaaatgctagcaatcatctgagccttcagcaaatcatagtctttgctggtgggtcttgcctccataaagatgactgctgactgatcagggtggtggttgctgaaggttgaagtggctatggcagtttcttaagattaacagtgaagtttgccacatccattgactcttgttttcaggaaagatttctccatagcatgtgatgctgcttggcaacattttacccacaatataacttttaaaactggagtcaattctctctgccactgctttatcaactaagtttatgtaatatcctgaattatttgttgacatttcagtaaggttcacagcgtcttcaccaggagtagatttcatcgcaag

SEQ ID NO: 34096 - DNA, 1209 bp, Homo sapiens
cctgggcaccgtagggagacccgtctgtccaaaaaaataaaatttaaatgttagccagatgtggtagcacacacctgtggtcccacctattcgggaggctgaggtgggaggaccgcttggaccctggaggtcaagtctgtagtgagccatgatcgcgctactgcagtccagcatgggcaacagagcaagaccccatctcaaataaataaataaaactcagtaagtaatagagccagaattttgaactatgaataggtaagattaaaaaaaaagacattattttgtaatgtcttgtattatcagacaaggtaccagagacaaggaaaaagaaaggtgcactgaacagccaaagcaggactgacggaactcagaaatgggctgggaccagcctgggagaaagaaaacgcaaggcaaagaaaaggataaaacagccctgctgcactctggtgggactgataagaaatagcttctgtatcttggtattttgtaccttaaaaaaaattgaggagtggcaggaatagaaaacagaaacaatgtctctttggggtgagagacagaaacacgctgttcctctcagaggatgtggaaacattgatgacctctgcaagtgcaggcaggcagtatccacagctctgcatcaccactcggcgtcaccactgtgcaacccatcagtcctgtggtgcccgttcaagttacattgtataaatctgtcctacggcatctgtatcctcaccatctaataactttagcacagaatattgtttaagaatgatggagagggaaaagaagactttgagtcaacaaaacctttgtttgtttacatttaccatatcatccattctttgtagtatatatcagaagactttcattttaggtttttaaaaatcgtttatatgtaatgagttaaaaaccttagttatccagaaacatattctgagcaacatgtttttggtaccacctgctgtcttatatatttcttgtctgcatgcttctgtatacctagtaggtgtctgtaggcagatcaccttacattgtgatttcttttaaattgggaaaaaatatatgtcctttgaatatcttatggttcagcaggggcattagaaaatataaacaactgttgtgtgatatgtgcaaaagaaatgtgaacaatgtttaggagtaatatagagaagaaaatgacagtttctttgtatagaaatgatttgaaag

SEQ ID NO: 34097 - DNA, 1021 bp, Homo sapiens
acctgaatatttgtccctaatattagaaagcaaatggctcgcaaaaattctcaaagatagtgtgaatcatattcttttataacactggataaagggggaaaaaagtgacatttggggtattaaacctgagatgaacatcctaatccagagagtagctgatctttagacctacaggctgccagtgaggtgttgtcagatgttggagtttaggcatagacaaatgcactgggaagagaacagtgccactggctagtcacttcacttctgggcctcagttttctcatacctattttgtggattatgtgggttgctaattaagacacccatctacctttgatgttctttaaagtagaagaaagaaatttaaacaaatgaatgacactaaaaacagaacagaaaccaccaagatgtccttcaacaggtgaatggatgaataaactttgggaagtccagacaatggaagattatccagtgctaaaaagaaaatgagctataaggccatgacagtgcatggaagaaccttaaatatatatgactaaatggaagtagccaatccaaaaaggctacatactctgtaattccaaatatatgatattctggaaaaaacaaaactatggagactaaaaaagatcagtggttgtcagggattaggggaagggagggatgaataggcagagcacagaggatttttagggcagtgtaactactgtattcactacagtgctgggtacatctcactatatacttgacaatgtaacaatgtaggttcatcacttataacaaatgtaccactctgatgtgagttattgagtatagtgggcaggctgtgtgtatgtgagggcaaggagtatctgggaactctgtactttatgcccagttttactgtgaacctcaaactaccctaaaaattaagtctattttaaaaattaaacagggtgggaggaaatggaaggggagaaaataaaaaggctactcactgagcctttcctcatctccactgcctgtttcacacacttggcct

SEQ ID NO: 34098 - DNA, 1032 bp, Homo sapiens
atctccccctctgccctcccttgaccgttggctcccgcctccctccaccacatagagacatgcatcctttgccatcccttgttaaaagtatgtgcgtgcacagctacctacccttacagttaagagcaaatgcccttaaaagcaaatgccacttcttagatatcttttggcactcctggttctgagtacttaatacgttgctttgggatgaaggaaagaacagaatgctctgtatatgattaccttttatccttttgaaaacttgagtggactaattcttgcagataaattttagcaatgggcatttagttgtagaaggtaccacagatgaatatttggaatattatgtttctaaaagagtactgattgttttctacctccttttatttacttattttttaaaatttcagattgtagctgtctgcagagaggcagctcttctggctctggaagaagacattcaagccaatctcatcatgaaaagacatttcactcaggccttgagcactgtgacacctagaattcctgagtcattgagacgtttttatgaagattatcaagagaagagtgggctgcatacactctgagaaaatatatatattcaagatgctgaaaatcctttccagagaaaatttgtttctttttaaaattttttgagagtgttaaaaaaaattttactaggcaaaatgtttgaagtatgttcagtagaatttaggggctttggttcttacagattttcaagtcatgtaagtacagtgaaaatatctctgagcataagtttcaatcagttttacctggaaatttgtggtgtggtttaaaaaacaaatgtttagctttttcatttgcgacctagtctgttcatcccatgaagcgatttctttttccagaatctgtttgagtgtctttctaaaatgccaaacatgttggcatcaattttatacagggatataaaaaagtatatgtggataaattttttgtaatctttagggatataaaaaagtgtatgtggataaattttttgtaatctttatt

SEQ ID NO: 34099 - DNA, 1046 bp, Homo sapiens
tgttgttgtcttactctggagatgccaagtgtattttttctttctatgtaattttagattcgccttacaatgtaaatcttcacattggagataatattggttggaccttgcccatcttcactctagccttcgtatttgtgaaggactcagccaccttccttcttcaccccatgcttctcaccaaatttttgttgtcattgagggcacttggataactcaagttgatatttatagctgatcaatctatatgtgtcacagaactatgctgcctaaagtgatcttggctccttaatggtccttttggccccttggatagttaacagctgagtaattctaatctcttctgtgttttccttgccttaaccacaaattgtggtgctttttgtatattttatgtataaatcacaaagttgaattctgactatttttaagacaaaagtctgttaaacttttttattgtaaagaatatttattatgcgaatctctattattttatggtatttattgcaaaagactgttgaaatgtactcatgtttgaatataacaaaatatcaatacttaacggaaaataaggtgacacgaagaaagtacatatgttaactataatgcagaaaatatattaattaatgaaactgtctctcgatttcttcatttattagcctgtactattatgatgatttttgcttatttgctttgactttttcttcttacacacccattttacttctttccctatagatgttgaatctagacataggtgagcccaaattatgaactggataattaggttggtgcaaaagtaattgcagttttgggtcatttttaatggcaaaaacacagttacttttgcaccaacctagtatttcctggaaagtgcattaatcaaaattttgtaatccaaattatcttttaacaaatgctcaagtgagttattttgtacagtaaaaattttttgtaatactctctccctactttgactattttgtaagcatgaggttttgtgtatattatagtttcttgaaatggggcatatctacagtagaagc

SEQ ID NO: 34100 - DNA, 1072 bp, Homo sapiens
ttcagcaattacctttaacagaatagtttttatttatttttacatttattatacatttagaaagaagatgagagcaatagttttttattagtataaggcaaacttaactgattaaaccttcttaggaaaagcaatagttctgaaagatatgcaagaaaaaaaatgacaaaagtgaaagaactctagtgtttcaagaacaaggaatggctctatgagctatccctaggaaagcatatttaaaatgaactaaaataaggatcttttgcttagcacagaatgtatgaggtgtttttaaaagaggtggcctgaggcagtggttatatgggaattcatacaaatgttagagatttgttagtttttacattatacttctattaactgtagaattactattagtatagagacctcaagtgtttcttatttctgaagtcttcttagtagtgaaatgatgaggggtatagtaatgtccatttgtaataaaaatgattaatgaaaaatagaattttttattttttaacttttaggattcatcatatgctgaacatctttttaaagttctgactgtattgtgcaatgtcttttaattcatgtgtgttcttccttatctaaaaatcatttacatttacaaataagaatatttttacctgcaccaatcaagatacaattagtagctataaatgtaacattctatatgtaacagaataagaaaacaagagaaaaaaattgtaacttagcataattgaaacatgtgcctagccatctggagcacttctgcataatataaagacatttgacattttaaataaaggattttgaaataaacaagaattcttttgtgtcttccaaagacattgatttattgagactatgtgtggcttttcatcatatacaaaagattaatgatttcctaaaagtccttgcatttcttcattttataaaatgtatacacacagttaagaaaaatgaatccttgaagtcctgtgaagaaaggtgacaggaaatagttcaaagtatttcattttaaataacatcaaatattataaaatataaattttctcaaagtaaaaaaatg

SEQ ID NO: 34101 - DNA, 1016 bp, Homo sapiens
taaatacccatcagatacttgatatagatattctgtggttggagggcttaagtgagatgcagtttcaggtaaataacataaaatcagcagacctctaatctgaattgaatgtgttaaatcttatcaacctagagttttaaggaagagggaacaactgtcttcagtgagtaatggcgcgtgcattaataccagttactcaggaggctgaggcaggagaatcactttaacccaggagatggaggttgcagtgagctgagattgcctcattgcactccatcctgcctgggtgatacagtgagactccatctcacaaaacaagcaaacaaataaataaaaaaacaaaagaaatggccaagaagaaaaatgcctagctttcctgcaacaatttgggagattaccatcatctgtattaattcattcattctgttgtttaatgaaaatggctaaagtctggccttgccattgaggtttttaaaaattctggtaaaatatgcataacatataatttgccattttaatatttttaagtgtattattctgagtcattgaataatttcaaattgctctgcaactgtagccgtcatctatctccagaatgtttttgtttcccaaactgaaactctctacccattaaacactaactttccatttcctccaatcggcaagctccaggccaccactgttctgctttctgttcccatgaagttgactacttttgctaactgatataaatggaatcatacatatttgtttttctgtgtctggcttattttacttagcataatgtcctccaggtagatccaagttgtagtaaatgtcagaatttcctttttttttaaagaccgaatagtattccattgtatgtatatactacattttgtttatcaaaaatggacacttgggttcctttctcctttttccattgggcgtattgggttttaatattacacgtttgttataaaggcagatatagggtgatagaattcatactagatttggaaataatcaaactaggc

SEQ ID NO: 34102 - DNA, 1057 bp, Homo sapiens
ttcagaagtggagtatttcatttctaatgataaccatttaggaaaatttaagttggacaatgatacggggtggatttcagtagcatcctccctgatttctgacttgaaccaaaacttttttatcacagtcactgcaaaggataagggaaaccctccactttcttcccaagcaactgttcacataactgtcactgaggaaaactaccatacacctgaattctctcaaagccacatgagtgcaaccatccctgagagccatagcattgggtccattgtcagaactgtttctgcaagagatagagatgcagcgatgaatggcttgattaagtacagcatttcttcaggaaatgaagaaggcatttttgcaatcaattcttctacaggtatattaacactagccaaagctcttgattatgagctatgccagaaacacgaaatgacgattagtgctatagatggaggatgggttgcaagaactggttactgcagtgtgaccgtaaatgtgattgatgtgaatgataattctccagtattcctctctgatgactatttccctactgttttggaaaatgccccaagtggaacaacagttatccacctaaatgcaacagatgctgactctggaacaaatgctgtgattgcgtatactgtacagtcatctgacagtgacctctttgtcattgaccctaacacaggagtcataaccactcaaggcttcttggattttgaaaccaagcagagctaccatcttactgtgaaagccttcaatgtccccgatgaggaaaggtgtagctttgccactgttaatatacaattaaaagggacaaatgaatatgtgccccgttttgtttccaaactttactattttgaaatctcagaagcagctcctaaaggtactattgttggagaagtgtttgctagcgaccgtgatttgggcactgatggggaggtacactatttgatttttggtaatagtcgaaagaagggtttccagatcaataagaagactggacagatttatgtttctggaattcttgatcgagaaaaagaagaaagg

SEQ ID NO: 34103 - DNA, 1054 bp, Homo sapiens
tattttggagggcaaaccaaaaagatctgttgatggattagataaaagctatgaaggaaagaaaaggatcaaggatcactccactgtttgccctgaaacttataagaagcctttatagtccaaatgagtcattgttttgctaatgctttaatcagtatgaaatttagagattatgggtcaaaggaagacaaaatactgttttaaatatatattttttcaatttattacagaattatctgttcatttagaacacatttattaagcacctactatgaaccaggcactgctggttttaaaacacacaaagaagattgcatattgtctcttccctggggaaaaaagcttataattttctatcttccactgtggaagacagatctataaactgctaatataatataatatacatactaataatataggcctgtgaacaaagtgttccctagaaaagtcaagggacactttatccatgaagtctcctttaggatatggtatttaagttttgaggaagagtagaaattttcctgcagataagaagaatgtcattgcaggcactgaagtatttggatcagccaattcagattactctgtgaaaacattttaaagtaacactggtaataccagttaatactaacaatacctattaatttacagaaaaagaaaggactaaatagtggagaccattcagattctgcaaagtcagtgtcttctcttaaccctgttaaagaacatggtgtgttgtttgaatgttcacctggaaactggactgatcagaaaaaagcaccaccagttatggcttactgggtagtagggtaagtgagaaaaaaaagtatttgaaagtaaagtgttagaaaagtgaaagaaaagtggtaaaggagattaacattttaaaatgtaagcatggaattttttatctagctatactattttaatatatttcattttatttgctaagtatctcctttaaatccctcccaagtatttttctattgaaaattatcttacaaaattaaatttcagtaatacactgaaagaataattccagtttttctct

SEQ ID NO: 34104 - DNA, 1060 bp, Homo sapiens
aatagctaggactacaggtgcatgccaccatgccacactaattttatttttttccaacagagacaaggtcttgccatattgcctaggctagtctcgaactcctggcctcaagccatcttcccatcttggcctcccaaagtgctgggattataggcgtgaaccaacgtgcctggccagtaattcttttaagttatgttaaggacatgtaaaaatcttactttgtttttaaaattcataaaaaatacatacaaaacatattagtgtaaacatttggagaaaaagtagtgtggaagacaataaactactattaataatggatagatacttctcagaggtagaattatggaggaggtgcttttaatttatagtctgtaattaatactttgtaatagggaatatggattttctttaaatgaaactgtgtcaagatttttgttaggaatattttatcatcaaaattctttatgattcttcaatattcagttctctggttttctatcttattttttcctatttctttactagcatatgaataatctggaaatatgggaaaatgctgtttaaacactgtttcagatgagtgagacccctcttaaatgcatgaaaatagaaatcactttggtgcactgaaaacaacagcacatagaaaatgccaaatcggggggttaactgtggctataatagatgggcattttctggtgatggcagtttgggatgaagaagaggcttttacctttttttgttaaatattctttttactacatgagttggttttatatgttttactatttgagcttatattttatttaaaatattttaaatgctgaagaattacacaaagtaagtctcccccttcatcccttcccaaccacatcctaaagtttgatttatgtttctagctatacaagtatgtgattatatgtacataactgggattttttaacaaaagcagaattacattacattctgctttcattaaaaaatagtttttaagtattttgcaaattgctttcttttcacctcaaaatattgtggacatctcaaacttatggctctaatt

SEQ ID NO: 34105 - DNA, 1060 bp, Homo sapiens
tcatataatttttcaggacaaaatgagttaatgtgtacaaaattcttggaaagcctggcatagggtagctgctataatatatattagctatttttattgttgtttctattgttaggttgttaagtcatctatcaggaagcataaattatttatccataaatgtaattacaggaagcattttctaaaatgattcccattgattttagaaacctttctatccaagcgttctaatcgtaattttacttctgtgtgcttcttacaaattaggtttataatcatttttacattgattcttttgtccagacttatgatctctctccagtatgcacagagtagagtttacttaggagataaactgcaacactgcaagagtattctgtcttaatttatattactataatagcatctttgtaatcaaaaaattaaagggaaatgactcagactgaatatagggtaattttcagtatagattgacttaatccttggcctttagtcttacatattaacttactttaaaaagaacgtttttttccttcctttttagtaggtaactttgtagtgaaatacgatttttagatcacagacccgtttgaaaatctgatcaaggctatagcccttcttccaaaatacacacctgtactagttatataccaagataattttgcatttgattttgggtaatactagacttcatgagaggtctatacatggattctccatgctagtctgtggggcgacattccacgcagattgtactcatatcctcctgtgatatttaccaccatactaccaccccaccacccaccttataatgaaagagctgcaaaaccaccccaacagtaggattctttattagtgactgttgtaagtagtcatttaaccctagggagagagcctagatgtttggtcctatgttttcaagaactgtagtgttgaatttctatgactctcttctgctgggaagcctgttgctcaaccagcttgttacattgttacctggtttttttgttggttggttttttggttgtgttttttgtttttttgtgtgttttgtttttgt

SEQ ID NO: 34106 - DNA, 1030 bp, Homo sapiens
gggcccatatggggaaggttcttatttttacaagttgcagaagtatggtgaaaaacatatttttgaataagaagttagaaaattttgaaatttaatattttatacttgaaaaacattctgtccttccatgatttttaattttttttttatttatttatttgagacagcatctagctctgtcgcccaggctggagtgcagtggcacgatttcagctcactgcaacttctacttcccgggctcaagcagtcctctcacctcaccctcataagtagatgggaatacaggcacatgccatcatgcctggctaattttttaatttgttgtagaaatatgattttgccatattgcccaggctggtctcttagttctgggctcaagcgatcctcccaccttggcctttcaaagtgttgggattacaggcatgaggcactgcactgcactgagcccaatgatgacttttatttctaaggaaagtatttttaattagtgtctctcaaatatattactaggacttgagtaaactgtctgcagtattggaagacacagaaaattggctttatgaagacggagaggaccaacctaaacaagtttatgtggataagcttcaagaactaaaggtacatttttttaaagtccatgttagtataaaccagtaactttttctaaaaattagggtgtaagagcacagtttatgttctattaatttttaattttttaattgagaggaaaattgtatatatttgtggtgtacgacatgttttgattatgcacacattgtggaatggctaagtcaaactatttaacaaatgcattacctcacatacatttctttctttgggggggagaacacttaaaatctactctctcaaccaattttcaaatatacagtatattgttaagtatatatggtaactgtggttaccatgatgtacaatagatctcttggacttactcctcttgtctaattcaaatgttgtgtcctttgaccagtagctctccatcataccatcccctgataaccaccaattc

SEQ ID NO: 34107 - DNA, 1055 bp, Homo sapiens
ctcctgacctcaggtaatccacccacctcagactcccaaagtgctgggattacaggcgtgagccaccatacccggccaaaaatttttgcttttaaagttaatgttattttgtggttaaacttctaaagttttgaactgtaagcagaattttgttttgtgatattttattgtataaactgttaatgagaggcacagctaattgtacatatcaatatacatttaaaatctggtaacactggttaaatagcccttgatgacttttcatgtggcatgagagggatatgcttataaagcttaattctgatattatcctcttactacctacagtatgttttgcaaaaatcagtccacttagcaaactaatctttgtaaagcagtcagtttcagaagatactttttatcaaaaaagatggcaggtttaacattataccttttggtttttgcccaacatttgatttaatctaaagcaagaatataaaataattttaagaagcatataatttcttttgataaaaagtaacaaaaatttaatgcagatcaaagaccaaggcttgtaaccaaaacaagcaaaaagaaactttagctgtttaactatcacctctctaatttaaaatgcatgaaaattaatactttgtttttgttttttttttggaaacagtctcactctgtcacccaggctggagggcacaatctctgctcactgcaacctccacctcctgggctcaagcctcaagcaattctcctgcctcagcctcccaagtagctgggattacaggaacccaccaccacgcccagctaatttttgtatttttagtagatggggtttcatcatgttggccaggctggttttgaactcctgacttcaaatgatccacccacatccacctgccagagtgctgagattacaggcgtgagccaccgcacctggccaatgttcttttatatactcatgttttctaacaaaacagctttggatttataatgctgccagatgtcattacaattttttttctaaattcaaaggtaattattctaaacaataaaagggcacctgg

SEQ ID NO: 34108 - DNA, 1036 bp, Homo sapiens
tgacaatttaccaggtatgtgaatttaccagggaataaattttgatagtagatttatatgtatatacgtataaactctatatatagatataataaattataaatagcttcagtcaaactttaggtcatatcatattcttgtactttgtttctggtgagagttgtatgcctttaatgcaatgtttattattaatattctgtgttataatggtactatattctatttaaaaactaactctagaacattagtcatatgtctcacaaatgtaatttgtatacttgtttagaatgtggctatagttatgttaaaaaaaattcaacattgtgcttgcttcagagcacatatactaaagttggaatgttacagagaacatggcccctgtgactcacaaatttgtgaagcattctgcatttaaaaaataattcaccatgtatgtggcttttgagctttgaaatcagtgctgctacataaatgattatttataattatagttaaccaaatttgactcccagtttggtttctggatattatggactatggacataagtactgaatagtaagccttcattgaggtaactcttagaaaagaataagaaaacctgtctaatgtaaccctattagaaatcacaataaatagataaaactgtatgtcaggtcaacactttcttccctaatgttaagtattttttttccttagaaaaatactggcgaaaatatcaatatgcttccaggtttgtacagcttgtaagatctaaatctcccaaaatcacttattttacaagatatgctaaatgcattttgatggagaattctcctggtgctgattttgaggtttggttttatgatggtaagtaccatttggaaatggtaatttgttcctttagtttgtaatttagtagttacgtatatgtgggtttttaaaattcaacacagtcagttttaaagatgtgtatgtatataactatacatataaattgcacagcggagtatacatgtcaaatcatattaatcaaaatttatctagccttcctttaaa

SEQ ID NO: 34109 - DNA, 1032 bp, Homo sapiens
attttgattaaaaataaacctacagaagtgtactgtatagaaagaccttttaagttccaacaatttttaaatgcttttaatgttattgccagggctgtgtgcgttagtgatgtgacatttactcttttttttttttttttttttttgagatggagtttcgcttttgttgcccaggctggagtgcaatagcgccatctcggctcactgcaacctccacctcccaggttcaagcgattctcctgcgtcagcctcctgagtagctgggattacaggcatgtgccaccacgcccggctaattttgtatttttagtagagatagggtttctccgtgttggtcaggccagtcgacacttcactctttaaagtatttcagtatgagccaaagtagtaaatgactacactgcatttattgcagtagacaaaccttgctgagccaaggaaatgtgaaaagtaggagtaataatggctttagtatagaccctagtagaacaagagactaattttaccttgaataagatgtgcatttagcttaactatggcttaatagcaactgagatgccataatttccttataatttatagattttaatctaagatttttcagagaacttgacttcctaatagttgtactgtcataattaggaagtgactcacattgatatttttgagaagtttacatgaatgtagtggtctgtgtaagacttggtgacatgctttaattattcagtggcttcacttttgagtaaatcttatgagcccttcaggtttgaaaatcactggaaagcttacagttgagactgatcatgtttttgtgaaaaaatatcaagccccagttaaggaaaaaatgaagtgtattttgtaagtaagaaaagccattatcattttaactatagaactaacttaaaattttagagtctgccccaaattctccaagaattggaagcccattgagcccaaagaaaaacagtgaaacaagtattcttcaagcaatgtctagaggtttgtctaccagtttgcctgacttggactcag

SEQ ID NO: 34110 - DNA, 1029 bp, Homo sapiens
ttttggttgctttttgaatgctttcttaatatctggcgatttttggttgatagttcatattaatattagtaaatatgcatggttttcttgtttgatctaatctgctcatctagtgggctgttttgtttaatgtgaggtatgattccacagtctttttttttttttgagacagagtttcgctcttgttgcccaggctggagtgcaatggcagtgtgatctcggctcactgtaacctccgcctcccaggttcaagcaattcttctgcctcagcctcccgagtagctgggattacaggcacccgccgccatgcccagctaatttttttgtgtatttttaatagagatggggtttcaccatgttggccaggctggtctcgaactcctgacctcaggtgatccacctgcctcggcctcccaaagtgctgggattacaggcgtgagccactgtgcccagctgattgcacgttcttggtaagtgaaaacgtcctatggacttggacacctaggcagagaatagggatgctggctctttttctccaaaattgctaaaacaaaaaaagcagtacttttctctgggatgtagaatttcttagtgtatctcattcattggtgaaattaccttttcttttcctccccccagctctattttagaggttcagaataatgctaggatgtgttcaacttctgttcagccccagtacacaaaacatgagccctctcttgtcaaatcttattttgtttagaaagtaattcttgggcttttagttgggagcgatctttatatagttttatattctgagataaagggattggattgactgttccagctgtgttctatagttggttttccaaatacctattttgattgccatccaatagtccattcctactccttgtaactgccatctcaaaactttctagaaccctggcgggatcaatggcttttgcttcccctttaacctttgtatcagttctaggttgctgttttctctgcttttgtttattatcaatacaatcccatttattttct

SEQ ID NO: 34111 - DNA, 1417 bp, Homo sapiens
tatggatggaagaagatgaaaacaaacacacagccataaaggtaattgtttctggccaacatctttctactgatgctttgttttgattgtatgttgctgtttatattttctcaaacttgaggctctattttatgaaatgttgaatataaatacattgtatttaacttgaaaaattcctggaaatatacctgataattaccacctgaggaatcgttttattttatgaaagtaacagcgtgatgaatactgtaattacaaaagaaaattagtactcactgacttatacccttgtttttttttttttttgttttgtttttttttgtttttgttttaggtgacaatactgagaacgccctttctcgtatgaaagaataaaaacaagttactgtggacaggcttaatttatatgctcattgcttacctggctctcaccgcagctgtatgagccagtggctttagagagcactcttcttgcctctttctgttttccccacttagtctatggtgcatgatctaaggtagtggaaatggttgtggacaaactataaatgactaaactggatgattatctctcttggtctagtcattactgtggtgctagggttactttttacaatcttgttctaattttttttaacttcttgcatttcatcccagatcctggttcctatcctagttattaaggtaaaatagagaaccagaatagtttatcaggtatctgcattccttcaatatgaattataatggtacagatatggggataaaaggaatctttttctgctattaagtttatcagaaaagccccaatagttaaatatttgttttcagtagagggtataataagggaaaattatataacattatatgccaaataggaaactgatcttggttggaaataaagttgtaggaagaaaagctagccaattagtggctgagtagaggggactgcctgtcggtggggcttcatatcatcaacaagaagtgtgctagccttcttggctcctcatttcttttcttcctggaatccccagtactgcttttagccttctgtaaccactgccttcttggaggacctgcctcaggctatgatagcttgttacgtgacttagagccttagcagttctctgcctgtcctactgctgtgggaaaggaagtgtgtttttataatgcttctcagttgaaagtctttcctagtgtaagcattgctattttatttgtaatacttaggttcggtaagtaatacctatcttaaatccttttagaacagagatactagtacattctactaataatcagttaaaattatccttcccccattctctatccctttacccagctttgtttttcaccatagcatatatcattatctataattctatatattttacttacttttattctcttggagaaaaaacta

SEQ ID NO: 34112 - DNA, 1144 bp, Homo sapiens
gcctgtagtttgctgacctctgctgtagagccacaaactgtggttacatgcacgtacatggatcagtctcataaacataattttgcatgaaagaaaccatgtggtgtaattcaatttttataaagttcagaaacatgcaaaacacctactgtattgaaggtgtatgagctattttgggggagaaagaggagatcctgaccagaagggacatgaaaaggaagcttctagggtgctaataattgctttacctgaatggtgattaagtctgtttaccttcgattattcattgagatatatacttatgatttgtacacttcttgtgtgtgtgtgtgtgtgtatgttatacattaatgaattagttaaaaataaaaataaacaaaaacatacacaacttgtgtttccatcagggtagaattgtgttatttatctctggcatgtagtaaacatacaataattatttatagaattgggagttgctaatagcaagctctgtagcaagataaaggacaagaggagtgagcaatgattctgatttagcctgaagagcttattgaaaacttttgaggaagaaatgttgataaatatacattttgatgtaattaaaggtactttagtgaaaaaagatcataatctaaaaggctaacattgggatttaataaatggtttgagctgacaagtgacttcatctttgaagacagaaggaaaagattcttttgttattaagagcaagctacaactattttgtaatgatatttaatttccttcctgttttaaatttgcttcaacccgaaaaattctttcttatgttttttacttgcttaaacccgctttggatgttgccctgtaaagattcatgtacccattagtaccatgtggagtagatgtgatatagggttttattgggaaaaacttagaagaaatagtggagtgtaagcagtccctcaaactccttttttatctcacagtttaggccagacatagagggtctttatggttcacctgggtgaaccatagggttcaacctttagggttcaacctttaagttcacctgtggccaagtgaacttccagtagagaatgacctctaccctctgtaatgctccacacatttgtaggtcagggccggaaacacttaagtgactatg

SEQ ID NO: 34113 - DNA, 1037 bp, Homo sapiens
ctcaaatctctgtaagaatatgtcatatgtagtattgaatactattaggagatacataatgctctattgtctctttttgtaatgttagcagtcattgatgatcagtgagtgaagcttttattttactaggggttgcaaaatagtgatgattctatttttaatcattacgtcttaccttaataggtagaatacttttataaagagaactttccccagaatatttatttattctgagatagagttcttacaggaaagtgagtcagtgctgaattatttccctttgtttactagtttcaaagtactagctggttccttaacattcttcgctggtgactaatgaagtttttgtttgtttgtttttaaatgatcattgtgaactcataaatacatgagatgggtttcattctattacagttattattattattattgatacctatgccagttatcagtttattgacttttagctctaaagccacctttcattttcttgctcagtaataatggagttggactgttaactttaatgtttcccaccccacagaaggttgagcccccaccaaggttgagctttgtcagtaccggatctgctactcagttggtccttgtttctaggccttttgaatagaaagagctaggaaattttttaaggagaaaaatatattacgtattcatgttgatattttctgtctaaatttaagattataggttttaattttaatttctttgattttgtagttgtattgctttttacttatatataaaaaatctttcttcctaaccacagtaacataattatttatttgctaatcctatgatataatagttccagaataacaataacattaaataataatattataaatactgaaaggtaacttcttttagagttctttaaactgtaaacttttaaaaacttcatactttaaagctttctttaaagttcttagtgtgtcccactagggctgttcagttaaattgctggattttttgccttgttaaatttgaatactttaaaattgagaatgtatattcct

SEQ ID NO: 34114 - DNA, 1964 bp, Homo sapiens
attcatatatgttgtccttgtttgctttgaaatttagtttgtctgattttaatatagccattccagctttctttcatttctttctcatggtatgtgatgtatcttttgccaactttttacttttaacgtacccatatcattatatttgaagtcagtttattatagatagcatatagttagttcatgttttttattcagtctgacagtatatcttttaattggtatgttttgactaatgtaattattggtatgtttggatttaggtcaacctttttattattcattttctttttcttttctttttttttttttttttggcttctattgcccattttgtgcattctttgtgttgtttgtaactttttccattacattttaatttatgtactatgaatttggacatatatatctttttttgtataattgtttttagtgattgctctaggggttgcaaaacacatacttttcagtttatttggaatcagtattttaccatttcaataagaatgtagaaacctaacctccatagagattttttttttttcctttctctccccaccggccccaccccaagagatagggtctcactctgttgccaaggctggagtgcagtggtctagtcatggctcactgcagcctcatactgctgggttcaagcaatcctaccacctcagcctcccgagtaggtcggactacaggtgcacgccacaaagcccaactaatttttttattttttgtggagacagggtctcactacattgaccagattggtctagtactgctggctggcctcaagagattctcctacctcagcctcccaaagtgctgggattataggcatgaatcaccacactcagctgaaatttctttatgtaataattgtcttatatatcttcatatgttaaaaagcccatcagacaatgtttgattgtctttcaagcgtgttttactttcaagcgtgttttaaataacttaaaaggagaatagtctattatatttatctggacctttaccgtttatcttgctgttcctctatttgtgatgtttcaggtttcctttgttatcattttcttctgtctgaaatactcaggttagcaattcttttagagcagttcagttggctatgatttatagttttctttcttctgagaatgtctttatttcacctcattgccaaggatattttcactggataaagaattctgaactgacaattgttttctgttagtgattcaaaactgttgtaccactcctttctgtcctccatggtttttggtataataatttatagtcattcaaattgtttccctacaagtaatgcatctctagctactttcaagattttttttttttttcatctgacatttacagcaaatagagtgtgatgtgccttggtatggagttctttgggtttatcctggatgggattctctgtttcttaaatctgtaggtttgactttagacaaatttgggaagttctcagctattatttcctcaaaaaaaatttttagccctgcatttcttctctcctagaccttttgttgtctcacaggttcttaaggattggctgattattttttttcaatttctttttttttctgttgttgaggttgcttttctgttttcggttcaatttctgttgattctggctgcttttaatgtttcctctgtcacctattttaagcaccttaattacgattgctttggtgtacttttcatgtttcttgtgcttgaactcactggatttttaaaatatgtgtgtttatacatttttaatcaaatttggaaagtgttcagctgttcctttaaatttaaaattttaattaaaaaattaataggctgggtgtggcagctcatgcctataatcccagcactttgggaggccaaggcgggtgtatcacctgaggtcaggagttcgagaccagcctggccaacatggtgaaaccccatctctactaaaaata

SEQ ID NO: 34115 - DNA, 1043 bp, Homo sapiens
gtcaccaagaacaaagtggaaaatgacaacagatgaggcaaaatcagcaaaatctcatatgccagggtaaagagcctaggcttattctagaggcaaatgggaaacactgaaggatgttaagcagaaatatgaaatgatctaatttgctcctcagaataatcattctggtaacagtgaagaaaatggattgggagaggaaatggcaaatgtgtaagttcacttttgactttacaaattcgtgcctagaatagtgcttggcaaatagcgggcacttagtatttgttgagtgaaaaaacaaaaagttgttatatgaatcaaaaaaagtcgataagtctgaagaaaaaccacacagaaatagtgcctatttttttttgttgctactgcttgattcatctgctggcttgtttgttatcttaccataagattttcatgaacaaatcagtaagtaaaataaccgaataaaaaaaacagtcaaaggatttgaatagcaggcttacaaaagaggaagtctgaagggtaactagaaatatgaaaacatgctcaatttcactagcaacaactagatcatttaaatcccatgagatggaagaatatttaagagtttgcacaaaacccagtcttcaccagaatgttgaattggaattctcacatgctgctggtgagagtgtaagttggtgaaatcattatggaaagtggtttggctgtcagtagtcattaagttagaagatgcttatctcttttgactcagcatttccactcagatataaaccctagagaaatgcttgtacctgtacagagacatgttcagcaatgttgatcacagcattgttgattaaacaaaaaactttgaaataacataaatgtctatctgcaggagaatggataaattgtgatatatttgtacaccacatactattcagcaatgaaaatgaacaaattagagctatgtaaataaaacatgaaaaaagtttacaaagtgatatatatatatatatatatatatagcattatgttacataaagttaattatgcaaaataatatt

SEQ ID NO: 34116 - DNA, 1024 bp, Homo sapiens
ttgagaccatcctggctaacacggtgaaaccccgtctctgctaaaaatacacaaaaattagccgggcatggtggcgggcgcctgtagtcccagctactcgggaggctgaggcaggagaatggcgtgaacccgggaggcggagcttgcagtgagccaagatctcgccactgcactccagcctgggcgacagagcaagactctgtctcaaaaaaaaaaaaaaaaaaaaaaaaaaaaagttttcttggctggatgtggtggcgctcactggtaatcccaactacttaggaggctgaggcaggagaatcgcttgaacctaggaggtggaaattgcagtgagctgggatggggccactgcactccaacctgggcaactgagtgagactccatcgcaaaaaaaaaaaagttttctttttttctgctgaaattctccatctcttcatgaatgttcatcttttacattagagtcttcaacatattaatcatggttattttaaagttcatttgtgattatgctagtactgagttatctgtaagtctggttctattcattgtctcctgaattttattttttctttttgtgtgtcttatacattttgattgaattctagattattacttctagacttttttttgttgttgaaatcttgccaaatcccagtctgaataaatccagctttctattatatttgctcctagtctactgaatgttgctaaagtaagtcctaggcttattgatagtaatatagattcatgtgctgtaattatagttagagcttcgatgttatctgcatttcttttactaatctaagtattcgatattaattttatcttcgttctttccttttgattgaggaattctttatctctcattgttccatcttttgaaaactgttttcaaatttctatttgttagtcttcattttgatctacctctttgcttccttctggctccctgtgataagtatgccagtaaggtatatttattcattgtggagaatttatttaatgatagctaccactttta

SEQ ID NO: 34117 - DNA, 1070 bp, Homo sapiens
tgaaagttctttgtccttgaagtcaacatttacatcagtatttatttggggaaaatcttctggtgtttaattgtgataataagaaagaagaaaaagaaagaaaagtggtagcattttttctaacaagataaattctaaaaatgttttccctgatttcacaaacaaggatagtcttggtgaccttttatagagatcttctagtaatgtattttgatctcagatttctttttcaaagccatggttttacaaaaacagcattccttaaatatatttaaaaaacaatacaaggaatgcctaacatttcagctcatacttcttaaagaagatatagtatgttgtattctcttcttagagctttcttaaagaatccacaatccaattaccccactgtcaattcatatttgaacttaccaaaacaaaggaggattacgtatatgttttttaaattcaaaaaagaatatgaaattatacctttagtatccctttgagacatatagtttaaagaaaactttttttaaaacaaaagtaggaatatatagtaagattgtagttacaatgagtatatgcacttttgatgctaggttttgcttttctccccccagtcatatctcatgatttccacagttgttgtattggtgtggagttttctgaattggctataagctgattacatattagaggtttatttttatgattctatataaacgtgcacgagtaatttaaaacctgcattgggattgattggaatattgtcctaaattaattaaatcttgcactgttttgaatgcatctgctatttatacatctgcaagtgggtatgtcataaggagtcagattatctttaatttaaaatgaatacttagttttacctttttgtttattttttgtttaattttgtttttataaatgttttcaagagttatagcaaattgatttctaatttttattgctattacaactgatgtaaatggtagtttcagtttttgtgagatttaaaaaaataaagcacttattctgaattttttgaattgatttttaattatttttatttagaatatagttgaaaagct

SEQ ID NO: 34118 - DNA, 1059 bp, Homo sapiens
cttcagctatacagaagccatatgttgaaaacaacagagccctgaggagtagccctgaatcactacctagtccttttggggactctatattaaatcaagaaatagcttttaattatattaagccacaagattttgaactttatctgttacagtagctaatattaacttaagtgataataacaaatttactacttatgtttaataattaccaaaatgtgtatatattgttgttgtctcgatcaattctatattaatatttgtaataactcaagaaaagtttttatcaactagaaccacttatagtcagagtaaagtaaaattttaaattatgtacttatttttgttttaatacatttacatatctggtcaataatattttcaaacataaaaacattatgataaaaatctggaaaaaatgggatagaatacaagctcaaggagaaaaaggaaagatgtaagctttctaaaagttaaagaataacttgctcatatatttaaaaaaatagatccaaatgttatatatttggatttcgttggattcgcttaaaatgaaatttataatatgctggaaattatgacctatgcaattatttaaaattataaaaagcttagatgtcagcttaaagcttcatgagggatatatagcttatgaaaattattttagggggttttcaagcaaaaaagtgtaaatgcactgacaaaagggggaaggtgcatgctttggagttaagtagccctgcatccaaactctgcttttgctatatgactgggcaagttagattaacccattggcccttattctgctcaataaattaaatgaaaatacatgtaaagtgctatctggcactaacctgctcttgctattaaaaatcttaagtacttctaggaaggaaaaattagccactcaggtgaaaattaattaatcagagcccatatttctgagagtagattaaaaaattaggtacagaggggaaagaacttatttgggagagaaaggataattttagaacatgtagtataagccaagagaagaagctctgttacatggcagaatgatac

SEQ ID NO: 34119 - DNA, 1046 bp, Homo sapiens
gtgagcacttcccatttgccagcaggggctaatggtgtaggccaaccatggaagaacgtgaagctcatctcagtttagctgactggatgcagcctgcagcaagcatgtgttgttgtttcatacattcctgtctttgctctgtgtgcacatttgggtttcatcttttcctcctagcggcacacgttcccatagactttgtgcttgcatgtattaaggaacattgcgttgtcaaaaggtaataataagagcagctaaaaattattgagaacacgtgatgttgtaggcactcttttaaacatttttatatgcatttaatccttgcaacaatactgtaaggtagttattatcccattttatggatgaagaaaataaagtactgagaggttatgttactttcccagggccacatggctagtaaattctaaagcccaagctattgaccttgagcctatgctcactccaggctttggagttgtaggagatgtgcaaggcttaatgaacactgagtgaacttatgaggcagttcagtcatctgacatcctcattaaatctgatttgaagaaatgacagagagaaagttgatagagcttagaaatttggttctaggtgagaccttaaaagtcatgtcaccaaggaataagagaccctcaagaggttagataagtcctctgtgcatcatttcctcctgacctgtatctcaacgtcaaagctgtcaacaaaaatgaacagggagcagcacttagtttgtatgatgtattcataatgtttggggtgccaaacagaagtcttatgacatggtatttttgcccggctaggtttttctatactagggcatggccatggttttaatgctttatttattaaagttattagaagataaatatgtgcaatcattgaaacttttcttattttcaaataagaaagggaaacttaaaaaatttagatttagcaactaacttttatttagaactgccatatgatctaacataaagttttcttacaatctgaatttgaaacattcaggattattttactaagatctgaaa

SEQ ID NO: 34120 - DNA, 1046 bp, Homo sapiens
ttgtttgttggttccgcgccgccttcctcgccggatggcttcctgtgacagaggtgatacacagtttccagaactgtctgggggcgggagcgggagcgggagccgagcccgctcggagctcctcgccgccgctgccgctcccatcttaaaaccgtttctcgccggcgcgcccgccccagcccgaaggtgccgccccggagggactcggggagggggacggcgcggccgtttccagcggcgcaagtggcttctggacgcgagggagcgtttgatttgcaactggggccgagcggattggtgcagctggcggcggcggggcgggaggagctgccgcggcggggggtggccactttcaaatggagagggcggcggcggcggggacgccgctgcggagggagcggggcttggttgcgccacgagaaggtgtcatcactgcaccggggctaattccggcggaggtgccgggagttactttcccctcctcccgcgctgttgtttctgtcgcctcgggaggaggaggaggaggaggattgggagagagggaggggtcggcgccgcgcggaaccgcggccctgcgcattccccggcgggcggcgggagccgcgcggagcgttcgccgctgcggggcggcggccgagctcccccacaaccccggggtgccccccttgctgggatccttagccttctcacgtcccctctcactccgccaccctcccactagagctccttattctcgagtcctcaaccccggcttggcgcgtcccgggtctcccctcgccccaggattcctcccgcgccaggctccgctggccccaggtttcccaccccaagcgggtgggggcggccgcagtcccggcgccggtgaatgctgagagcaaacaaaaaagcgggcgatttaaacatgccttcgaaacccgttaggaatgcgtcgtcatccggagaccgtttaaaaggagctttagcttgccttctagtaacgagagggctggcgccctgccttacttcggcaggggcgaggggctgtcgccctctatttgccccggcca

SEQ ID NO: 34121 - DNA, 1067 bp, Homo sapiens
aatctgtgttgtgagacttgtaggcagagtctacgttgtgagactgagacttcagcctcagagagtgctttctagaccttgcttctaggtttgagaccaacttaggtttccatgatcataataacgaggcttgtacaattgtgatgaaacgtttgttttcatatgtaacttggatgattgtgtaaatgttgtttttgtcaagtgtgtcatctaggttttcaaatatacaacattgggagtctctctcttttttttttttaaaacagtactttaaaaatttttggtgacttaacattgttagtggtaacggatagtttctgacaaccgggtataatcaaggaacaaagttcctgaaaaacagctgcatttcaatctgtgcacagtgtaattgtcattagctggtggagtctggtttctgcagaagctgatttgtatatcctgtataagaacatctggtttgagcatttaaaaatcttttaaaattaccctgtagacatttagcatttattggcttactccaccaaggatggaataatgggttgtagaatcctttctcatgcttattcttaccttcgttcattcagaagcacttggttttcctaaagtgtctaatgagcttttagagtttgatatgaagtgtgtaggtttgtattatagaaattagtacctggttcagagacccccaaggcagaatggaacacaaactcctgatttcagtgaaatgctttaaaaaataaacatttcatttttgtatattctgaagagattaatctgaccctagctttccctgataaattgtcagaaaactgagacgcggaataagacatatagggcaaatgggctttatctctcttggtgatagcactgtgttaaggaggattctgaagatatgtgcctgggggtgtggaaaagaatgacctaatttgtcaaccatgccttgccataggtggaaggaatggcataattgccagctacctcttgaacatagcctttttaaattttttccaaagtagtactactgtgataatggataaggagttgaaatggcttcttcttttttttttttt

SEQ ID NO: 34122 - DNA, 1058 bp, Homo sapiens
gccttacctcttttaaaacatgacaggatcttgcagggttaatccacgtacaactttcctgtcatggcacatgcttgaagcatggctcttctctgtgcatgtgtacatggggtgcctagcactgcaggccttctgccatcattgctctataatggtctattctcatgttctttgtgtgttcttgacagtgctctgtgaagaactgccgcacagccttccatgtgacctgtgcttttgaccggggcctggagatgaagaccatcttagcagagaatgatgaagtcaagttcaagtcctattgcccaaagcacagctcacataggaaacccgaggagagtcttggcaagggggctgcacaggagaatggggcccctgagtgttccccccggaatccgctggagccctttgccagccttgagcagaaccgggaggaggcccaccgggtgagtgtccgtaagcagaagctgcagcagttggaggatgagttctacaccttcgtcaacctgctggatgttgccagggctctgcggctgcctgaggaagtagtggatttcctgtaccagtactggaagttgaagaggaaggtcaacttcaacaagcccctgatcaccccaaagaaagatgaagaggacaatctagccaagcgggagcaggatgtcttatttaggaggctgcagctgttcacgcacctgcggcaggacctggagagggtaatgattgacactgacaccttatagtgacttagagaagaagatgcaaagaggcgaacgctcgcccagagcaagaaatgatagccagtcatatactctcagacccttgtacacaccacagcatgaggttgtgttggttaaaaatatttatgggctggtaaactcattgtacatatgtgcaaaactgctactgagtggggagcttctttgtggtttttttttttttaaaaacactttcccattaatctttactgttttgtaagatcaaatggggtgtgtcttccccacccccattccttcattctagagctagagtgaatgagccccaagaaaatgacccaaggagtt

SEQ ID NO: 34123 - DNA, 1027 bp, Homo sapiens
cagctacctaaaaaccttctcaggatccttttcctctcaaggtaagttttgtccttcttaatatgatctctgtataagactttccatgacctggccccttattctctgtagcaccaccagcttctcctacattgaaaggtttgcctggtaagactgaactgttcatagttctttaaataagctacaatatttcctaattgtgtacccttgattttactgttttcttgccctagaatgctgtttctatcattcttcacctagttccaaatcatctttcaagacagagcttaaatagcaacttctcctggaatccttcactaaaccacttttttgagctaaacatctgtttctattttttcctgtagcaatgcatgcatcctccattttggaacttttattaaaattttccactttagtatctgattagattgtaagccaataaaggtatttccagaatctgatatagtgtttaatacagagaagctgcaaaagtatttgtaaggtgatgatggaaagtagaaagcagaagatatatatgtgcatctgagtgtgtgtgtgtgtgtgtgtgtgtgatatatatacacacatgtatgtatagtgagagagagagtatgtgtgcttatgtatgtatgtatgtacctatctattttatatatatggagagaaagagagagatctattttaagaaattagttcacacaattgtggcagctagcaagtccactcttccctgggtcttcagtcaactggctggaaaacccactcttccctgggtcttcagtcagccagctggagagtctatgttgcagttcaaatctgaaggctgtctgctggtagaattcctctcttgagggaggtcagtctttttttctatgaagaccttaaactgattggataagccccagccacattatagagggaaacctgctctactaaaagtctactgattttaatgttaatctcatctttaaaaaatggcttcacagaaacaactagaataatatgttacaaaatatctggataccat

SEQ ID NO: 34124 - DNA, 1526 bp, Homo sapiens
ctggagctgttccaggtggagatcgaggtgctggacattaatgacaaccccccctctttcccggagccagacctgacggtggaaatctctgagagcgccacgccaggcactcgcttccccttggagagcgcattcgacccagacgtgggcaccaactccttgcgcgactacgagatcacccccaacagctacttctccctggacgtgcagacccagggggatggcaaccgattcgctgagctggtgctggagaagccactggaccgagagcagcaagcggtgcaccgctacgtgctgaccgcggtggacggaggaggtgggggaggagtaggagaaggagggggaggtggcgggggagcaggcctgcccccccagcagcagcgcaccggcacggccctactcaccatccgagtgctggactccaatgacaatgtgcccgctttcgaccaacccgtctacactgtgtccctaccagagaactctcccccaggcactctcgtgatccagctcaacgccaccgacccggacgagggccagaacggtgaggtcgtgtactccttcagcagccacatttcgccccgggcgcgggagcttttcggactctcgccgcgcactggcagactggaggtaagcggcgagttggactatgaagagagcccagtgtaccaagtgtacgtgcaagccaaggacctgggccccaacgccgtgcctgcgcactgcaaggtgctagtgcgagtactggatgctaatgacaacgcgccagagatcagcttcagcaccgtgaaggaagcggtgagtgagggcgcggcgcccggcactgtggtggcccttttcagcgtgactgaccgcgactcagaggagaatgggcaggtgcagtgcgagctactgggagacgtgcctttccgcctcaagtcttcctttaagaattactacaccatcgttaccgaagcccccctggaccgagaggcgggggactcctacaccctgactgtagtggctcgggaccggggcgagcctgcgctctccaccagtaagtcgatccaggtacaagtgtcggatgtgaacgacaacgcgccgcgtttcagccagccggtctacgacgtgtatgtgactgaaaacaacgtgcctggcgcctacatctacgcggtgagcgccaccgaccgggatgagggcgccaacgcccagcttgcctactctatcctcgagtgccagatccagggcatgagcgtcttcacctacgtttctatcaactctgagaacggctacttgtacgccctgcgctccttcgactatgagcagctgaaggacttcagttttcaggtggaagcccgggacgctggcagcccccaggcgctggctggtaacgccactgtcaacatcctcatagtggatcaaaatgacaacgcccctgccatcgtggcgcctctaccagggcgcaacgggactccagcgcgtgaggtgctgccccgctcggcggagccgggttacctgctcacccgcgtggccgccgtggacgcggacgacgg

SEQ ID NO: 34125 - DNA, 1052 bp, Homo sapiens
ttaattttttagagtttcaaaaatagatctttagaatactgacgattcttgtatctaaatggaaaagttaaaaatgattactctgtgtttttagatatcttcctcaaatcaattcaaataataatattcaaatgttttgtctataggagctaatacactatcactagtttttgtcatagttgaaagcactcttcattcatataattaattagaagtattattaaatcaaacaaaattgagttactataacttcatctattctcttaataatatgagaggtagttgacatagttgcagtaatccactggaaagatatttcctggtgaaacagttgtaaatgtactgttaccttatgagaaggtagttttgatttacacatacacatacatgcatgcacacacacatacatagaaatttctcagtgcctactgatcttccatctagaaaaaaatctgtaatgtttcagtggattcactttgtcatacaaagctatgtgagggtaattgtataccattgtatttgtggagtacacttttggacaaataaaagctcctatttttaaagctgttaagtcttttgcatagcaatgaaatttggtttaaaaataagcactgatcaatactaatttttgaaattctcttggtagtaaacttagggcctttcacagtatatcagctctacttgatttggaaggtatctcccagataatgaagtaaatttattcattgcacacactctgctaggtgagaaaattaggatggatccatttctaattcatagcttgaagttgtaaatagtctctttcacaatggtaacattagaattttaggagagatggccaactatttaagggtgccagggttgctagaacgagaatgtctatgagacaattattatgctcaacatgcttctctcttctatttgaaattatacattttattcattcattgatgtatatttctgtttcacaaaactgtttgccgatttcttatttttaaatatccctggatttaaattttaatttaataactattaattgcaaactatgttgt

SEQ ID NO: 34126 - DNA, 1050 bp, Homo sapiens
agagagcccagtggagaaactggaggccctcagtgccagcctggcccgcgcggtggtgcctatcacagaggaagaggccgaggtggatgagtttcccgccaatggggagttggcggtgcaggaggaggaccacaggaaggagctggaggcgcaggagaagcacaagaagctttttgagggcttgaagttcttcgttaactgacaggtgtcccctgaagccctagccttcgtcatcaggagttttgcggggggggacatatcctgggaaaagcctttgtgcatgggtcccacctatgcagcacccaccagattgtcgactggcctgggcagcagacctcagttattggcagacactacgtggagccccagtggttgtttgactccgtgaacgctagactgcacttccctggagcagagtacttccctgcaatgcagctacccctacattcttcaccctttgtgactgaggaggaaggagattacatcccatctgagaagctgaagcttctggctctgcagcggggagaggacccaggaaacttgaatgagtcagaagaggaggaggaggaagacaaccaaggtgatggtgatgaagggggagaaaatgaaggggagagtggttcggaaacggaggaaaaggcctggctggcagcaccggaggagcagagaacggaggggaagaagcccagggtgatagcaggacacgagaagctggagaagcagcagcagctggcccaggaggaggagagcgaggccaggcgcctggccactatgatgatgaagaagccggagaagtacctgtaccagaagatcatgtttgacaaaaggcgaaaaagccaagaggccaaaaagctaccagagtagcagaaagcccatgatgaggcagtgagatctgagaaggccgaaaaatcaaggccgatttgagtgccagtggcccctcagagggccgaggccagctccccagcagccggatgtggcagaggcaggccagagcaccgaagtgtggtgacagatcagagtcgcttcttttctcctcttccttcctccagc

SEQ ID NO: 34127 - DNA, 1489 bp, Homo sapiens
tgttggtggtgtgtgcctgtaatcccagctattcgggaggctgaggcaggagaattgcttgaaccagggaggtggaggttgcagctagctgagatcgtaccactgtactacagcctgggcaacacagcaagactccatctcaaaaaaaaaaaagaagttatgatgcatccaaagtgacaataagaattgttccggaaggatatctgggaaattccttggtcttgatgcatcctttctagctgtcttcctttcccttttctatctttcctccaactctgaggttccagtacttaaacagctctgtttgccgatctgcaaatatgcttgtgactgcaaatatcttgtctagtacagggtgcaaagtaagttacactgcagattctaataatacctgggatataatacttttctatttcctcttgtgtgttttgcttttatggatgctaattatcattgaaggtctgctgaaggaaaatgtttatctttcaaatcttgtaggtcaaatagactctctgagacttagttctagaattagtttaatattttatttttttgagatggagtcttgctctgttcctcaagctggagtacgatggcgcgatgtcagctcactgcaacctccgtctcccgggttcaagcgattctcctgcctcagcctcccgagtagctggggattacaggcccctgccaccatgccctgctaattttttgtatttttagtagagacggggttttgccatgttggtcaggctgttctcgaactcctgacctcaggtgatacacccgcctcggcctctcaaagtgctgggattacaggcaccatgcccggccttgcctctgaacttttaaagaccattgtgagtattgattatctgtagaagcttacaagatttccttatctttggtattcaaaagatccatcaggttgaatgtctcagcatctgatgcgcccatccaatctaaagacatgccttagcacattaaaagtttgtatcggttgtctactgtattgtctcttgttctcatgttcttgaactcctgttagattgttggccatatggatctatcctccgtgtctattcatcctttttttttttttttttttttaaattattttagagacagagtctccactttgtcacccaggctggagtgcactggtgtgatcatagctcactgtaacctccaactcctgggctgaagtgatcctcccacttcagcctctgaagtagctgggactataggtgtgctccaccatgcctacctacttttatttttttgtagagacacgggtctcagctcagactggtctcaaactcctgggctcaagcagtccatctgcttctgcctcccaaagtactggattacaagcatgaggcacctagccaggcctccattcatattttagtgtttttatctcttctctgttgcatgagattttctgaaaatttttgttctgcagtcattttaaattcctagacatttctag

SEQ ID NO: 34128 - DNA, 1055 bp, Homo sapiens
gtctgcttctctttcaggtccattcacctttgcaagccattctaaggctatcacccattttctttggggtattctttggttctatggagcaaccaaaagccacccttcccggctttgtctgtgagagaggggacacatgtaactagtgccaccgttcactttcattcttgaacgaattgccctaacagttaccccctcagcttctcctgccctttctatttcttgattcagcttggagtttcttcaaggtgctcttgggaaaaccacatttacctttggtaacttgtactgccctttccttctggtttctctgttaattcaaacttgtttctgtcttcttggaattcctccaaatatttgctccattgatgtcatgcatcccttcttgttttccaatgttattgatgcattctttaaaaaattttaaagaggccaggcgcggtggctcacgcctgtaatcccagcactttgggaggccaaggcgggcagattgggagttccagaccaacctggccagcatagtgaaaccctgtctctactaaaaatacaaaaattagccatgcgtggtggcgggtgcctgtaatcccatcagcgactcagaaagctgagggaggagaattgcttgaacctgggaggcagaggtttcagtgagccgagatggcgccattgcactccagactaggcaacagagcgagactccgtctcaaaaaaaaaaaaaaaatttaaatataggcactttatttcttcaagatcttaggaaggagagaaagtaaatgtattttctactttgctgtcttggcctagaaccaacctgcccaatgatatgcaacatattctttttttaatatgtgccttaactattcaagcaatgcactgggaatttgtatatgaaaattgtttcccctcctttttaagtgactaaacatcttttattggttttatgatatatatacaaatagactagtggtgagcatagctgccttccaaatggactatacaattttattttttatttatttttttagatgagtcttgctctgtcacccaggctggag

SEQ ID NO: 34129 - DNA, 1057 bp, Homo sapiens
cagcctcccgagtagctgggactacaggcgcccaccactaagcccggctaatttttgtatttttagtagagacagcatttcactgtgttagccaggatgatctcgatctcctgacctcgtgatccgcccgcctcggcctcccaaagtgctgggattacaggcttgagccaacgcgcctggcctatttatgaacattaaaatttgaatttcatatcattttcacatgtcatgaaatattactgttcttaaggttccccccctccccctaccatttaaaaatataaaagcctttcttagcttgcaggcagcacaaagacaggatgctgccagagttagctcatgggtcacagtcggtagatccctgatctagagaggactctgtacagtcagcagaaggcgccttatagtttcatatttccactcacactgtaaaaacacgtcatttttccaagtgtcccagaaatgttagtgatgggagatcaccagatttttaggttttgctttttcacatttttatttcagaggattgtgctagaaaagcccagcttgtggaaatgatttgtcagccaatagacaattgagcaccagtcgaacatgttaaactaagcatttatcatggaggggattcccttctctttagagagcttttccatatgagtctgtcctggctgaaggtatggttcagtcttgtctggatgacgcttcagctttcttgtctggtctgtgactgccacctggcaaagagaggttgtttggattgtcacactcagtctaggtgcttgtatttttagacacgttaggttgagagttctgaccttcacttgatatctctggtaatgccaagcgggtcgtggcactgctttgtacactctgtgctgtggcagtgtgtgtgtgctgtgacgacagtgacgtcgacagatggaggaggtgcaactcgacctctgtttctttctggcctgaagaatgggctgctgtgtgcgcctggggctaggcaggacagctgcatcgctgttgccctgaggcagtatcagcacagctggagatgctgacgagcagc

SEQ ID NO: 34130 - DNA, 1050 bp, Homo sapiens
cccaggctggagtgcagtggcacaatcttggctcactgcaacctccacctcccaggttcaagcaattctcctgcctcggcctcccgagtagctgggattacaggcacattccaccacacccggctaatttttgtatttttggtagagacagggtttcaccatgttggccaggctggtcttgaactcctgacctcaggtgatccgcctgcctcagcctcccaaaatgctgggattacaggcgtgagccactgtgtccggcctgtttctacttttaaaaaaatggtatcccctatgtatgcttacagttatgatgctaaaatacaggttctggcttttatactattacatatcacactatcctagattttgagttcagtaaaggcaaaggcataattgcttaggcaaagttaacctgaattaaacagaatcaaatttattagtttatacagatttaaactgaataaatttatttacacctttatcatatgataagcctaaattccatgatcaaaattcaccaaaagggacttagtaattttattggatacacaagcaaaatacaacgaaatgtgtaaaacttttaggcatcagacctagggtctttttgtaagaaacttacttttctttgattcacctacaggcatgaactctgaggtatatgtattattaagtgcaaactaccctcaaccctttaaggattttcttatcattttcctctgtactaccagtcaattaagacttgatagcaaagaacattactgttggcggggtgtggtggctcacacctgtaatcccagcactttgggaggccaggaggcgggcatatcacgtgaggtcaggagttcgagaccagcctggccaacatggtgaaaccccatctctactaaaaatataaaatttagctgcgcatggtggcgtgcacctgtaatcccagttacttgggaggctgaggcatgagaatcgcttgaacccaggaagcagaggttacagtgagctgagatcgcaccactgcactccagcctgggcgacagagtgaaaccctgtcacagg

SEQ ID NO: 34131 - DNA, 1056 bp, Homo sapiens
tcatgcaatcctcccacctcagcctccccagtagctgagactacaggtatgtaccaccaggcccagctaatttttgtattttttgtagagacagggtttcaccatgtttcccagggttgtctggaactcctgctcaagcaatctgcccacctccacctcccaaagtgctgcagttacaggcatgagtccagcccagtttgttttaattatatcctggtttgcttctttgcttcattgtttctatagcagagtgttaaaattttaaatgttaattcctgttgaaaaacaatagcctgcattattcttctagtatttttgaaagtattatgttagattttgaactaacatatgcaggtgttacaggtaggaggacaaatagatactctggcatttcttccatagcaagggaaatccttattcacagttttgaaatttcaagaactccccaaacacaagagtttcagatgagggaatgtagacctgtatttctgtttaatgcaatgattcttctgtggagaactgaaaatgtctgtctactgtgtcactttataaaacctgttttaagtgaattgaatgtaaaacatatgttgaaagtataccatatgtagtattttgcatttcactttccgtaaataaaagcaaagtaagttccctaaaaagttagtttagggccgggcgcagtggctcacgcctgtaatcccagcacttcaggaggccgaggcagggggatcaccagaggttggagttcaagaccagcctggccaacatccaaattggatattttttgttactttttcctttctattctcctttgtaataagtgacctattatagaagtagtgcatttcgtgaaaaaaattgagatctatttacttaaatgcacgttggttcttgttgaggagaaatgaattagtagtagttatttggaggggcctgccattctgaattatttttacagctcacattgacaggagataattgaattaatggcattgaatataatttcaataaggacatagctgaatttcattaattgagaacataatcattaggatc

SEQ ID NO: 34132 - DNA, 1050 bp, Homo sapiens
acccgtctcagcctcccaaagttccaggattacaggtgttctagaagctttttcattttaacttacacatttagatctgcagtgtttttagatgttttttattatgaagaaaggtcactgtagttccactaattatatttttctacattatcttttctctctctttcattgaggtggtttctgttgctatgtctgtcttctagcccactgattttttttttcttcttctgaagtgtcataaaatctgctttactcttatctgggaaaggttccattttaaaaaaattgaaattaaaattttattttattagttttttcagatggagtctcgctctgttgcccatgctggagtgcagtggcacgatcttggctaacttcaatctccacctcccaggttcaagcagttctcctgcttcagcctcccaagtagctgggattacaggtgtccgccaccacgcctggctaacttttgtattttcagtagagacggaggtttcaccatgttgtccagactggttttgaactcctcacctcaagtgatctgcctgctgtggccttccaaagtgctgggattacaggcgtgagccaccacacctggctggtttcatgttaaattctgtattttcttttttccttttccttttctttttctttttctttcttttctttttttttttttgagatggagtctcactctgtcgccaggctggagtgcagtggcgtgatctcggctcactgtaacctccaccccccgggttcaagtgattctcctgcctcagcctcccgagtagctgggactacaggcacgtgccaccacacccagctaatttttgtaatattagtagagatggggtttcaccatgttggccaggatggtctcaatctcttgatctcgtgatccgcttgcctctgcctcccagcgtgttgggattgcaggcgtgagccactgtgcccggccttctttttttttttcctcagacagagtcttgctctgttgtccaggctggagtgcagtggtatgatcttgactcaactcactgaaacctccac

SEQ ID NO: 34133 - DNA, 1061 bp, Homo sapiens
cttgcgccacctgttagcaccacctgttgaacctgttatttcatatattttgtccagttttctttatgatgaaagaaaaagttcagcttcacctactccatcatgccaaaagtgaaagtcacctaactacatttttatacatgtaaaatttcagaaagctgaaggttttatgaacagtgacacttaaccctcttccttataggtatgaattttcataaacagcaagaaatcaagaatattccttttaattatgttagtctttacatcatagcttcctttagtgctttcttattataagaaaaacaagctacttttaggctttctgctaagtaaatgggaacactaaatttagttacttagtcttactatgtttctttggctacatatgatgaatgatagctctcaagtaactgcttctgctttctcctcctcttatccctgaaatcactgtgcctgctgaatgcatagttgattgtgggagacaaagaaaatattcaaccagttaggaagctattgccaagaaaccgggtctgataggacctaccagaggacagaagtataagggaaggagaagcaccaaagatgattggttttttttgcataatcgtctggttgagttgaagagggggaatcaactctatcttcaggatggtgaagacttggtgcagaatacattttgggcgagaaaaatcagttgtatttggatatattaggtttcagatgcaaaacaacagcattggaaggctgaggcaggaggattgctggagcctgtgattgagacactgtactccagtctgggccacagagtgagatcctgtctcaaagcaacaacaaagtggagatgatgggtatatagttggttgtaaagcaactctagtttgctgtagtgtgaacttaattgatttcttcatgctaaaatgtgaaattttacatttttatttttctgtttctacacattttctaccatgatttttgtcatcacttgcattaacttctttcccagattttaaatatattgcctcaaaaattatgagcaaaattgtttaaaatttatatcaatg

SEQ ID NO: 34134 - DNA, 1041 bp, Homo sapiens
cattgattatgattcttgcctgaatcagtattactatgatagtcgcaaaatggtgattctcttaactctagtcattccttgtaggtttattatttggcattctactcctgagtaagagctttcccttcttccccatatttattgtgtgtaaggacttatggattattattttattcaacctgttatatcctaatattgtcattatttactcagttgctctgtagatacttaagaattttttaaaaattagttttatcaaccggatgttatcctttgacttcttacatgtttttgagtattgtgaacaattttctgatatgaaaataaaattcttactgtcagtattccttatatccatatacagacatcccctgacaaggtggattatgaatatagtgaactactcttatatcagaatcaagttcttcgggaagcaggtctctatagagaagctttggaacatctttgtacctatgaaaagcagatttgtgataaacttgctgtagaagaaaccaaaggtatttttaaaagaattgtcatttattctaatattgaaatatgacagagcaaggctgaaaaatctagttgctgctgacagtttcatataattcagctttttgatgataggaaatctatttcttactcgtgtacttttaatagtttatgatgtgggaaaatgtacatttaaacaatattgtagatagaggagaaagttgattgtgaacaatgaaaagtagttgaatgaaatgactcataacattctttaaataaagtatctttgtattaaaaatattatggaatttgatcaaaacacaagagacaattagttttataagacagaggatgacatttcttagaaacagtttattaataaactatagtgtatgtagtatgtgccagatttattgctaataatatatattgatgaatcagtctttactaaaatacatataggatatttctgagagtctttatggttaatctgaatgtcttcgatgacacagaaagaatatgagttctggaagaaagggagaccagaga

SEQ ID NO: 34135 - DNA, 1026 bp, Homo sapiens
gaattagttaacgcatgtgaagcgtttaaaagtcactggtggccgggcacggtgactcacgactataatcccagcactttgggaggccaaggtgggtggatcacttgagtctaggagctcaagaccagcctgggcaaaatggcgaaaacccatctctacaaaacatacaaaaattatccaggcatggtggcacatgcctgtagttccagctactagggaggctgaggtggtaggatcgctttaggaggtcgaggctgcagtgagccatgatcgatcgcaccactgcactccagctggggtgacagagcaagactgtatcacaaaaaaaaaaaaaaaaaagtcactggcacatggtaagtactcagtaagtgttcatttttattatcaaatgagagcgaaagatataacagagagtgaaggatgcaagggtgaagtagtggcttaaaaataataccttggatgaagggaagcacattaaggatagagaaaaggaatcctgaatatttgaagcttatatggctttggagctcatatataatagtgaaaccactgtctctctctcttcatctggcttgtttccttccataagaaaatgtggagcaaataaacagttgggatgatctgggctttaaaattagtaaacaaaagagcctaggttttaagattgatttttgataattggggctgctaatatcattcagggatgatgtgattggtcatgcagtccagggaaggcaacagtgagtcgacaagttgctgataggttgatagttttttctctgaagttgaatagtaggattagtgagacagaaagaaaagacagttaagcttaaaataggatgcttaattgcttcttggaagacattaaaaggtaaagtctagatagtttttaatgtagccagattaagggctgctatggcagaattgttttgtagctgattaagggatcataaggttaggatattgaattgagtcattaattttgatgctgaagttgttccatatgatatcaggaataattgagga

SEQ ID NO: 34136 - DNA, 1053 bp, Homo sapiens
agatggcttggtgacagtgtgttgagtgaatgtgagaatctggccgggcattggacagattttctgaataaattgaggatgtgaagaggatggcatttctaaataatgtgaacttcaaaaaaggaaggagaccataacataacttggtaaatgatcttaagggaactggaaccaggtccatccacttagcagcactgatttataatgagattttaagagaaattttgaggaaaagttaaaattctaattggaaggttttctcagatattaaaattttttttttttctgtttttaatcaggggaacttctgttgcaactatgtcgtttggaagatgctgcagatgtttatagaggattgcaagagagaaatcctgaaaactgggcctattacaaaggcttggaaaaagcactcaagccaggtagtattgtttaaaacttactaagttttattgtttcttttgttaatatatattttatttactcattgaaaagcacaactagaataatagtggttaagaattggttcgaaatctgaatacaggccaagcgcagtggctcgtgcctgtaatcccagcactttgggaggccgaggtggatggattgcctgagctcaggagttcgagaccagcctggacaacatggtgaaaccctgtctctactaaaatacaaaaaattagcctggcatggtgatgtgtgccttgtagtctcagctactccggaggctgaggcacgagaattgcttgaacccaggaggcagaggttgcagtgagccagcatagtgccactgcattccaccctgggcaacagagcgagactgtgtctcaaaaaaaaaaatctgaatacaaaagtacatttgcaaacttctatttaatatgacagattgagcatgttctgaaacctctcttttatagatttatagaatggttgagaaaataattttagagacaactttagaaaaaaattcacaaatgcatagtagcatcaaaaacatgaaaggaagccaggtgtaggggctcacacttgtgatcccagcactttgggaggctggggcgg

SEQ ID NO: 34137 - DNA, 1041 bp, Homo sapiens
tattagtattactagttatttttttgagatggagtctcgctctgtttcccatgctggagtgcagtgcatgatctcggatcactgcaacctcccaggttcaagcgattctcctgccgcagccttctgagtagctgggattacaggtgcccaccaccacgcctggctaattttgtgtttttagtggagacggggtttcaccatgttgtccaggctggtctcgaacccctgacctcaagtgatctgcccacctcggcctcccagagtgctgggattggcctcctaaagtgctgggattacaggcatgagccactattcccagcctattcctctttttaatagtaatttataattaacctactaaaaatgaatattgcttgaacattaaaaaccagcttgggataaagctaggaaaattgcacagtgacttatcatttgactcatttttaatgtaccgtttttatagtagggtatcggaatgactagggagaagtctttcttagacagttatttgggacagaacctgagaatgagtgatctcatacgtacaaaaatatgaattttgtgccttactcatggcaaaaatgttgtaggaattggggcataaaaagtgtgtttaatttttttttcttttaagcctatttcttttttgaggatatgattggctactttctatatccttcttcctgctaaacagcttttgaattattttgctaatttgtcgttaagttttacttcctgttgcctaaggacagtttagaaatttctaaggtcacatactgaagcctttgtacagatatcacttgaatctctttctacctgttggtgttgcttcaacttagaagaaaacaccagtaagaagaatctgctggacaatttactgttaaagttgagagctatgaccctctggcttcttttgtttttctttctattcttctgcctccctccttctcttcttcaaattatacaaataatacacaattaacttttcaaagctgagactattaatacagaagtatacttagcaaatatgaagatcccctt

SEQ ID NO: 34138 - DNA, 1047 bp, Homo sapiens
taatggaagtttggtaggatcaaataatacttaaaattactaatctgattaacatgcttgttaattttattaattaacttattgcctgcagcaaacatgtctgacaaagagctaaagaagctacgtaataaacaaagaagagctcaaaagaaagcccagatagaagaagagaaaaaaaatgcagaaaaagaaaagcagcagagaaatcagaaaaagaagaaggatgatgatgatgaggagataggaggtccaaaagaagaacttattccagagaaactggccaaggtacttaataatagtgtttagcacaattgagtgacattttatgaccagctcttgtcatttttatactgtcttatttgacagtatataaccttatgtgatataggttttagagccaaaaattattttattttttagtattctttctttaatattttgtttctgatcgtgtttcatgtttaaaacttgaaataatgatcctgttccaaagtcatatagtatagtatggtggaaaaaattttggcttttgagtcattcagatctgggtccagatattagctcttatattttcactgtgtgcccttggacactttgtctaacctctctgatggttttctcatctataaaatggaactaagaaaatccttatttaggactggagaaaatacatatgtaaagcatctaatgtctgttacagtggtaacatgcaagtttttatgtctaggctaaattgagtttgttataaactgaggactatacgtgtatctcccatttacctctgttgtcagtttacattatttcttttctagcctaaggctgtaaatattttccctaggccaaaatctgacctgctggttttaaccattaagctgaaaccaagatactcattgtcacatgaaccattttgattaataacattcctttgtcctttcttttgaccctagacatcttcctgctttgtatgaaaataattgcataatttgttatgttaaagcaatataggaagcagtcgccccagactttaattttagcctcactagtaag

SEQ ID NO: 34139 - DNA, 1043 bp, Homo sapiens
ccaatgatcaaaatatatcttactttctctttttatagaaaagtttcttttgatgctacaatcagtaaagagggcatttgctattgattctagtcatccctggcttcatgagtgtatgattcgtctctttaatactggtatgtttttgttttccattacttaagtatttgatacagtggttgatggtgacggtataagtggtctgtacaagtttatcataaaccaaatgattttaaagctgtcacatactaaattagctaagggaaaagcagggcttttttctttatgatgaaggtttttattttaaggatacaagtattacctgattttgacatagaattattcagtccagatatttgagaatcatctttgtttctgtttctaaaaagttacatgtaagttgaaattttgaaccatattttgttatgtaaaacttcttagtaaattgttttgaaattgaagaatctctttgaaattgactgttttctccttatttatctgtattgtagatctgaatttgcatgaattatgttttcttagcacaattcgagtcataaaattttttgttactttaaaacaattatctgtatcttcaaatattttgacaatcagatcagttttatattagttttaatgtaaagtagaactacagaattttagaccctgaaaggtagaatgttacagtaattgtctctcatttcatagtgggaaaaatctgagaccttaaaagatgacttattctaggtaacagatagaaacttagtaacgcaacagtgactagagcccacatcttcatattgttctttctactgtaagaactgtacatttataataaagtactcctgtagtcaggttgtattgttgtttggatttttaagtgactggtgggggagaaatagaacctttaacagaataatctatagaatttggaaatactattaactatcacattgccaactccatacatttaaaactgaggaaattaaatcaggcatcccaatcaccaaaaaaatgctaaattgtcccaattgagaacatcattt

SEQ ID NO: 34140 - DNA, 1055 bp, Homo sapiens
caagtgatcctcccactttagcctctagagtagctgggactacaggtacacgccaccatgcctggctaattttttgcattttttgtagagacagggtttcactccaggctggtctcaaactcctggcctcaagcgatctgcccactttagcctcccaaagtgctgggattataggcttgagccaccacacctggcctaattctagttatcttgcaatttctaccacatctgcagttacttcctccattgaagtcttgaacccttaaaagtcatctctgaggacaggaaacaacttctaaactccagtaaatgatattttgccctcatcccatgaatcatgaatgttcttattgatatctagaatagtgaatcctttccagaaagttttcaatttactttgcacagatccatcagagaaatcactatttatggcagcaatagccttacaacatgtatttcttaaatcataagacttgaaagttgaaattgctccatggtctatgggctatagagtggacattgtgttagcaggcttgaaaacagcatgaatctcgttgtccatctccgtctgagctcttgggatacgagatgattgttaatgagcagcaatattttgaaaggaatctttttgtgcagtagatctcaatggtgggcttaaaatattcagtaaatcatgctgtaaacagatgtgctgtcttccaggctttgtcccatttatagagtacaggcagagtagatttagcataattgttaagggccctaggattttcagaatggcaaatgagcattggcttcaatataaagtcaccagcagcattagcttttaacaagtcagccggttcttggaagatttgaagccaggcactgacttctctgtagcggtgaaagtctaaggtggcttcttccaataaaaggcttgttacatctacattgaaaatctgttactgagtatagccacctttaacaatggtcttagctggatctggataaactcctgcagcttctacatcagcactttctgcttcaccttgcacttttatttatggagatgactt

SEQ ID NO: 34141 - DNA, 1028 bp, Homo sapiens
cgaactggccggctgggcgcgcgctcttgcggtggcgtaatctctcagcctttctgtgtctcctttcctccgcctcagtttggggcgggtcgggggaatggctgaggagatggagtcgtcgctcgaggcaagcttttcgtccagcggggcagtgtcaggggcctcagggtttttgcctcctgcccgctcccgcatcttcaagataatcgtgatcggcgactccaatgtgggcaagacatgcctgacctaccgcttctgcgctggccgcttccccgaccgcaccgaggccacgataggggtggatttccgagaacgagcggtggagattgatggggagcgcatcaaggtgagcggatggggaactgttggggaggacagggtgacaggtgtcccaaccccaccgtgggctggtcgctggccgtgtgcacggtgtgtgtgcgctccatttttttctcacgctgatgagattggagttggggattggaaggattgcaatactgcaaacttctaaggcagcgtttctcagacttcattgtgcatgcgatttacctggggatcttgtttttgaaaatgcaggctatgatttaataatctcgctgatgatgcaggtgcagctagtccgtggaccacactttgagttcaggagtgtagggcttatctaccgacccatttactgtgtgtgtcgtgtgctgggagtcagtcaaatatgaacggaggaaaaacagtgaaattgcgcgagaatggaaaattcatttaatcagtaatagttattaaacattcattcgagcagtgccttagatgttgtggaagtaaagcctattgcctttgaggaagtacttaggtattctcttgcatacagttttgctgtagtagtttctttatgatactgattttagaaaaatctattttcctgcagaaacattctatatgtgatagttcctactcaggttgccaaaagcatttctcatgatgccacctcagacacacgcccaattctttattccctttaagtcgttatttttggtccc

SEQ ID NO: 34142 - DNA, 1032 bp, Homo sapiens
tgcgcccactgctactaggtcatgatttaggattcccgcaaacggctacaggatcagttcaatcagcctcaaggccctatttgtcttctacattcaaaagagactagtggttgttgcaagccagattcttccacttcagctttagaggtaagggctttggtcaggtgacctgctgggataagcaaaaaagatgtggcacaagatttttgcccctgtagtcactaagatgacgatctaaacataaacaaaattgatatgcagccaacaggcaccagtatatctttactggttgttaaactattacaatactatgtacctttggtaaagaacagctgttctagtcccaactccgacagctaccctgacccttccctgtgccttctagaacctctctgtgactcagtgaccaaaaggttaatgcctggcacaacaggaggcctctaggaatccattctgattggttagtactcttaacctaccagtagttacatattttgagtatttcctggacacaaatacagccagtaaggcaatgcctctggctacacattcacttacgcttcaccactggaaggtataaaatgagagaggttgcactggcctcaccttgaaactgattgacctgctgcactgggtatggattccgctgtggctggaggtgctgccggggtagatgtgattgctgcaactgctagaacaacagaacacaagaggggtggagaggtgagatagggagcaagcacacaattcaatatcccagcagttccgaggaaggtagtgttttccccaaaactaaactttgtgttgaagaatcatatgcatacaggcaagtgcacaaagtctaaggatagagtcaggtaggttttcacaaaacgaacacactcagggccaccagcccccacatcaagaaacagaacgctgccaggagcccctcgtgccccttccagtcatcactctcccttgacccatgggcatcactgtcctaacttttaacaacatagagcagttatgtctgcttttgtactttgcaga

SEQ ID NO: 34143 - DNA, 1054 bp, Homo sapiens
gctggacgcggccctgcgcaccgggggcccgggaggagcggtctcgggcctgggcatttggtgggcggcggaggcctggctcccggcagaacccttgcgcgacctctttttctcctgttttcgttgtcaggcccaggcgttctttgggagagggacctctcgcggtccctgacgcagacatcgtgtagctttctccccgcagctcctgggtcgggagccgctttgcagctctcggctctggaattggactgcgggaggggcgtttgggtggaatgggacctggcacgcctggaccttcccgtggctgctctgcgagagcctgagagatgggaggggaggctgaggtggggagggagcctagagagccgtaaaataaggattggaccatttttccaggcggcgaaagcggcacctgggtttgtttcctgatcgtcttctcccccagagtcctgctgaacaagttttgggaagaaaggtttggaaaggagaaagaggatacattcctgaaaggcagggcttctgttatacagtgtgtcaacctcacactattacgcaacaataaggacagatgccattccaggttgccaacacgttttctatgcccgaggacccaaagctgtgcccatgtattctggtacctctattcctgattaaaatcagtgtagctagccattctctgagagtatagcttccatttaaatcctcatttggccaaacagttccttgatcttgtggaatttgaaactggatttatttaaccaggacaagtcaaagcagaacttgaacagatctgaacagacattatattgaagttccgtagcttgaagggaatggagtttattttcagttgcttagtaaagattccagaggagtttgacatcagtggtagcaaaatgtttggcaaacttaagattagggccatattaaagttttttccattgcataatggaaaaagcatggactgtgaagttagacctgggttcaaattcttggtagagacattggctgtgaaacctctgaaacagcttttctgaaagatatatagactttctga

SEQ ID NO: 34144 - DNA, 1332 bp, Homo sapiens
acttggatagattccaaaagttacagtacctttgtggcttcattgaatatttatgaagataatgtcagatgtagacaaaaataacacaataacaggagacttccataagtttgtgtattatgttagtctatgaaaacgtgcaaatgtattgtagagactttatgattagaattgcatatatttatgaaacttaaagatgaatgttttattgaatttgtaggtttagcactgtcttttattataggattagtaagatatacaagaaaataaccaccgtgttgtgaaaaagtgaccaaaatcatgtactaaatgcacagctttatgtaccctgtccaccatcttgtgcctcttctccatttgcctcttccttcctatttcccttccgctaaggaaaaaaattggtgtcacatttgtaaaagtaattttaatagttaatcatctctgagagtaacctgtattttaattgttgaaacttaaccaaaataagatactgtctcagctagggcttgtcatttgtgtatttagtgttaagataggaatgctagtgtctctttaattaattggaaatagatggaggctaaaaatgaaggtttttctttgaaactgaattaacttgggaatatttgttgttaaaaacttctttttgcccaaaataactcattttgtattatctgaaaatatataatttctggtcatgtgtatgttaaaatagaaaattttgaggaaaaatggaaatagggtggaaaagtactcggtaaacagtagtaaccaaatattttcactccagatttgtgttttctctggcacagagtagatcttttgggaaatatatatgaaagtggattaagtttgactacccttatgttagccacatctggatgagaacagttacaaagagtttggtctctaagttgatttgtacccagtgggtcaacttctgcaaaattccgtaatggtgtattagtattagaatagtgaataaaatgggaaagttatacatgtatacttattatcttgctcagtattttatctcacttgttctagaattttctgtaaaccctgctactgggtttgaagagttttagtcatcctttaacaatttttaaaaatttagcttctagattccatttggtaaggaaatcaatattggaagtattgctaaaatcttataatatgaaaagagatccactaatgtagcttaaggttattagatttgggcttttaatcatggaataatcttatgtattggtgtaagagttgatgaatgactttagctgtgtgaatatataatagtcaaactgcaaacattttgcatcccttttgtgacctaat

SEQ ID NO: 34145 - DNA, 1035 bp, Homo sapiens
taaaggcccaactacacaaatatattttaagtctctttgtgtcatgtctgttagcaacctgttagttaaaacaagttacatggccaagcccaagtcaaggggtggagaaatatgatatgcccaccgtaaggctatggtagggagtaggttgtataattcaattacaaggtaatgaagaattgggaccaataattcagtctaccacatgctgttacttccctattgtagttcacaattttgtctacatgtagattatttggtgtggcaaggatagaatacgggtcatctagaccattgtttgaaatcccataatagaacacaaccagtattaaacaataataggaatagaacagaaaatatttagaaaccattggtcataatatggttaaatatattttaggaattttttatactattataattattttaaatatttctgtgtacatctgtgtgtattttggacatccacatgaatgtttgttattgatcatgatgtaaaatgtggctcaaggtcaaaaatgttgatttgctactgtctagtattatgaatcgtgccagaaataaaatagaccttcttgagagttgcaagcatatctgttatgttctgaagagtaacctttaaaataggtactttaatgatttagttgtactctttaagaatggtctatttaagaataactcatatatataagtgaatatttgggggaagagtccagagttacactcctttgttcagaattgttagagagtgattaatatattttttaaaatgaggatgtggaggtcctgaaagctaacaggttgctggttctcaaaatttatttataccttatttatttgtatagttcctttatttgaaacataggatgcagtttcccaaagtaacaatattacaaattttagcagatgcacttggggaggtgttatatttcaggtccattacaagagtagtccttaaacttaaggaagaatcaaaatcttctggaggcctattaaaacacagattattgggccccatccccggaatttctggtc

SEQ ID NO: 34146 - DNA, 1048 bp, Homo sapiens
atgagcagagtagtggctggagaaatgagtgaaatgctagattgatacattgcagagtcttgtatgccatactgaaggatgtagatgttgtcctctggtttttaagcaaacaagctacatttttagatatgtattttaggaagatggagagtagatttgataatgtgggaggctggcagaaggaataaagaataggaaatttgagttattcaggtaagaaatgacaaaggcataaatacagtaggagaaagagtgctatgaggattgctttgaaggacatttcagagatagaaaggtttagcgtatggggatcttttgatacattgtgatggagagaggcaggtcagaacttggagtgttgtagcttggggaactaatgggtagcgatgtcattaatagatctagacactaaagaaagagcatgtttctttagggaagagaagcagttttatttagagctgagataacctgttgtggagctatttgttttatatatactcggaaaattaagtctactggtgatatctggcaataaagatttaggaatgtataggattgcccagagaaaacatgaagagaaaatccttcacaaatccttacagttgtgaagtttgccattcctaccatgtcttgccctctttctaggccttgtatcctatatagtactttacataatgttttgtatttaaggtggcctttggtgggtcttatattaaactgaaagccaggaaatgctttctaaatagacatatgaaccacaagctatgaaagactttattgtgataagagggtatgctttttaaaaataattttatcatttttagttttaaaatatgcatgaagatgtgcttactgcagataactggttataaacagctgtatttggatgtagaaagtgtgaggaaaaggccatatgattctgataacctacagcatgaagagctactcatgaaggtaaatttctgttttctttatgtggagttgttgaacgctagaaaaataaatcaggcttcagctaagtaaagtctgcaaattctagaggcttata

SEQ ID NO: 34147 - DNA, 1113 bp, Homo sapiens
tctttccaggtgatgccttctcgccttccaaatctcagtttagacgtgctcttctctgggaagtttattcatttactgtgtgttagatgttgttctaggccctggggatgtagcagagaagaagacaaagtcactgcatttggtgaggagctgtcatcttcagaatcaaaacttccccctagtgcagtgtccacctccagatactgcttcatttctctgctctctttgttcatgaaactttttcaataattgctttttcatttcttcatctccagtttttatctaattccaatttagtttctctctccatgactctgctcacactgatttttctcagacaccaacttttttttgccgcctaatacaatcgccatgttttttcttcatgttatttgatccttttagtggcactgggcataaatgaccacacgtttcttttcgaaacattatcatgacttttctgatgccacattctcctggcttttcttttgccccacaggaattcctgtagacatccactgccttactagatatagggagcacctcagggcccagccctgtgcccactcctctctttagccctcatacttttcctaagtggtaccatctggtcccttgcttgaaatgccaaatgtgcattaaatgccaaaatgtatatcttcagcccaacctctgctttaatcccagcaactgtatgtccagatcctttttctcccttaatggataaggataaagaatcatatgaggatgcttaaacaaagtaggagccaatgcaacatgtctttaaatggagggaacagatttcaggttcctaaggacagcattgatgattctacccaagtgtactgaagatttctagcaggcgtgagatgctttcctttaccattccaaagtgttgttgctgggactttgctaacttgcctctaattttttttttaaatgaatatatcccttgttcattagctacctattgaacataaataacataaatgagatatcatgtcacaccagttagaatggcgatcattaaaaagtcaggaaacaacaagtgctggagaggatgtggagaaataggaacacttttacactgttgatgggactgtaaactagttc

SEQ ID NO: 34148 - DNA, 1035 bp, Homo sapiens
tttcatatttatacacctctctacaaaagcaatttttaatgaaggttagtggaattgttaaaaatctgagaggaatgatgactggaggtgtttggggtttttttctgtattcattttttaatgagaaaagttttaaatgtagtacaggttagacccaactactaccttactattataggacgattctatgtttctgttaaagtattcaagtagctttctctgggggaaaaagtaccacttggacacttaaaggaattgggatttttgtctactttggataaggcagttgacttcttaagtaaaagcaatagtgtaaaatgtcattttgtttggaatgttaagtgagcaaataaaaaacatgttgaaattgttgtaagccttcctgttgatacttctttttttccatattccctcatttagtcattcatgctcattaaacatttttcttatttttcttatcgtgttgctgtaggtaaatcagaatatacagaaaaaagttttgattttcttgacttgttaactgctgattacctatttacagtgttgaatgagaaacaagtggttatgagactgaaaatttcctttatttaaaaagatgccaccacctccacctgccccttcttacaaagagtaggaataattcatgctaaactgcgctgttttattcttaactttacgtaaaagttctattatccatcataaagtggatctatttacatgttaatacatcatttttttacagctgcatagcatttctgtgtgcgtgtgtgtgtgtgtatgtgtgtatatcttactttgaaataaaaataggtggatctggttggataaggctacgttaatatgttagtactaactttattaaagttagtgctaattataggtttaaatatacgtatatattcgaaaataggctggaaattaaagacaaaacatccatcttaaggagtttgatgaagaacacaataaacgtaaagaaaatagacaaagaaatattaaagaattaaagataagtgcttaaaatgcatagaatagaaa

SEQ ID NO: 34149 - DNA, 1050 bp, Homo sapiens
gatgttttgtttacatattacataggaaaaattaaacttgttatacttaaggtgttggcagcgtcaggtcatctgaatatatagctcaaaaaagtgatataaactggctaaataatgctcttattaatgatttttttgtttttgctaatgatacatgattcatttgttttaatgaggtgcagaatactttatcattggagaaacttttttcttagtgggaaaagaagactagtttgtcttttagggtaaatttttttgacgtttacatttttagaatcgttagtgccaataaatgcgttaaggatcacccgcttcatttggaataatatgtgcttaacgtttcataaggcttagaatgtgcttaactatcgaaaggatagagtttaacatttaacaagaaaaaggacactttgttatactatttcttagtttattaaaatagtaaatgcagtcagtcaattatatcttttctgttctcttgtgtcaaaataggggaaaatgcctaaaaaaaagactggtgcgaggaagaaggctgagaaccgccgagaacgtgaaaaacaactaagagcatcaagaagcactatagatttagctaaacatccatgtaatgcctcaatggtatcagctttttttgatatcagttggtagttggaaaaactatatactattttatctgacgtatacctgaataaaattttagtgaagacagtgtttttgcatatagtttgttgctgaatttagtatctctggcacgtctgttgatttcactgagtggcagtgattgttgttggattttatattattataaaacctagcatattactttacatactgttggtgataaaggtagatattggacaagaatagataatagaaactttcatcttccagtttctttaatgccttagtcttattgggttttcatcatattttcttagcaattctttcatttctcttttctgaacttcctacttaacatctgttggcttcccattctattaccttatctacctgtgctaagtgggttagtcctgataatttctgggctgc

SEQ ID NO: 34150 - DNA, 1040 bp, Homo sapiens
aaggctggacttcacccagtgcctgtcccagggctaacatttattggggttggttgggtgaggacagattacatagcgcagatgtgacagtgaggctgtcttctgtgtttaagagtcctttccagagaagagaggttctgaatgactggcatgcctaaatatatataatgacagctagattttggaagtgcttcaataaaggtacaatgtatttattaggactaagaggtgataaagttggctgtgtgtggaaggggtacacttcacagaagaggtgggattttcaccagaactttcaacaggtaggaggcacttttcagggaaaagtgttcgaataagtaaagacatggagaagagagaatataagacatatttggagaatggctgaccattagtgacttgagtctaaaaagaataggccaagaaggtttggaaagtgattaggggccagattgtggagagcttttaaaaccatgtttaggaatctggattttctgtgaactttattattttgtattctctttggaacggtgccttagataaatgcattattttaagggtcacccacttcatttggaataatatgtgcttaacgtttcataaggcttagaatgtacttaactatcaaaaggatagttcttgtgttcattctgtggtattttattccttacaaacaattgaaaaagaaactaccaatgtatttagcctcctttgtgataatgccacttcttcagggaatcatatacccggagtatcactctcgcatacctttgttattttaagcatgggtaggtgcttgtatacatgggtggagttggggctttggtgtagtgtcacttaaattttaacctgaaaagcaggttattctttgtaatacaagtaaatttgcagttttcagtcagcagaaaaattaatgtgatatttttatatgttacaggaatgtgacaagtgtcagaggtaaattttatttctttttctatctacctttaataaaattgtccctctgactttttatctgacattgaccataatttaaaatt

SEQ ID NO: 34151 - DNA, 1050 bp, Homo sapiens
atctgtttaattaatgctttttgatagtgattgaaactaagatgtccaaatcttactgctacctctgtccctggcagctcaaaaaatatttatatagattattgtttgctttggaaacatttcaatataattaaccaatttgtcttattttaagcattccaaagaacttaaaggtgtttcattaaaaaagatacatatatttatatacctttgtatgaagtagttacctaatcatttttttttgttttgataagctgaaatttataggccttataaacatattgtgtagccttataagagaattaataccaacctcaggtcttatatttgtatgaatgaatttttaaaaatcattatagtaacccaagttattatagtttgtattggggcttatttagccttgatattgaatacagattaagtttgaggacatttcttatttgaaaatctcatattggtgtcaatttaaaacagtttgaaagcaattgctgaaaatgtcttagtgcgattaatgataggaagattggagatgtttaaagatatcactttctcagctgtacttaaattaggactgaagagatctgtagcggtcaaaagctggcaaaccaactgtttatttatcaaaaccgactagttatttatcaaagcaggtggttggtgattcaaatccatcaaccacctgtttttataaataaagttgtattggaacacagccatacccatttgtttatgtgttgtctatagctgctcttacactacagtggatgagttaatcactggcaacaaagtctacaagacttgcaaagcataaaacattatctggccctctacacaaagtgttaaccagttgctgctttaaacaacggtgacagttttgtggagtcttactgaccactactttcatactgttaggaaaatggctcacagtcatctgaaaacacactatacttggttgcatatggccttgcttgggttctgccttctgcctcaatgctgtttttctcctttcactcatgcctagaatatatccaaccttcaaggtatgattca

SEQ ID NO: 34152 - DNA, 1043 bp, Homo sapiens
aaactttgttaaattaagttttaaatgtcttaaaaagacatggaactttttgttagcaagtgttttacattttgattacatcttgttcagactcgggagtttataattaaagattaaatgattagatgttttccaggtgtttggagaaagagaagatttaaataggtgaagtacaaggaattttttgggggtagtgaaactctgtatatggtagatacatgacactacatttgtcaaaacccttataaggctgggcacggtggctcatacctgtaatcccagcactttgggaggctgaggcaggcagttacttgcggtcaggagttctagaccagtgtggccaacatggtgaaacacctctttactaaaaatacaaaaattatcctggcgtggtggctcgtgcctgtaattccagctactcaggaggctgaggcagaagaactgcttaagcccaggaggcagaggttgtcatgagccgagttcatgccactgcactccagcctgggctttctcaaaaaaaaaaaaaaaaaaaaaaaaaaaaaaaaaaatatatatatatatatatatatatatataattataacacaaataatggaccttatatgccttatatgtgcaaattttaaaaatcttaggaggtcagtggaatctcacaataaaatatagaatgtgacaaaaccatctagctgtattatggtgtacgaaacaacctcactaaagaagttgggcggaggggatatgttgacctaagtaagtttggaaattattggcgtctgtaaaatgaaagccaaaagaaactgtaagcattgtactctagttgtcaatgttgtttgccaaagaagtagagattaataattctgatatgcctatccatgtataatgaaattaattaattaattagatgccaggtagtaaaagccaatttctcggtgttggagtgaaagattacagataaggaagggcaggaggctagcaggatctgcatggtgatgaatcagagttgaagacatccgtatgaactcatgtttagcttaacatgataa

SEQ ID NO: 34153 - DNA, 1048 bp, Homo sapiens
cattgtggtagagatctaactttagggagtgtctctatcagatcccatattactttttttttttttttttttttcattaaattggtcaagcagatttggtgtctggtgagggcctgttcctttagatggagctttctgtgtgtcctcacttggcagaaagagcaggggtgcccccttcagcctctaatcccactcactagtcacctgacaaaggccccacctcttaatgccaacacactggggattagattttaacatacgaattttggagggacacaaacattcagaccacagcaccttctgatttgtgtaacatctgatatgaagtttatttataggtggtcaggagattggcatacatgaaataaggtaaagaatggaagcttttgagatggaaaggcagaaatggaaaggatgagaaaaaggctgactgagtaatgaaggataatgaaaagccatggccaagtggaattttctactctctgctctcgtcctctctcagtactctctttagactggccttgagacctgtattctggtgagccctgtctggttctgctctgacagtgtgacttcccatgatgcaaagaatccacagagccaagatgtgctcacacataccctgcctttagattacatcttttttatgtccatatttacatatatattcacatgattttcttttaaactaaaattgttttttaaaaaaactgcagtggttttttttttccttgttaattcaacaatttctcagctctttccattttagattcctcatggatagattcatgtacatctatcttattatttaaaactctatatactgttgcatagtatcagtaccatagtagccatttccttattgacaatcatttaggttgtttgcagttcttctataccataaacagtgctacagtgaataccctctgtacacatatgcaagtgtgtctctgctttgctactctgtataagtagaatggccacaaaattttatgagaatcaccccaacaatagttggaagacgtggaatagctgtcaaggactatgt

SEQ ID NO: 34154 - DNA, 1042 bp, Homo sapiens
aaagttgataagaaaaatccatatgttgtaataattttctatatgggtaacatgagattaagttttatttttcttaaaggtcattgtgcatagatgctttcatttctcatttcttaattactttgggattttatttctaagggttaatactgagtaaatattagtatttaatgaaaaggagacatttttattacaaaatttgaaaacaaattgtttacttatgtttaactgtgtgctaaaatttaagtcttcattctactgcctttgaatagcactgcagtgtattctctgaccccaaagttttattttataaacattttgctggcatatagagaacataaagagttcaaatgtgacttgaatttccagcttttgagtattccttaacttgataaaatctgttattagacaatatttatttttgccatacagtgaaatttgatattttcatgactagccaagtactgccagttacttcaaaactaagtgggggaaaagaaagttcaaatgtcggtgtaagaatcttcttaatggtgttaattaatttaacaacaaaaataatttttactttacttttaaactgtttttcttctttatgacctataggattttcctaagcccagtgaagagaagattaagttaattctcaatcaaagtgcctggacttctcaatccaattctttggcgtcttgcttgtctagactttctggaaaatctgaaactgggaaaactggtcttattaacctaggaaatacatgttatatgaacagtgttatacaagccttgtttatggccacagagtaagtttaaacttgaatcttttcattttaactgtagaagttgatgcatgctgatgaaatataagatgatagaattgtctacacattattccttataaatggcataaatgttaactttgattgccttattcagaaatgaaactgcttttagtgctcagaaactatgaaaatgttaacattaggctgggtgtggtggctcacgcctgtaatcccagcactttgggaggccaagacgggtggat

SEQ ID NO: 34155 - DNA, 1308 bp, Homo sapiens
gctcttaacacctagttaaatgccctgaattatatgttgataatttgagtactctttctcagcccatttctcattccagatctatggctctaatggtttaaatccaaaactgcttatatagcccacagcaactcagagtcagaatgcccacagcagatcttatcatcctttcccttaaacctggtcctcttggctgttccttgtacagtggctcagccagaaggttttctttgacttttctctctctctcattctccacacccagtgaccaaaccctgtcggttttaccttccaagtatcttgatttattggccactcttgcctaggcgatatttgcctttcttctggattgctgcaatagccagttgcagttgctgctctctgcctcctcttgggcccctcttagctgtcttatcaaggcagccagagtgacttttctgaaataccaatctgataatgccattccatagctcgaagctgttctgccgcgctcttttgctcttcggagtgcctctgcctcttcccttggcttgcatggccctttatgtggcagcagcacatccatccagtagtgtttgttgcttccttctccactcagtctctccccttcagctatactgaactttcatggtccagatcagctctgagatctctctctccgggcctttgcacatgctctcctctcctccaggagtccttgacactctcttttctgtctcacaaccaggctaactttgggaaccttctctgaactccaccaccactgccacatgtacacacagacatactgtgctgggagcatctgttttgtcctcctgtcatgctctgttattctcatagcatagcacttgccacacttgatatttgcttgtttacttgcttatttcccctcccatggtggggccatgttgtgacttttgtgagccccaggtacatttgccttcataggtcccccccttcctagattaaaatattctaacctggagtagttatatattatttttcattttttattttgatttttttttcacgcttaattcactttatttttcttgtataaaaaccctacgttgtagccacagctggagcctgagtccgctgcatggagactctggtgtgggtcttgactaggtggtcagtgaagtcctgatagggagacttggtaaatacagtctctttccagaggtcaggggtcagatagctgtaggtcttagaaatggcatcaaaggtggccttggcgaagttgcccagggtggcagtgcagccctgggctggggtgtagcagtcatcgataccagccatcatgag

SEQ ID NO: 34156 - DNA, 1049 bp, Homo sapiens
ctcccgccaacgagttcgtcaggatgtccagccgcttgtgtctgccacctagggtctggggggtttttataggcacaggatgggggcgtggccggccagggtggtcttggaaaggtgacctttcggcggcaaggctggagtgcctatcctcacctaggttcgtggggatggatccctagtcagggaccacgccttcctctaccaggcacttcccttccccacttccatatcatttaaagggaccaggctcttcccgtcccagcacttccataacaatttgacaatttctggagacattttggttgctacagctggagggaggaatgcttctggtatctagtgggtagaagcagggatgctactaaacactctattgcacagatttatctggctcagaatatcagtgtgctgaagttgagaaatcctcatatagaggggttcataaagcttggttcttacatttattttattcatttagtatatttccctatgttgccagttggattgtgtcatagcaccggaagcaaacatttatttttctgactgaagtaatgtttgagaaaaacagtcattgagatggctgagcctttgatcactagagggtttaggtgataggcaaattctctctccaaggatctgttgtcatttaaatcattaccaaaatactcatttttactttgctctcctagcttagagtacagccaattgttgtctggtagggggatgctgagtcatttattcatgcattttattacctcttggctgcaatatcaccattcattgttcacaagccacccagcttgtttactttttataaattacatgtaatcaagtcctcttgcaggtctggctactgtaattggcagcagccacagagcagggctgacaagtctgcatttatgctgatgtctcatattcagcccactctccaagctttctttcctcttccatgtgtattttagaaggaaggcaaatagaaggaatgcaaagagagaactgttaaggagttttctcttttcagatgatcttaagatacttatagcttggca

SEQ ID NO: 34157 - DNA, 1068 bp, Homo sapiens
tgttttgtaaatctctcctttagtggaagggaaagaggatgcaactatgctgagaaatgtgtctgttatataaattgctattttaaaaaaccacttttaaaaactaagaacctaggaaagaactccggtacgttaaaccaagccctaaattttcaacagacattttaatgattatatattttatacgttgtgtgtacgtgtgtgtatgccttaaagtttttagattgaagttattaaatttcacctgtcttttgttgctcttaaatgatttacatgtaattttgtcagtgattcttacatgatcaccatctactcataattaattgtatagacacaattttaagtttcatagctttttttccagttgaattgtaacagcctgtttaaaagacaaatttataggcgattgtaatcttcatgaagcaatgtgagttgatgaatacctttgaatgttgtttcggtatttttcttttttattataaaatgttaaatatttcatttgtagagcttctctcatgtcaatttgttgtatttgacacaataggaatactcatgcagtgttaccagtttcgtgatatgcgttcaacatctctgaaggtggtgaatataaaatctgtttttcaaacaagtacacacatgaaactaaaacaatttattcaagtcctaaaacaacgttagtgaaacttcagttctgccactgtgcccacatttaagctgacagcatgtgtgtgtgagaagaagatacacattactgataatctctttagaatgcattaatattttcaggcccaaatatgagtattcagtaggttcatcagattaaaaaagctaaatgaaatttaaatattgacttgtatgtttcctttaattaattttggtgacttactaattggtatttgtggggatacgtagaattttttgaattggtgtttgtattctccatgttttagttataaagcactatgaagagaaagtgaatgaagaggctgccttcaggtgtagtaaggtttaacttctatcccggttccaacttgtcctgctgtcagcttgctccttagctccctggct

SEQ ID NO: 34158 - DNA, 1052 bp, Homo sapiens
aaaaacacagaaaaactaatgtgcagcactactaaaaaagaattcaaggtgtatgttgaacatttttcagattaaaaagaactcactggaatgtggctggattgctagtatcgccctgtggagctatctgggcttcatatgaggctattctaagtacatgcatcaaaaaagagatatagaagagtatttaaagtaatgataattggcctttttcaaaaaatgacttgctttctaaacctgaaaaatagccatcatgatactagagaaatagctgagatattaatatttcctctgtagattgttttgttttataagggcattttgtgtcttactaagaaatctcacataaaagtaagaacaccaaattaaatattagctcttgtggttattttaagactcatctcaataaccaagagaatttggttctcacactttgtaccttttgattgtaaacagctttaaacaggtttatgttgtacttcatcaaaaattatagaggatctgcagactgagacgcattgggactgaaattaggcaattcagagtttctcatgcatgtaagctgcttttattttgatccctatcattcttagtctgtcttttcaaatattctactggaaggactgttgtgagttgagggcaaaggagaaaatggcagggtctcgagccaccaggcctcataatacctgctctttgaggtagagtaaaagctaactgatgaatgttttccagaataatatttagatttagtctggtggtttttttttttttcttgttttgtttgctttggtttaagctcaatacagtcacatctgaatttacacaacaaaaatgtttccgaaaagttgtggatgaatccatttttaataagccaagtactataaaaagcatcagaagaacttgttaactgaacttatcctaatgttctgatcacctgtttcttttaatagacatagtggttgcaacaatgctttgattagttcctttttggaagctggcttttgttggggggagggtttttgtttcttgtatcttaaacttgacaccttgat

SEQ ID NO: 34159 - DNA, 1031 bp, Homo sapiens
ggagactttacagagcgtagtgccacatgttactaagaagtcagggaaggtaagccctttaaaaaaaaatcatagttatttaaagaaatattgtttaaattcctacaggactttggacaacatgcagaagtagttcaggtatcttgtttagcattaaggaagtgagagtgtgcttgtgttgttagcttcatcttgtcgtatacccaaattttgtgatacctcaaaatgcagagaccgaaaatgttcataaatgtactttaatgagatttctcaaagtgagttattgtttggagttggttaactctgtatcacgtatttcgatcctctttataatgttggctaaatgtttgttaaagaaaagtagtggaaaggaagatatatgaaaacaattagatgttaccttcttgtaagtcacattgaccttattcaataccaagtaatcattagacttttaattttacggaacaacaaatttgccgtggggaggtttaagaccaatggatcaactatataaactgtactagcactaggtttttgcatgctcttcagaggaaatgcttttccttgtgtctatgcattaatcatttacctttcccagagttttgtaatgtttaattccagtgcttcagggattgtgtttttatgtgcagatttaataggtggagttgggggtgtgggcagatataggacagaattagagagaatgcttttcttggttttgtggtggcggttttgttgtctgatgtataatcataaaggctaaagaacatttgtgctttaaatcctatggatcacacaaaaaatctaatgagaaaagccctatcttttgattgcttagcgataaacatgtttataaaaaatgtattcttagtctccaccttgtttattctgtcattaacaatttttatttagaacgcatgctgattctgcaaaatccacctcttctgaaacagactgcaatgataacgtcccttctcataaaaatcctgcttcctcccagagcaaacatggaatgaatggcttttttcagc

SEQ ID NO: 34160 - DNA, 1044 bp, Homo sapiens
aaagcaagaccatcttaaaaaaaaaaaatcatactgggaagaagacattagaaatggtagaaagctgtaagactgtagtttgtttctctcccttttgggagtggttgtataaaatcattggttgtgctctcattagaagttattttcttgtttttaaaagatattttgaaatgtgagttggttggaaatttaaggagccacatttttagatgaatgtgtgtagtggtaatagtcacagaattagagtttttaaagacgggttgagtcatatatagtaatttggtgatttattatgatatttaacaaaataagttaaaatttcgatcagttgacaacatccttgtgggaagaagagatggaaataatgacattagtatataaagctcagatttggaaatttattcagactctactgaatagctgtgtacttgttttttatttcctcttcatttacctgtgagtgataagtctatatttttctctccctttctagttatgttggatattttaagttatcaatttttgtttgtttgtttgggagcccaaagagtggtaattacttaaccagtctttgcttcagtttccttacctttaaaataatactattaggaatgtgttaatacatttataaacctgaaaggaatgcagatgcctactactgctaactatctttccaccctcttcctttctttatgttaaaacctccctcttttttgtctaaacctgcctcctaagaatttcccgatctagtggaattgcagaaagacattttaagtgtctattgaatttttcactggttaactttgtcagttttttaaaacttaatggttctgacatttaaatgattaatgacgttactttagtcttaggaaagctggttctaaacgtttgcataatatagctagctactctactcctttttagtattcccacctctttttatatactagattacttgtcatcagtaaatgtaatgcgtagtttatttctacgtgatgtaatttttttctcttgttacacaggctgcttttgtcagagacgttt

SEQ ID NO: 34161 - DNA, 1071 bp, Homo sapiens
ggagtagtgttaaagcatatttatgatgggaaaaaggataaaggtttaaattagtagattattttcctgttaataaaaaacacaatggcttaagaatcagatctgcttgaattctgacacttaactcttacatcttacaatcagtgtagggggtgatgtgtggttgtttcagtgttagaacctagaatggaatcctgacttaagggagaaagtattctcttacagttatacaaaatacagtggggggaagaagaattgcataataattaatatagacaagtttttgttgttgtttttgagacagtctcactttgtcgtccaggctggagtgcagtggcatgatcttggctcactgaaacctctgcctcccaggctcaagcagtctctccccattcagcgtctagagtagctggggctacaggctctggccaccatgcccagctaatttttgtattttttgtagagatagtgtttcaccatgttgcccaggctaatctcgaacttctgaactcaagttatcaacctgcctgccttggcctcccagagtgttgggattacaggcatgagccaccacgcccggccttaatagacaagtttttaaagcttagttcaatttacattccatggaagaatctaacaggttcacttttgaaagggctaaagatccatctgttttttcttaaatctagctacattgtgtataaacaactgctaatattgcattatgagcacagttggtatgtttttgcttgctgtatagctttgtttctacatacagcttcctgtgacggttcacaagtaaaagttggtaggtagagaaacttctctaacagacaccagattaaaataccctgctaagcaggttaaagcaggagcttgtaagaatgttatataaagcccttaatgacctaactcaggaattctcagcctcttttgacattttggtctgggtatatctgagaggggtaaggagagaggggagaacgtgattgtcctgtgtattgtagcatgtttaatagcatccctgatacttttactcactagatggcagtagtaacattcctccagttg

SEQ ID NO: 34162 - DNA, 1045 bp, Homo sapiens
ttagatgtgaataaacagtaaacagaaatgattgacatttgagataaaattataaagcattaaaccttacatttaaagtttcaagtttccagtaaaataaagtctgttcagttaacattatacaacacaatcttttttcagggaggcttgtggatcagaatctgaacaaaattgggaaagatgaaatgcttcaaatgattagacatggagcaacacatgtgtttgcttcaaaggaaagtgagatcactgatgaagatatcgatggtattttggaaagaggtgcaaagaaggtgagatgtagattaaataatgcttttaatatagaatgttttagaccagaaacaggaaatatttgttacattgatgataaataattttatttccttaaagagaagcttttgtgtacgtgaagttaatttattttgactgcagttttcatgctttctttgctgtgaatctaagaagctgattgttttgttctctagactgcagagatgaatgaaaagctctccaagatgggcgaaagttcacttagaaactttacaatggatacagagtcaagtgtttataacttcgaaggagaagactatagagaaaaacaaaaggtaatttagaaataggtttgggttacatgaaagctttattttactggaaacttggaattttaagtgttactgtaatgtcttataattttgcttaaaacagtagtcatttttgcttattcacatctgaatattttcatcattatgtaaaatttaatgccagtttttcagttggtaagctctgaaatatttttaaagtttttgtaatgaagtttgtggtatatgtttacagtgaaatatattcttgtatgggatgaatagtaatttgggatggtaacctgattcattttattttaaacagcagaattggctggtaataaagggaaaaatttcttaacttcataagtaatacttggtaatatagagataaattgaaaaatacccagagattagaagaaaaaaataattctacccagtgtttttcttgttaatatttaggtcta

SEQ ID NO: 34163 - DNA, 2055 bp, Homo sapiens
tgttgtttaaggatgcatttctaacaattaacagtgtaagttaatcttggctgttcttttttctaatagccattaatcttggctgtttttttcctaatagccagtaatatctggcatatgtttcttagcttattaatggatggttgtgaagtgcaggtgcattaaaatatatcattctgatgttatgtggctttttctgtgtaaatctgagttgttttattatttttgtatacttgtaacaggttgcctatccctcgtccaggtgaagttttgggattagttggaactaatggtattggaaagtcaactgctttaaaaattttagcaggaaaacaaaagccaaaccttggaaagtacgatgtatgtattatcaccttgtaaaaattaatatcatgagtcagttttatgagattttggggggatgatatgtatatttttaaaatattcttattttcaaaattatttatggaattaatgctgagaaatttataaacaaagctcttttgtacttttgaactaaaaatctgttaatgttacttaactgaaaattctgagttgttaagccttgatctgaagcagaattctgcttgattctgctgtattacacacgtttctatttaatttgtcccaataatgtaaaaatagctcaattagtttttgttgcagtcaatagtttgattaggcttttgactcatgaatggtaaatttccaactttagtacataaagaaatttaggagccactgtgtaatgttcttaagttagatatttttatttgtagatattataaaatggagcttcaccagagtgtgaatgccgccctattaattgttcaaataaatcataagtgtattttgcttttcatttctgaatccttgattaagtatccagaaagatatcttggatacctgaaaacattttcacttgttttgaaaatatgagcaggaaacattccttccagcttaacctcttattagatgcccttctatgtcctaggtgctaggaatctgcttttgaataacataatatctgttctgttttctttctttgctgctatagggaaatgagacttttattaattatgttcgcctccaaccttaagttaaaagccacaagtgttctatttgcatatataatctatttcctgtagcattcatcctctttgtcattgtattattaaattcacatgattctgtattttttttttttttttaggatcctcctgactggcaggagattttgacttatttccgtggatctgaattacaaaattactttacaaagattctagaagatgacctaaaagccatcatcaaacctcaatatgtagaccagattcctaaggctgcaaaggtcggtttttgatagagggaacttaacggatattagtagaagtataaaagatatatcaaaataaacttgttttactttgtgattctttttaatattgaaagaaaatagtaactgtttttggtatattgtggcaggggacagtgggatctattttggaccgaaaagatgaaacaaagacacaggcaattgtatgtcagcagcttggtaagtgtttattttttgtttgtgtgaatatatatttatttattttttgagacggagtttcgctcttgttgcccaggctggggtgcaatgatgcaacctctgcttaccacaacctctgcctcccgggttcaagcgatactcctgcctcagcctcccaagtagctgggattacaggcatgtgccaccacgcccagctaattttttgtatttttagtagagaccgggtttctccatgtcagtcaggctggtctcgaactcccacctgcctcagcctcccaaagtgctaggattacaggcgtgagccactgcgcccggccattttgtgtatatatttcaataggccctgaacttaagtgatgaaagtacacatctttatgtggattactgaaaatctccagtaattgttatatttaaacaattttcaactgaaatagcattcaaacttcaaatgatgacatgcagtatactttttacctggaagaggtgaaatacattgagca

SEQ ID NO: 34164 - DNA, 1024 bp, Homo sapiens
agtttacagattctgaaattatggtgatgctgggggaaaatggtaagttttctgttttgtgataagtaaaaatcttcctgtttatctagtaaattagttttaactgttttgtggaaaaatttgaatcatatgttatagggctagaagcagagttttatttaaacccacaaatttcttagtgtactttcacatttttttggcattgtgtaattcaatttcactgtaattcaatcaggttaatagttcttattttgttttataacctctagtgaaaataaggtgttctttgtcagctggttttttacatgtaaattgataaggcagttattaatcttataaattgactaagatggaaaggataaatggtgattcagaaataatccagctttaaaaattttttcctcatacacttcaatgtggaacttttcttattttaaattcagagcaatctacctttgtaaataattgtattaccagcatatatttcataataaattgtcataagtgtagatataagatgaatttgactactaaatatgtgatattgccttcatgatttaagaactatttgaattgtaatcttacagcttacaaaactatagaagataaattttatataaagattgttacaatgtatcagtctttagataatgggaattttgaattgggttgcaattaatttaaatattttatataagtaaactttaaaattacagttatctttcataaaacagtctatactgtcttaataaattgtgtgccctgataatttagctaagtagatcttttcaaactattgcaggatttaaactttatagacataccatttattaaaattgtcataagctttgactagtctttattcctcttaattaccttagaatgacacttcagaggtgagccatgaaagacttaagtatttttctatataaacttcagaattcaataatgtcagtgtatatctttaaaacaaatttctcagttaaaaccaaataggacatagtgatttactttaaacgtcaag

SEQ ID NO: 34165 - DNA, 1069 bp, Homo sapiens
tttcatctgtatcttaaatggccccaggcatctgcctctggaaaactattgagccttgcatgtacttgaaggatggatgagtcagacacgattgagaactgacaaaggagccttgataatacttgacctctgtgaccaactgttggattcagaaatttaaacaaaaaaaaaaaaaaacacacacaccttggtaacatactgttgatatcaagaacctgtttagtttacattgtaacattctattgtaaaatcaactaaaattcagacttttagcaggactttgtgtacagttaaaggagagatggccaagccagggacaaattgtctattagaaaacggtcctaagagattctttggtgtttggcactttaaggtcatcgttgggcagaagtttagcattaatagttgttctgaaacgtgttttatcaggtttagagcccatgttgagtcttcttttcatgggttttcataatattttaaaactatttgtttagcgatggttttgttcgtttaagtaaaggttaatcttgatgatatacataataatctttctaaaattgtatgctgaccatacttgctgtcagaataatgctaggcatatgctttttgctaaatatgtatgtacagagtatttggaagttaagaattgattagactagtgaatttaggagtatttgaggtgggtggggggaagagggaaatgacaactgcaaatgtagactatactgtaaaaattcagtttgttgctttaaagaaacaaactgatacctgaattttgctgtgtttccattttttagagatttttatcatttttttctctctcggcattcttttttctcatactcttcaaaaagcagttctgcagctggttaattcatgtaactgtgagagcaaatgaataattcctgctattctgaaattgcctacatgtttcaataccagttatatggagtgcttgaatttaataagcagtttttacggagtttacagtacagaaataggctttaattttcaagtgaattttttgccaaacttagtaactctgttaaatatttggaggatttaaaga

SEQ ID NO: 34166 - DNA, 1033 bp, Homo sapiens
acccagggttaccattgggttaaaaaacaaacaaaccaataaaccaagatttctaattccttataaggatttgtgcatatgcagttgtagagaattctttttctcccgagaggagaatgtataggatgtaatattttagcttggtaaaaccatttttcaagtgttaaaatttattgatacaaccaaagaataggaaaaaagtttctgaattaattctgctttgatttctttatcatgaccttaaataaggacaatgattttattaatcatttctgtcattcatttataaggtctgttttacctctgtagctaagactactcaagtaaacaattacgtatttacaaatgtgaaatgtaaagaatttgcctgatttttatgattctgacaggagcatacctacatttttaagtttcatagaaggaaatttacagtgtttacatttgttattacttttctgacaaccagtgaaaactatgtggaaaacaatattgtaatgactgaaaagcaagctccaaggacacaagaactttgtctctttcttcactggcacattctgaaggccaacaacaggcctgaaatatagttggtacttaatgaatatttgttgaatgaataaatgaaatagtaaaggaaacagatgaggaaattgaggctcatgactctattagtaagggttctccagagaaacagaatgagttggaaacatgtaggtgcatgagaggggatttattatgagaatttgctcatgtgattagggaggctgaaaagtcccacatttggctatctgcaagctggaaaaccaggaaagctggtggtgtaatttaatccagtctgagtttgaagtcctgagaatcaggagcttccatgtccgaggataggagaagatggatgtcccagctcaagaaaagaggatgaattccctcttcctctacctttttattctattcagaccctcaactgcttggatgatgcttgccaccttgactcttcttcattcagtctatggattcaaatgttaatctcttccagaaa

SEQ ID NO: 34167 - DNA, 1043 bp, Homo sapiens
tgaatttggtccatgataattatttgcctttcaagaaaatctgttatctgccttcataatggataattcccagatcaactcacacattgactaagtacctgtagaaaacacagaggaatctaggctagccgtgccttcaagttgctgacgttctatttgaggatacaagcaaatagccaataaagttagcctggataccagcggagttttatactcaagtattttcttggactttttttttttgagatggagtctcgctctgtcgcccaggctggagtgcagtggcgcgatcttggctcactacaagctccgcctcccaggttcacaccattctcctgcctcagcctcccgagtagctgggactacaggtgcccgccaccaagcctggctaatttatttgtatttttagtagagacgaggtttcaccgtgttagccaggacggtctgcatctcctgacctcgtgatccgcccacctcggcctccaaagtgctgggattacaggcctgagccaccgcgcccagcctctctcggactttttgagaccaaagaacacaaagatactatttttaatgtgaaatacctctaaaaatgttcattgaaagtagaaagattggcatcttaatacaagattgccagggtagggatggttgtcatagaaatttaccaaattggaacacatgaagacagagctaaaagaaaaatttatcttaatatcatcagcaaaatttgcatttgcaacatcccaaaaagaaattttatttatgaaaacccactgaccacatatgaaatggaatcatcttacaatgtaaacactcccaggaagtcattcagaactctgtgaaatgtctgagcactgcatttttgcaatctcatgaataagagtttaaatgtgagtcattgacacttttcctgctttttgttctggggaaatagcttcacggtaatattttcattaattgtatggagtgacttcagaatcatctccagctcctgtaccatcataaaggaagtcaacccagagggagtggtatgcactaaggtg

SEQ ID NO: 34168 - DNA, 1022 bp, Homo sapiens
actagcaatatagggttttgtttggttggttggtttgataaagcagtatttggggtcatattgtttcctgtgctggagcaaaagtcattacactttgaagtattatattgttcttatcctcaattcaatgtggtgatgaaattgccaggttgtctgatatttctttcagacttcgccagacagattgctgataataaattaggtaagataatttgttgggccatattttaggacaggtaaaataacatcaggttccagttgcttgaattgcaaggctaagaagtactgcccttttgtgtgttagcagtcaaatctattattccactggcgcatcatatgcagtgatatatgcctataatataagccataggttcacaccattttgtttagacaattgtctttttttcaagatgctttgtttctttcatatgaaaaaaatgcattttataaattcagaaagtcatagatttctgaaggcgtcaacgtgcattttatttatggactggtaagtaactgtggtttactagcaggaatatttccaatttctacctttactacatcttttcaacaagtaactttgtagaaatgagccagaagccaaggccctgagttggcagtggcccataagtgtaaaataaaagtttacagaaaccttgcaagtgtctcttcatttttatgtagttttccatagaaaatgtttgttacataatgcctgttgcaaacctctccttagtaatatcctggaaagcagtttactatcaaacaggtacttcctacctctattctcaaccaacctattttgttgtactgagcatttaactctgtcattcattccttcatttaccttttcagtaagtttaattgggcatctactatgcaccaggcattcttccagatattggggacatagtaaacaaaacaggcaaagtccctgattccatggagcttgcattctaggcaataaacagttacagtcaataagcaatatattaggtagatatctggaggaaaagattcatata

SEQ ID NO: 34169 - DNA, 1046 bp, Homo sapiens
ggagtgcagtggcgcaatctcgggtcactgcaagctctgcctcccaagttcatgccattctcctgcctcagcctcccaagtagctgggactacaggcacctgccaccatgcccagctaattttttttttttcagtagagacagggtctcaccatgttagccaggatggtcttgatctgacctcgtgatccgccgacctcggcctcccaaagtgctggaattacaggcgtgagccactgcgcctggccaagaatggacattttttaaaaaaacatcagtacttcctaccactgctgcatgagtataatgctccggaattatcagaaagcataatgcagaaatacgaattagtggaacttaatcatgtgccatataagcttacctaacaaacagttatatccctattcctcaactgaatgtctttcaataaataagaatttatcatttattttctgcaacttttttatgtctcattctttaaacattaaaaacccttaatattttaacaaaaatttcttgattagaggcacagtgaaaaagaagtcaaaaaaaaaagttctacttttcatcagtgctattaaaggtggcagcaaatgtaaatcttggctgaatggtcttaattactcattaaaccacagtcagaaagacatataggtgctatttgggaaaactttttattacctaggatggggtttctctaattgctaatcacaaccccactgggtcatgtttgacattttataatgaaaataaaacagaaagtgccatagtatgttacagaaagcaaagatgagtattgtttctcaaagcctttgctttatgtatttatacacatactcattcatatctatctatatatatagagagagatagtggttcacagtaatcatacaaagtctttattccatccactattataaacatttctattaaaactaaaactgggctctatgtaaaaaccccaaagatacacacacaaaaaaaatctgtttgttagaactcaagtgaattcagtaaagttgcagaatacaaaatcaacatacaaaa

SEQ ID NO: 34170 - DNA, 1046 bp, Homo sapiens
tgggccatggaaccctttgagaaataaaagtaggagctgcttttccacaaaaatgcccaagtacaagtaatcttgcataagttttagggcttttggatactctgaagtcaactcataacctctgtaggtgttcgtagattccaagttaatttttagaatagactgtggactaatgatggaccatgttggacagggaaatggggaaatctaggagtccacgctattttcagtttttcttgttaggcataatttatcattgtgagtcatttaagatctatttagcaaatatttttgaatgaagtttacataattcacagccaggtgtttccaatatcatacctggaaatataaagtacacattagaacagggatgggtgtgtgtgctgtggtgtgtgtgtgtgtgggggggggggtgtgagtgtgtgtatttcaatgtgccacgcccattttcattcctgacagactgcaaagtaatgggtgtgtctattgtgttacgtcttctgattaaaacacaaggtgggatataactcagcaattctgagcatttgctgaagaatgctagtgctgatagaagtttcatgaggttgggtgtggtggctcatgcctgtaatcacagcactttgggaggccaaggtgggcagatcacttgaggtcaggagttcgagacaggcctgaccaacatggtcaaagcctgtctttacaaaaaatacaaaaattagctgggtgtggtggcacatgcctgttgtccgagctactcgggaggctgaggtgggaggattgcttgaacccaggaatttgaggctgcagtgagccatgattgcacaactgcactccagcctgggcgacacgatgagaccctgtctcgataaaaacaaaagaagtttcatgcaaacagtatctgaagtcagaattcttctatagctcatgacatgttctatcccattttggagatacacaatgctgtgattacagttatccctccatatcctcgggggattagttccaggaaccccttgaatacccaaatctgcagatgctctcaagtc

SEQ ID NO: 34171 - DNA, 1131 bp, Homo sapiens
atacctgtgttagcttggtgccttatcaacgaggcggctgagctggtgactgctggggtcttcatgggtgtgactaggccctaaacccctcaggtgggagagagtagtgggaatgtttttcgactgttctctcgaggcaacctcctgatgggtgagagttgcatagcaggcatgccttggtctgtaaattgactaactctcgaggacttggatgaacttagtagggaatggctggtgaaggagggagtaaaaagctattttttagcatttctaaaaggctgcgtaggaagtggggaatgaaaaaaagaaaacatctctttgaaaaatggggtacttggttacatatttatgtaacaccttctccctctttgaacacagctagttttcaggaggtccaggcccgtgtcagtatgctctagggtgctgtggatgatgttgattctggggtctagcttgaccttgcttgtgaggaatacttcacagacctcactacccagccagcacattcattttctaacagccacatttccagatttcctttccttccttctttcctcctgttggctttgtgttcctcagtgtagctctccgtttccttccagtcttcctgggaactgttccttccccaggagctgcccataaagccttttccccacctctgcttctttcttctcttctaatatttcaacatagtcaagatattttgattattcacatacattttacaaggacattgtaaagaaagggctttgtggcccaactgtggtctgagcagtgtttgttccccacaccgaggcagcatattttgatggtttagactgagaactgaacccaggacccaaagcctggctttaccatttaatgtgatctgacttctgtgccccttcttatgcttgtctctaaaatacagtgtgaaaatgtccatgtaatttgttatagtgagcattaaatgcactagtacatgcagagtactcacttggagcagcgactggcacaaagggagtgttaaataaatattagatggttattgcacatacttaacctgcttggaagcactggtgtgaaacaattttccagttaataatgagtgttcaaatttctttatgttgaacacagttccttatgtttcag

SEQ ID NO: 34172 - DNA, 1064 bp, Homo sapiens
ctggagcaagtttgcttttttaagctttatgttatttttcttacgtattttgtttcattcggttggtgaggggtgagtgacgtggaattaatttttaacattgctaagtctgaagaactgaaaaataacataggcttggaaaaaagtccattaaaggaagaaataaaagtgtctcttctatcctaatgctgtcttgatgattaagcagtaggcttggtacagatatgtttttttagatagctttatcacattcagagtggtgctttgttttattttcagatatttttcataatttgagcttcccagtggattaaccatgtgtatccttttgtttctgtttaatcatagttttttttttatttgtaggaagaaaaaaagaagtttgacaaagagacagaaaagaattatagtctaattgataaacatttgaatttatcagcaaaaaagaaagactcacatttacaagaggtataattttttatttttctgttacgttttcaaaatttgataagcaatacatgtcttttaaaaatgtgctttaatttggataacttttcatctggcattatatagagataacaaaaagtgaacaggtattgtcataaattaagaaaaaagtccttgtgaaacaagaaaaaataatgaatacatcttatagtgattaatgagctatggattcatagtagtaaaatttttgtttctgagcattattttataggaacataactttaaaccagcattagtgaagaacagatatattatttgcaggaatagatcaattaattggcttttgggagttcttgaagaaatgaattgaatttaataagctcatataccattatgcgtttatgtgaaggcagcattaatcttatttaatgctgaggattcaggaggttcaactttgttggaaagagagcatctgttttacttgtattaatagactcatttattttggaggcagccatatgtaagcaggaaggaatttatattttatttttcattttctctttgtttacttctaaatcccctgccatttgtttctctcactcacacacttggatgga

SEQ ID NO: 34173 - DNA, 1029 bp, Homo sapiens
ggaagcaaaagcaagaagggggaagtctacccctatgatcaagtcacctcccaccaggccccttctccaactttgggaattgtaaatgctacatgagatttgggtggggacccagagccaaaccatcccacatggccagggaggccctgtgtggctggaccccagtctgcctccacagctttctgttgtgccactctccagcaggctcatggcgccagtgaggaggctgatcttagctcctccagagtgtgcttttggtcttctatgcaccttctcagcttaggggacaactctgcattcaaaaaaaacttttctgagagactactttttaaagaatagttttcagttcacagtcagaagaggaagatagagattttcctgattccccccaactcccacacatgcatagcattccccattatcaacacccccaccagaatgctgcatttgttagaactgtggaacctaccttgacatatcataatcacccaaaattcatagtttacattagggctcactcttggattgtacattttatgggtttgcccaaatgtgtactgaatgtatccatcattctagtatcatacagaagatttcactgccctaaaaatcttgtgctccacctgttcatccctttccctccagtccctggcaaccagtgatctttttactgtctctgtagtttgaccttttccagagtgtcatctacttgaatcacacagtgtgtagacttttcagataggcttctttcactgagtagcatacatttaagctccctccatgtcttctcatggctcagtagctcatttctttttagcaccgaataatactccattgtcaggatgtactacagtttattcattcaccttctgaggacatcttggctgcttcaaagttttggtggttgtgagtcaaacataatttggtagttgtgaataaacatccatgtgcaggttcttgtgtagacatagttttcagttcctttaggtaactgccaaggaatgtgattgctgtgtcctacagtaaaaa

SEQ ID NO: 34174 - DNA, 1027 bp, Homo sapiens
aagtcccaaagaaaatagcagaacgttctttttgttccctcaatagcagaagacttatcgtagctaaaccctagttctaatcagaagccagtcagttaaccagtatttattagcatcacaggacatgcatagtcatgctctaggcctctgggatacgtgttcaacgttggttacatacaatccttgatttattagtggctgacaaaacaaaagatttgtaagtaattgaagtgtaccagatgatcaaaatgttgcaaatttgcaccgattaagagaatatgagtgcatgttgaaggattgggaagcatgtgatgttaattgaggactgtctttaggagtaggcttcctcagatttaaaggatgggaaagtatattttggcgtttagaggaaactcagcaaagatacagagaaagggtgactgagaaaagacaaacttggttgtgaaggaaacatggagaaacagtaaaagcaggcaatcaggcttatgcatttgattgtaaaggaactgggtgaatactagaaggtgatacgtagcaaagaaacaggcattcaaaaagtaaatatgaaaactaatattggtagtcatgcatgggatgccccagggttctgcttaggatgcagtatttataagcgaggtaactgattctggataataggtttggcagtggggtagatagtgcagatacagccgaatgattttgctgaagttgtaccagtcacatttagcagttggttgtatatagaggataggaattctgcaaggaattttaccttgaagtgttagtttgggtaatgaaggatgtcaaggaaattgagaggtccatgatctcataacgtatatcaggagcactaggggtgcttcttggaaattcagataactggtctcagtctacatctgttgaatcagaattgttgacgattgggtctctctgctttagacgatgagagatccaataggaatagtcaggtggagagaagaattttctgatcttctgcctttcggggacagaagatgccccaggggct

SEQ ID NO: 34175 - DNA, 1027 bp, Homo sapiens
attaataggactttattctatccttacaataaatcatcttgcttctgggtgtatttggggttggaggttgggtagttgtcagaaaatgacaatggtatattttcaagtagtgctgaaggtgtttttagaacagaagaaacttggtggaactgtcttgctacagagtaggcatgctaggctttgtttttgcattacattctgatgaggtctgtgacattttatggtacactgttagcatagtggtgaagaacattagcccaaaagactatcttgattgtaatctcagttttactccttattaactctgcctgtaacctctctgtgtctttatcatctgtgaaaagggataaggatcagatctccttcatggggttgttgtgagaactaaaagagaatgcttaggacattggcacctgttgaatagccagtaagtgtgagttgcttatttagagataaatccagtcattgaggccaattataattaagtagtctcattattgatttaaggctctaggagattgaagaactttctatttttttttttttaaaatagcaatttacattgggaaataaatcacccaaattcactttatctgttaattttatatggctcttagaacaaacagcaaaattaactggtttggcttttaacctcttcctcttcagtgatttgtggacatttgagcattaagatatcctgagcagtaaaatagccagaggctcaggaagaacaccacggttttcagattatctcaagcttttcctcagaagccaaacaaacaccacaaaacaccctgaaaaccaaaagcaggcattcttcctcctgggatttagtacctgctgctacagctgctctgaggtggagaggcagagggcagcagcgagacacaacattaggccttttctgatgtttcccatctctgcagcagaggaatgaaaaggaatcttgcaaaaagcaacggcccacttttgccttgagtttgagtctctttttgatttattgtagtaaaattttgctagtacttaa

SEQ ID NO: 34176 - DNA, 1075 bp, Homo sapiens
acagtctccataaaactcggtagctgagcagatatatattaataggctcagttgcacatgtggtatcagaggccagaacaaggtaggataaacctgtcacaggtcacacaactaggcaaagctggggtttggagcctagtctcccgactctaagccagacttatcctatggcagcagaaacagggtgagaggaagagttggtggacagtgcaacttattggtgataggggagcttgatcctaagggaaggcgcagaggctgtgagatactccttttgccaaggttcatgctgtgaggaaaaactgaagggcacattgagtgagtcacagccagtgcctgtattagatactgggatcgggagacctctgggagagtgtggggccccaaaggttactaatgaaatcggaaactccctgttactccgtcgctttcctctaggccctgtctcggcactttgccagtagcttgggtagaaagaatagcaacaagtctagggcatctggtctgaagctaaaatgctttctcttgtgttgcctagaaactgaaaacgaggccagccacctgtagtatacagtccattttgaccataatacagaggttacagctagtaaactttctacctttcgtatttgagacttggattcgggaggatgagacttagcatcaagtcttaggtgtatctttagaagcctaaaattgtcagtacttccaaaaatacgggtttagacccagaagtgagtatttgctttgcactttttaaaatatttctcacttttctcctgggatgggacagtagtgagtggatgtgacagacaaccccagtgggcacagccacccttacgtgccaaactgtctggtttctgtgttgagtctctggtttgtttgggagtgggaagactgtgggaatgagatcctaagacctttcctgaaagtgcctgctggtggggaggctaatcatcacaatacagaaatgcgtttacacaaagagtaggagaaggcgaacatgccagtgaaagcaagacttatataggaaagggaaaaacagattagttggtggcaaataatagctgtctgt

SEQ ID NO: 34177 - DNA, 1049 bp, Homo sapiens
agtatcactgtgggctggtgtcaaaaaggggatttttatccggttttgaaggtttagatgggaattttactcactgtcgaatcttgggcaaccagaatagcacctggcacatatctgatgaataaatatatgacagttgaataaatctgtgaagagaaggggaagagcattcctgctggggagacttcagcctgaatgtagccgcagaggatgcaatgaacttggttatttgtgggtgatggtcgagctgtctgttgtgattaagttgaatacactgcagtccctgtaggaagatgaggtgaggcccgtcatggatgtgtgcgtgtgtgtgccttacatacttgttaaggctagaggatgtgggctggatctgaaggctggctcttaaatggggatccaggggacattagataataatagtggtttgaaaataaaaagatagaagacagtgttcagaatggattatagttgtgtgtttctttttagggattccgtaataaatgtgtgtgcatgaaattcaggactgtgttgaagaggcagacattagtctgaagtttgaagaaagagtggacattgacttgttgcatttggaaagtgacagggaagaagtcaaagatttcaaatttctaatacttgttgatcagaaatagtgatccctttggttgacagggaaatttggaaaagaagctggaaaaggacatgataaactcactaatatgccttggcatattggttggtttatatccttaagatgtatttgatgccttttatatgaacatatatgtgttcatagataaaaagtatgttccagctctcatttagttcagagcctttgagaacagtgtagcaagaaatagaaaatcgaacaagacttgagtgtatgtattttacgtgcgatttccaagctgcttttgtgcaaggtttatttaaatttcatttaaaaatgtagaaactgtgttgagtagctttaattcccccttgcacctctcagtatgcattagcaattacttctctcaggttgatgaatttgaacttgatcaattatttga

SEQ ID NO: 34178 - DNA, 1067 bp, Homo sapiens
aggagaaatgcaacacttgatgtctgttgactgaagccctttatcccttgggaagtgcttggatggttactgctaatgcctttctaaaattacagtatcattgacttttgacatttcaatattgaaataatttagcatttatctgcctctgtgtcttcgataagctccatgatcacatctttttcagtttctgttagttggcacagcatcataagcagatggacattacagtgtggtagatgctgatttgtagttacacaattaaaatgccttttccactacagtaagctcctaattccctggcatatttcaagaatttggtattatgattaatttagtatcctagtttttttttttaaggtaggctgttcattctttgtcaatcagtagcaattaaaataaattgcattagcataagcaactttagatgatttatcttcaaaaactttttttggagtaccttaaaggtattatgttgtagctacatagaaatgattgcgaatagaaagctctgatgattaatgtcaaaacaagatagagaaaaaaatggttttatttaaaaagcccagagtatttttttttttgtttttgaagaagagggaaaaagacttggcagaaatggatgtgtgattttaaaatagattaggatgggctagcaggagagagactgaagatagtgaaaggttttgactctatttttctttttttaaattttttaaaattatactctaagttctagagtacatgtgtacaacgtgcagatttgttacgtatgtatacatgtgccatgttggtgtgctgcatccattaactcgtcatttacattaggtatatctcctaatgctatccctccccgctccccccaccccacgacaggcccaggtgtgtgatgttccccttcctgtgtccaagtgttctcattgttcaattcccacctatgagtgagaacatgcggtgtttggttttctgtccttgcgataggttgctgagaatgatggtttccagcttcatccatgtccctacaaaggacatgaacgcatcctttttaatggttgcatagtatttca

SEQ ID NO: 34179 - DNA, 1042 bp, Homo sapiens
ttgtatgaaacattcattcattttcattgcattctgtttgaagaagccacaatagatttatctgttctactgttaatggacatttgggttgtttccagttttgggctaatagaacgctgctgtgagtataggagtatgtgtcttttaatgagcatttatgtgcatttttcctggttatatacctacgagtggaatttttgggtcggtcatagggtatgtgtttgttcagctttagtagataactgccaaacagttcttcagagtggttgaaccctttaatgattaccatctagttagcatgtggaagtttcagttgcctcatgtccttgccaaagcttagtattcatttaaagccattctggcaggtgagtattactctttcattgtgttgttaacttctgtttcaccgatataggtttattctgttttcataggttttttggtcactggaataaatattttgtgaaattcctgccccggtcttttgcccttttgtctgttggattgtctcttttttccctgattggtttgtagttctttctaatctgattgcatgctgtttcttatgtatatatgtatttcagatatttagtactttgtactaaggtcattttctctgtgttgtccaagattttagtattacaggtatttaacttttgtcataaggaaaactattatccttttgaaaaaataaatgcccctttcttgatctgctttacctctctttcccattctcttgtttttttttgctttctgaacaggtgttctgaaatcccactcttctccccttctccagcagcttcctctttgtttaacctcctcattttagtagaaaggggctctcagttgataaaactggtgatacccagggccccttaatcccagtgtttccattccttgacctctccttacctctcgagtccactggctgtgcccagcctttgcagatttcttctcacttgccttcctgatgacatcgtacctccctggtcctcccacctcttcctcctccttggctgcattgcctgcttgacttagccct

SEQ ID NO: 34180 - DNA, 1042 bp, Homo sapiens
tgttttcacttgactaatttagaagccaacagtgagacaacttcttcaaactggcctttgcagaccagagttggcctcgggctacctttctatctataccctcgaagagctgtctctgcacaggctctgtgctttttgtcatgctatttactgaatttggaatgttccccttgcccctcagtcctgcctttccttgaacccttccccgttcttcaggacccaatctccaagggctctccattatgagacccttcctgagcttccctggccagccctaagtgaaactacaaaaccgtttctaaccttcttttctgtcagcagtaaatttagaacctaattctcttttgtcacttctttgacgcctgtgaaaactagcaaaatcttcaacaacaaacattttattgatttatttgatagttttccaatcaagaacacaataaagggaattggggtacactgttaataagagccacgtataataattccaaagtttgggggttaagggattgtgttttccagggctgttggaacaaagtacttactactaaccaagtggcttcaaagaagaggcatttattccgtcacaattctagagtctggaggtctgaaatcaagacgttgggagggccgtgctccctctgaagactgtaggagggatccctccttgccactcacagcttctggtggttgctggccgtccttagtatcccttggcttgtgggtccttcattccagcctctgctgtgacaggacaacctccgctgtgctgcctgtacacggtcactatccctctctttgttttcttgtaaggatgccagtcatattggatgaagaagccccaccctacttcagttatgatctcatctaaactgacatctgcaacagctctcttcccaaataagatcgtgtattaagcacgcctttttattctgatgttttgacatctggggcctcactgacccgaggaaactgcccctcccagggctggcccattcctggagatattaaacttctgcaggcttttcacatggaactctccaat

SEQ ID NO: 34181 - DNA, 1115 bp, Homo sapiens
tgacaaagtgaaaggcaacttcttctattgcttcctatgtaattttaactgtgcttctgtgtgggatgaacatttccccctttctgtggaggaggaaaaaaaaaaagcttatttaatgcctttaaaaaaaatacatagctgcttctgtggtgaaaataagttcatggcaggtaactcagatttatagaagagagaaaaattctttaaagcttctctccctgtggagtgggttttttctccacttctaatagcttttattttaatttctagttctgaattcaagcagctgtcactctctttatagccccctttgaaactcttgtggcgtaggaggtagctgggctgtctaagaaacatcttttcaaaccaaccaaagtattgtttatcctgaatgaaatggaattttaaggctgtcaagagtgactgatttgaaacgttttctttgatagccaggaagatgagcagaaatcttgagggagaaggtatttctctgtgtaaccaattccaagtgacttctgttgctctgaaaactctatggcccatgattaaaatgaccatgatctaagagtgttgtgtacaattaatagaacaaagccaacctgtggccagttcatttttacttactgaattcttaccagctgttgaggaaaaagaaatgatgcaagactgaggcaatgccagagaacactccttgtatttatcatcagttgtcttcagttggcttttcttagttctgggttgcatctttgcagcctggttccctctgcatgctcattctaccttcctttgtgccctcctaggctgtattaagaagcagtacagggtcacctttagatgaaagaaaaaaaagaaaaaaaaaaaccatttaagcctattaaaatgaaatttggggccaggcctagtggctcactcctataatcccagcatgttgggtggccgaggtgggaggatcagctgggcctgggaagttgaggctgcagcgagccgtgattataccactgcactccagcctgggtgacagatcaagaccccatctccaacaacaacaacaaaaaaatgaattttgagactggcattttggatctactaatagtctttaaaatcagcagcacaag

SEQ ID NO: 34182 - DNA, 1027 bp, Homo sapiens
gtttctttccaagatgcaaaaacttgaccattggaatggatacaaaggagaaggaaagagacaacacccagatttatttgtcagcccctgtttgagagaagtgtgaaaggtctgcagaaagcataccccattctgctattttgggtttatatgctatccgggatttactggccttcctgcaattttggtgaataattccagatttcccatacattccaaatgcagtatgtctactttacttgcagagtgccaaacactgatataggttacaaaggaagttatgaacttcctactctggaggaatttaaaagtagagttttctttgcctggaatggcaaggagaagaatgtgtaagaagagtgatggagtaaggtgtctatccatttggtttagctttttaaataattactttgcacagaagaaatgagatcaggaagaaagaaagggccaatatagccgataaattggcgggtagtaaagtacattggaacttggacattttttgaaaagttgcctctgtgtcatataccaggtatcagataaaagaagaaacccagcaatgtttgtcttttatagtggaagtaaagtatgaaggttaaaagcatagaccctggagccagacttggcctgggtttggatcccagttctgccactgagtagctgtgtgactatgggtcaattacttaaaccttgtgcctcaacctcatcatctgcaaaatcagataacacggtttacctcataaggttattatggagattaacaacctatataatggctggcttatagtaaacagtgttagctatgatattttaaatatactgttagtcctaaaccatttgctcctacagcagtacactttcctattctccgttcacttggcatctgaccttatcaataatttctcctatttttttttttttgtattttctttgttgggttatttggtattctgggctatctgcctggcttcctctcactaatattcaggcatatcctcttctgatgtctcaacccacccattgcaaa

SEQ ID NO: 34183 - DNA, 1062 bp, Homo sapiens
cctttatgtatcctaattatgtctcagttcccagccctctaggggaagagagaatggctgatacttttgcacatccttgtaacacctggcaaagttccctaccccatttaatagataattctgaaatgagtatatttgtcctccagtgggacccagaagattaagatagcaagaggagaggagccagccttggatccagaagattaaggataaaggaggggggaataccagcatctttgcctcttgctatttatttaccccattattagattattagggtatggagagttgccactggggtttggttttcaattcttcccagaagtgcagctgctgattgacaagaccttagagaataggaaaacagcatgagcatcagttggcactagctgccacagtgatgttattccccaaagcaccactttgaggggtgactgacacacccatcagctttcacagtcatgacagaagaagacaaaagagctcaattccctggggttctgaacgctttaacggcagaagtagttgaaattttccacatcactctgacacttgtccagtgttctcaagtagttataagttggcctttctatcatatttgttgtcagtcttcattttttttttaaaggaaagaatgatttaatgaccttatcagaattactgtaaagatttctggtgcaattttaaattaaaatgcaaattgtgttttttaaattatactttaagttctggagtacatgtgcagaatgtgcaggtttgttacataggtatacatgtgccatggtggtttgctgcacccaccaacccatcatctacattaggtatttctcataatgctatccccccaagaggccccagtgtgtgatgttcccctccctgtgtccatgtgttctcattgttcaacacccatgcataagtgagaacatgcgatgtttggttttctgttcttgtgctagtttgctgagaatgatggtttccagattcatccatgtgcccgcaaaggacatgaactcatctttttttatggctgcaagtgttccatggtgtatatatgccacattt

SEQ ID NO: 34184 - DNA, 1025 bp, Homo sapiens
aaccaggtgagccaatggtgtaagtcttggagtctgaaggctaaataacttggagttctcatgtcggagggcaggagaaaatggacatcccagctccagaagagagagtgaatttgccatttctctaccttctgcttctatctggctctcctcaaaagactggatcatgctcacccatattggtgagggcaatcttcttcacttggtctactgactcaaagtctcatttattctggaaacatcctcacagatacacacataaacaatgttttaccagctatctagttatcccttaacccagtaaagttggcacagaaaaaaagataaagaaagaaagagagagaaagagagaggcagagagagagagaaaacagaaggaaagaaggaaggaaatttggaaagaaaagataataaatgaaaggagaataaaagacaagaaaaagaaaaggaagaacgaagggaaaataaattagttgtgtattgttgcaagaaaactttggcgtggtagaacataataactagagttttagtacttaatcctccattaactatgtgaccttgtgtacgtaatcacacatctcctggctttttctcatcagatgaggggtttgaaccagaatatttttagagtcccttccaactctacagtgttacaacattgacgatgtaactcatatggcccaagactgttgatttgtgttgttcagaaaatgccaaaaaatagtacagttatatgccacatagtaacatttcagtcaactatggatggcatatataacagtggtcccataagattacaatggagtggtaaatttctattgcctagtgatgtcatagctgtcataatgtcatcatgcaacaccttactcgtgtgtagtgatactggtgtaaacaaacctaccatgctgtcagtcatataaaagtctagcacatacaattatgtacagtagataattcttgataataataaacaaccatagtactggtttatgtatttactatgctttttattgttattttagagt

SEQ ID NO: 34185 - DNA, 1061 bp, Homo sapiens
tcgatgaaaattacccaaagtccattctctttacctgtattaacatacaacattccaaaactttgtgataagtgaaaatcaagccaatgcttaatgaggctgaactgatatcccatctctatgtggtggttccctcataaaacattgatttttgtgactgttctctttgctgacttggtgactgcattggttgtgcttggtttcctaaattttcagtctcataaatagtttgcttgaggtattatatgatgattataaaattctaggcttacaacagactcttcaaattcaagaggaagacatgggaaggctttgtaaatactcaaactgatgaatatcacagtaatgaattatttctcccataaaactttttatagtctaagatgcagaacttagattcttccacattctctttcatttctgcttctagcactagcaactccctctcttttgaggaatattttttcacaggaaaacaaaatttatatcacctcatgatctgatctgtactgtgttggcacaagtagagaataatagatgtaagttgcgctgtggatgatgaggttataagcattacacttgcatcatgtccagctcaaatttttccccttcgaagttacttgctgttggtaaaaccaagaatgttaaatctgtgaatgctgagagcttgccatgttgtctaacctaacatatctttacatgataaagctcctaaggctttctttaatagatagatggtgtttaatgtggctgggcagcattttaattagtgagagaaaagcatgaatctctccccatcataggagtctgcattgccttcaaatttctctagatatttcaatatggcttctctccacactgagtttgaggacctctgagctaaacaacctgtggaagattctctcaaattgtaggtgtctggggccaaggattcagagtgaacaccatgtcggttgttcggtgagaaagctccaacataaaggagcagtaattcgttgccagagcacgctgctcaggggcctgcaagacagtactggtgagtcaaatatggcatcacactt

SEQ ID NO: 34186 - DNA, 1014 bp, Homo sapiens
taactggtcaaggaccatgcagtagtaagtgccagagctaggatttaaaccaggcaacccagcaccctaatccatgctcttaacctctgaggcataatttttgtcaccaactaaagcagacctatgccctataacttccagttcctactaaattgcttttttctttcttaaatcctatttgggggtataagttctatgattgagtggtaagtaagtgatctttcagattcaccaactgccttctctctttgataagattagactctgttgtttatattgcttcagagtttctccccctaattctcaatattttttgtctcagtgaaaatgattctgtttctcacttgctaacaggtttcatgatcatgtaaatgaaaaatacaataattataaagagaactgtggaaactgtattcaggtctgttttagcatttgaaacagtcaaaatacaaaaatgagtaatgtggattaaaggagctagctttacatgtcttaggaggtaatttgcaaatcagaaatcttatttccgttttataggcaggcagtgggcatgcacgccacgcacaacacaggaatatgtttgcttaatgacttaccagatctagcaccagttctggtttatgagcatggccctgactgttgccatgtagatgatggattgtaataaatgtgttcaaggacgttagatcacatctgcaaagagattcagagaatatctaccatacagcgtggaagaatgttgcaaacatttcttattaagaaaaggctatttttttgtgtgtggaggtctcacttcatctttctgtcctttattctttaactatgaaaactatacagtaaattcttttgtcattaaatcaactttcaaatctactaaaatatatcttaggatataagttgttaccattagatgacagctttgtttgaattcacttcatagccttgactttctttgagttcatttttaatcaaagcaatatattgaataaatgtattatacaaaacagcagttgt

SEQ ID NO: 34187 - DNA, 1046 bp, Homo sapiens
ggttgcaagtgacagaaacccaaataataccttcttaggcaaaagaggaattttttgaaagaatgcttgagaaattgtgtataatcagcatttgggctgaacactgaaactcaaggaggatggagcacaattctctttctcactctcactctcactctcactcttgttctcttccttatacttgctccactctcattctagctctggtttctttttctctcagtgattcaaagcagcctggtaagaaaaataaggtgttgactgtttctgaattttaacatgcctggttgaagaatcctggtgaaagactctgtgttgccagtcaactctgccaagaaaaaatgatgatcaatgaatttactcagtttgctacattgtgagctctttcaagtaacaagggagtctatcataaaagtttcaatgctacaaaggacaatggtgaggttaagaccctgtcctcccttaagtgacatggacagtcagttctgaaaggaaatatcagtctgcagaatccatggcaaattcaagctaccccataggagaaaatgcttgaaggtcacctggaagtaccgcattcaatgttgtagcatatttgggagccactgggaaatccgtgccacccacagactggccaggaatgcagcaaataaagtaaggcttttattttctgagaaagtatgggaaaactgtgaggcaagggtaatggtgcatagcagctcaggctctgcaaacatttgcattgtggctgaaagccaaggctagggcttggaacctgcaggactgtagatgagatcctggtgttgtagcagaaaagtccattcttcactgtacacaaaggaaagttgatcctcaaggtgaaataacaagtcggtggcataaatttccttaacatgaaagtttctcgactcccatctcttcttttttatataccatcttgcctttgagaaattatgttagctctgcaggggtccaatttggcttcctaggcatttatggtctgagaagtactcaggcttaactttgtagagggggacaaatatccccaa

SEQ ID NO: 34188 - DNA, 1043 bp, Homo sapiens
aggaggtttggggaatcaggaagtactttagaattcaactggttcatccacttcagtttattgctaatgatactgaggaccaaaatgtggagaaatgaattatccaaggtggcacatttggtcaacatatttggtccagtgcttctcaccctgtaatccttgttattctctcaaaaccaatctagactatttaaaagaaaggaaggtgggagaatgccaaaggaaaagggtgaacatccccttttagtgaacccactaaggttaagggttcacttaatgggtttccagcatctgttctttagaccaaatgcttctatgatagagataatcatgctaataaaatcaaattttgctttttaggtgagagttacgtgtgtgcatccaatgaaccatttcgtaaagtcgattacaccaaaaatattaatccaaactggtctgtgaacatcaagggtgggacatcccgagcgctggctgctgcctcctctgtgaaaagtgaagtaaaagaaagtaaagatttcatcaaacccaagttagtgactgtgattcgaagtggagtgaagcctagaaaagccgtgcggatccttctgaataaaaagactgctcattcctttgaacaagtcttaacagatatcaccgaagccattaaactagactcaggagtcgtcaagaggctctgcaccctggatggaaagcaggtaagatgcttctagctcccagctctccatctgacttttaaactccctgtgccatggtggctacatagtcaacaatagaaatttagtagtgtgctagaaatccttctgggagtcatacttgagattgtgtgtgtgtgtgtatgtgtgtgtgtgtgtatgtatgtaaaattaaccatttttgtgaaaaatgtaagcgacttaagtacctcaaaagtgattatagagaagtctatcatatacttcttttggttattggaaggaaaatgtaaatttctgagggaaaagtataagttgaggagacatcctacgttaaatggcatgtcatctatttatgaataactgttgatt

SEQ ID NO: 34189 - DNA, 1180 bp, Homo sapiens
ccttttgttcacaactttttttttaaagacggggttttgctctgtcaaccaggcttgggtgcagtgtcaccatcatgggtcatggcagccttcaactcctgggctcaagcagtcctcctgcctcagtctcccaagtagctgggaagctgggactataggcacatgctacttcacccagctaatttttaaatttcttatagagaccgtacctggctagttattttactttttgtagagacggggtctcactttgttgcccaagccagtctcaaactcctgtgctcaaactgtcctcccaccacagcctgtcaaagtgctgagattacagggataagccaccatgcccagctaacattttgatcaaccagtcaatatacaagcttgttttatgtgtgcttctgtttaaagccaccatagttaatgtatactgatgattgattaacattgaattcatggccaacatcattattactcacgacttaaaaaagcttcactaacatgtattttctccataaggtccatcagaaacttctttcacttaggaacaccagatagcacttcagcattatgcccggggaccattttaaacagctaaatcaccaacaaaaaggtcaaagaaatgtgccatgaccatgaaaagaccgtgaaaaggacacgtgtttaccatatgagaaatgaaacaaggtagaacatcaccttaacctcaccttgatgtgcacagcgcaactcagattttttacctctctgtgcatgtatgagaatgaccacgaaagtaccacaaatattgattttgagattaaagataaattttagcaagtagggtgaacttgtacttacagaatctgtgaataatgagcattgaacatactttgagtttcaactaataggtagcagtgagcaggtctgaaatgcaaaaccacctatcaacatggcaaagtaagtttactgtttggttttaaagggatgatatagcaggatatagtacattcatatataataaaccaaggcagtgttttttaaaatttgggagaactggttcaaaggatggaaaaagttcctgtgtcaacatttccaaattaaacatgaaatgtatatttttctctctgataagagaatgtgaacaaggtgttgtgggtttgataactgattgtgctaataatcattcagtgtcagctaatta

SEQ ID NO: 34190 - DNA, 1158 bp, Homo sapiens
atgagcagtccatcctagggctcagtaagagtgtgttccttaatactacaaagttctgcccccactaccattggaagccaaagtgcaccccctccccaccccccgtaattccttgtgtttctgttggttagatttcacacatctttgttcttcctttcttagcttaaggcacagtcttttacccaggactctcatctgacacaagtaggacctttccttctggaaaatgacaaaaatattcccaacataaaaattaacttctaaaaatccctgcacaggactgaactgactgatgctttagggttatcatatttagaaggaaaaaaatggactgttaaaaactttagacaaattaaacaatttatttgagcatagaatgattcgtacatcaggcagccttccgaacaagaagtgggttcagaggcctggtgcagtggctcacgcctgtaatcccagcactttgggaagctgaggcggttggatcacctgaggtcagcagttctagaccagcctggccaacatggtgaaaccccttctctactaaaaatatgaaagtagccagtgtggtggcaggcacctgtaatcctagctactcaggaggctgaggcaggagaatcggttgaacctgggagatggaggttgcagtgagccaagatcgcaccattgcactccagctgggtgacaagagtgaaactccgtctcaaaaaaaaaaaaaaaaagtgtggttcagagagctctactctgcagtgtgggcacacagcatttatggatagaaatagaagtagggtacagaaacagttttattggttacagctgggcattggctttatttgatcatgatctaatccattggtggcctgtgattgacagacagctaattgttacaaaagtatacagtacacctaagttaggctttcagttaagttaggttataattcctgaagtagggacttaaaatacagaacagccgcaggccaaatttatttaacaggatgtacttatactaaaaaatgatctgttgcttatctgaaattcagatttaactaggtatccagtattttatctaaccaaccctagatgcaagtagtttttaaatttttatttatttattttcttgagacagagtctcactctgacacccaggcttggagtacagtg

SEQ ID NO: 34191 - DNA, 1055 bp, Homo sapiens
gaccagggtggtggccgtgggtggggaatggaatagagaatggtatgattttcttttaggctttccttttatgtcccttctctggaccttgtttttaaacactgtagctttttaaacattctgccatagagtgctgtcgatttggagttgccttcaactttagcagctgaaaattaaacagaacaacaaaaaaattaaattttgaaaaattgcagttgtccatcagttgtcatttatcatgaggaaataaaatgattaaactcctaggagtcacatggttagcctggaaccattagaattatctatagttctaagccttattgtgccactaataactatcttatccagctatcatgccatagagtcttttgattccttttatggaagtaaaaaataacataatttcaaaaaaaggtaactgatgatttttcttatgtctaatctgaatgaaatatctaaggaagaaatgcactgatgtgatgtgcataaggagagaggtgagatgagaagaaagggaacgcctcctcggtttctgtgacacatttttacattctgtaagcattttgtgtgtcaacggattagttagctagggatttgtaaattatcctgataaataatggtcattctcctctttcagcagatttctgctcatggcagatcttcttccaatgtaaacggtggacctgagcttgaccgttgcataagtcctgaaggtagttctcagtctgatcattactttgataaaggaaatcatgcatggggacttggtgctcacctaaaactcacttgtgctaaattacgatcttcctaaagagggatgtgatcacatcacctgtcagcccctttggccttagtaagaggcggggatgggggttacttcaagataaagaaaaatctcattgtcattaactaggttattgaagcttcagattttagacttgggcttcttttatttttgtggtgatctgatcacaacttctaaatatatttcctttctctcaattagataacaaaactgtgttttcttgatttggtgtcttctgtgtgctggacac

SEQ ID NO: 34192 - DNA, 1062 bp, Homo sapiens
gacagagcagggtgcatgcaggacggcctcccatgtaccccggggggctcgccccagttgcagagaccaggagagaccatcttgtggtgggaagggaatgccgagaagccgccgtcactcggcgcctgcggtgcagacttgagaagggacggattcaagggcattgccttcttcgctgggggattatgccttgtttcagggggaagttggggaaggatttgggtttattgccttaatttaagatagacaaaactgtttcactcgtgttgcttctgttgaaagtaagtctagtttctgtccctgcttctctcctgccttctgcctctcccgccgcctgcattgcttccctctggctaggtccaaggccatggtatgtactaaccgcactgccagcctgccttctgccacacacgcccctgtgcttctgacaggaagagaaaaggagaaataacggggggattgttttcttgtacccaggagacattttgtggtaggaaaaacctgtatgctggctctctgcttcccatgtaggtgggagcatcttttagtggagttttccacagttaccctttctccaggtagttgaaattgtccttggaaattgtagggatttggggagttttgtttattgagacaggatcttgctctgttgcccagactggagtgcggtggtgtgatcctagctcactgtatcctcaaactcctgagctcaagccatcctcctgcctcagcctccaagtagctaggactacaggtgcacgccaccttgcccggctaatttttaaattctttgtggagatggagtctctgtgttgcccaggctggtctcaaactcctgacctcaagtgatcctccctccttggcctccggaagtgctgggattacaggtgtgagccactgcacccggccagaaatggatgactgttcagcttgaacttgtgagggcctgtggagaagcagccattccataggtggccccaggtgccctgaaggccgccacccaagttcatcttagaaagccctgttgttgattcttattttctccagactttttttgttgtt

SEQ ID NO: 34193 - DNA, 1073 bp, Homo sapiens
aaatgttagatgctggttccaacttagaaaagagtatgacagctccccaaggcatagaaaagatgctagctccttacatgtatataacaagaaggcagtaagcactgttcaaactactcttgatatgtttttcacaaataaaataattatcaatgtatcaaatgttttaaattacagtgtattaagtacatgtgagttttactacttttttcatgttatatgtataactgagtatgagtttttaatgttttgacaaaattattcttagagacagggttttgctgtgtcacccaggctggagtgcagtggcatgatcatggcttactacagccttcacctcctgcaatcctcccatctcaccttcccaagcagctgggactacaggtgtgcaccccatgcccagctaattcttaatttttttgtagagatgggggtctcactatgttgccagactggtcttgaactcctggcctcaaatgatcttcccaccttagcctcccaaaatgttgggattacaggcatgagccaccatgcccagcctgacaaaaatttttaaagaccatggaacaattgtaaaatttaccaatgattattcagatcactttgtatggtttcagttggcgtgctcacttttacagttccatactactgtgcaaagaaaagatgacctgtaatatataataggttcattttacgactcctgttggctcaggacgtatgaaattattgagtataagggaaaaatccagtggttatagaattattgctatcattattactatttcaatgttttgaccaaatttataaacataatcctttaaatatttaaaacaccttattaactagactaataagtattacattttaggacacagaggagctgatccaaatactctgtttccccaccagataaacccaaaagatgtgagatataatactttgttgtgtgttcagacttcagctcagagcagagacagagagatggatagactattatgatgggataagtaagcaacgaattggaaacagctccattcctagtcagatcctgatttgttgcatgtgctctaagc

SEQ ID NO: 34194 - DNA, 1029 bp, Homo sapiens
cttgctgatttgcagaatgatgaagttgcatttagaaaattcaagctgattactgaagatgttcagggtaaaaactgcctgactaacttccatggcatggatcttacccgtgacaaaatgtgttccatggtcaaaaaatggcaggtgagacccaaagttccttagagtggttgtgctatgggtgtttgaccaaggatagcatggtttgatgactggaaggagcaagttcattttatttatttattgagaccagtgaaatgtccacaaagttcattttaaatttttgttttcttgccgttgttgagtgctaactctggggttgccacaccatattttacttactatttaaatctaagatttaatagtggtgtatcatcaaagtcagattttcttgctgcatagattagtggttttttgaggaacgtttaggtgcaggtgggcggttttgcctgtcttaaggatgttttttgacctcagaattgagtgaatgttgattaactgtggcagtagagcataattgtggcagagcctctggagtgaggttaaaatctgggctccatttgcctattgtgttctcgttggaaagtaacttgttttctaagcctcggtttctttatttgtaaagtgcagataagagtgtcattttattgaattgtgaggatgaaatgaaaatatttcagatgtgtctggctaactatccagttggaatattttgtgggagttttttgtttttgggagattgagtctcttatcgtccgggctggagtgcagtggcgccatctctgctcactgcaacctcctcctcctgggttcaagggattctcatgcctcagcctcccaagtagctgggattacaggcacccgccaccacgcccagctaatttttgtatttttagtagagacagggtttcaccatattggccaggctggtctcgaactcctgacttcaagtgatctgcccgcctcagcctctcaaagtgctgggattacaggtgtgagccactgcacctggcacagttcgaatatttt

SEQ ID NO: 34195 - DNA, 1062 bp, Homo sapiens
actgtaaccactgcttcctgggttcaagcagttcttgagcctcagcctcctgagtatctgggaatacaggggactgccaccatacccagctaatttttttaaatttttagtagagatggggtttcatcatgttggccaggctggtcttgaactcctgacttcaggtgatctgccagtactctaaatgataacagttttttcgtgtttatttattttgaatgaagctgtctcacagtagatggagttgaaggacaggaaatgtttttcccctacttggaaaatacactgaataagttgagtggggtgggatgtgcctggagtcccagctactcaggaggctgaggtggtaggattgtttgagcccaggagtttgaggccagcctgggcaatatagggagaccctgtcccaaaaaataaaaaatatacgtatatatatatacacacacaaagaaaaaatacactgaatagacaaaacctttcatgattaatgatgcacgggaataagtgatgaaaaaagtttcggtcccagatgatggccagtgataacaacatttttctgatgttcccatgcaatatacagttagctaagagggtgtaatggaaaaagcataaggcttggactcagaagactctactaactttgccactagctagctatgtaattcagatcatctatcctttacatgtgaaaggtaaataatggcttatcttaacaggaggatttatgcaggttaaatgaggtaggtgttatgtgtaggtttattccaaggcttctctacttttaaaggaaatggcttatatctgagaactaggacttttagaaaaaaatttactgttactggtttgcaggattccagacagcattggaaaagacatagaaaaggcttgccaatctatttatcctctccatgatgtcttcgttagaaaagtaaaaatgctgaagaagcccaagtttgaatgtaagtgagaaatcacatgattcctgtagggccaaatacattgtttttgggtggaggaggagtgtggggccatatcatggccttctttttcttcctgtcatgc

SEQ ID NO: 34196 - DNA, 1032 bp, Homo sapiens
tttattctgtcatagttttggaggccggaagtctaaaatcaaggtataggcagaccccattttctccaaagactctaggggagaatccttgccttttccaacttctggtggttgtccttggcttgtggctgcatctctctgctctgtctttgcatcattctcctctacatgtgtccctgtctaatttctttctgccttgctcttataaggatacatgtgtgctcgcttcagcaacacatatactaaaattggagggacatgttattgcatttagggcctgcctggataatccaagataaactcttccctggaatccttaatttagtcacatcttttgccattcaaggtaatagtcacaggttctggggattaggaagtgaatatctctttgggacgtaatttttctgcctatctttaatatgatacatgagatttgcttttaaaaaaacaagcggggcggagagaggaaatggaagattatagttggctgaatcaaaattggcaatccattcattgttaactctgagctgggtgatgatagttcattgtatgggtctctctactttgtatatgtttgaaaatttccataataaaaaacaacaaaaaaggttagctctcacaccaagattctttagtaatcatttcctctcagaacctagaaaataccatattaacattgataaatgcaacgcttaatttttttttctgttcataaaaattaggtatgagactgcagatatcctggctaatcctttcatttcttaccaccatttcagacatatttctttgtgcttctcaagaaaagtgaagggtgaatgaaaatctcttcacttgaagttcagaaattataaaatgacctgaggtttaaataggataatcaatttttcttcttactgaactattggtgaatgaatgaagtggtgtggttgtatttgaagactcattggcaaagtaacttatcataatatcttgccaggcagatgaaatcaagaaagggccaacagttttattatagggaggtccccatctttc

SEQ ID NO: 34197 - DNA, 1047 bp, Homo sapiens
atatgggtaaccagtgacagagctgggttctgaatccagatctctaaagcaaagctggtgaccttaactactctgtagtacagcctttcctctggaagagaggcattatgtgccataagaaataatgcaactcctctttattgaaaatatgagacaaattcagatttggaagataagttagtaaattacttgagcctttattgaactagcaatccaatttaatagaaatttgtcaagggcctagtatgtgtaaagcattatgttaggtgccagacaggttatcaagatcaccaactcacagagcttttaaaatatgtgtgaaaataactttcgtataagacaagattcattcattgagcaaatatttacttggcacctatgttgtgctaggactgaggtagacactaggaatcattcatctagtcatgaattcatgaattcatcctgaacttttgatgatctgctgtgtgccaggcactgttctaggtgctgagaatatagttgtgaacaaagcaagcaaggttcctattctcattgggtgagtgaggaagagacagacaataaatatgtaagcaggaaaagacctgctcttcagagaattaaagtcagatggtctgcagagagtgactgggtggctgtattagattgcaaaaattagttaagacttggtctttgctctggaggagatggacttgtaactccagtgtgattccatttgtgcagtgatcaatgtatgaacaaagtgtgctgggtaaatccaactgtggagagccttgcatatcctcatgaggaaactgagggatgactaggcactgtgctgacaggatcagaagtgtgtttaggatggtaaggttgaagcagtcagaagtctaggctagacaggagagagattgataagatgtgatgattactctctggaattacagccctagtcaagtgcagggggagggagagaggaggaagtgcttactttttgctgagaggactagaaagtgcttcctgggtgaggtaccatttaaacctggtcttttaacatgcagagatgaa

SEQ ID NO: 34198 - DNA, 1030 bp, Homo sapiens
aatcattggaatttgagctgatctaatctggtaatgattttagttccaatcagtgtatgcagatcttgcctcagaacactgtgtagtattagttggttgtttactattgagtaatgagtaggtcactggttaggtaaaaagaattgacctcctactgccaatcattccttgattctgttgtctaagaaaatatcttttctttttcacactatgcaaggaaacccttgctcttggtggccagatgaggaattggactcctttatgacacacatcttttaaaaaaattgatatgtaatagttttaggtattttgggggtaatgtgatattttgatacatgcatacaatatataatgattaaattggagtaattgggatatttataacctcaaacatttatcttttctttatgttgggaacattccaattcttctagtcttgctattttgaactatacaatacattgttgctaactatagtcctatagtcaccttactgtgctgtggaacactggaacttactccttttagctaactattttcctactcattaaccaacttctcttcattctctcctccctccaccctctctcagcctctggtaactacgaatcaactctctacctcatgagattcactttttaagctcccacctgagtgagaacatgtggtatataaatcttataaataaaaatcttttaaattaaaattatcaaataattaaaggggtatctgtgatgactggatttgccctatttaacctccagtaaaaaattttcctaaacctgcgttggtataaatctaaatgggtttgggtgtggtggttcacacctgtaatcccagcactttgggaggctgaggcggctggatcacctgaggtcaggagttcaggaccagcctggccaacatggggaaaccccatctctactaaaaatacaaaaattagccaggtgtggtggcacatgcctataatcccagctactcgggaggctgaagcaggagaatcgcttgaacccaggaggctgaggttaca

SEQ ID NO: 34199 - DNA, 1029 bp, Homo sapiens
ttttgtatagcttgaaaaaaacctatttgtttttattttacagtattattgtgattattttagagtatttgaaagctaatgacattattttaaagaggatcttttcaatggatagacttctgggaatgacagaaggagattttctaataaattagagagttatagttgtttagttttctcatatcaataaatctctgtaataggtaaatatggtcttgtagtggggcttttttggtaattttaacagtttttttccccataaatgatgtatgttaagaaggtatgtgtttctgaattattagttatgtccttttatcattaatggaaaacctgtgtgggctaagtaagaatagaaaaatatgaaatgtcagacaacttaaagtttctgatatgtgtgaagctattaggtgaatttaagcccttgaccactgacaggtgcatttggaacaggaaattgcctgagcagtggccttctgcatgtagggaagagccctggccctggaagtgtgctttctgaatctgaaattattctatttggtctatccgtgttgtgccctaccaggaaagggagagaggggttttgtgttttagaagaacctcacaaattctccatgttccagaacttattactgactgtaaaactgcaaagtagagtttattccttttccctccacctgtcacatatatgtcttttgactgattgagaaatcttaacctttttggaaattagtggctcctttctgtgtttttaaaaaaggtgttttttagtatactgtctggctgccctagttctataatgtctttgatttaactccccttccgccccttttttaggtatctctgagaccttttttggaggggtggggatcacaaactcagaggccaggcaggtagtataatatgaatataagtttctagggaggaatggtaagaactatgacagactggaaaatacttctatctccaaaggtaattaaaataaaacaaaaacagaaatatattttgatggccaaacaggaaatccagatt

SEQ ID NO: 34200 - DNA, 1058 bp, Homo sapiens
gtgtagacacaaaacagctatttatgattgtgtgcttttctgggaagagtagggggaagggaggcttagggaaagatttgttaaaggatccaaaattatagctagataggagaaataagttcttctgttctataccatggtaggatgactatagttaactatctagctgtaattttgtatcctttaagaaatctctccctaaccttcccttccccctagtcttccaagtctatcattttagagacagtttaagatacggaacagaaaagctgataatcataaatagcagttttatgtccacgtaggacttcttatgaagttctgtttctaattaaggtatttcaggaacaaagtggtattgcataaatttggagctcattttagactaagatttaataattgttaataggcattgagcctgtgtttaagttttatgttagcatttgttgggtaatgacttcttaaattcgggatttgactctgatgaactctgagttttggtcttaagtttggaatgtgtgtgtgtatcctctgttacagggcttttcccagttaactccaaccaatgagagctcctctgatgttttagggagctttaatttcaaggtccttagcagaatgaacattcttatgataaagaattagccactcatgaatcctggggataacctatagtcgtttacaaccattcacctgtctgtagagcagaagttgtttggaacatgttcttgcctcttagctctagaaagcagcatgagtgatagaatgatatttatactggtttggaaaaggtcagaaaccaaatattgttgccttagacgtgaggttattttgagttgtgcaggagactttgggagtggggtgtgaagagtacaaaaacaaatatatgtaaaagggaaggcctggcaaggatactaagaaggtagagggagtagcttaggtggttgtaggactgacttggataatgaaaggatgtaacacttgggtgtattggtttcttccgaggaaatgatggtggatactaaaggtagcataacaaggaccacccaagtggaaaa

SEQ ID NO: 34201 - DNA, 1070 bp, Homo sapiens
ctgatttactgaaatgatggacgttttacagtgaatgagctggagttaaactatggcaaattgagggaggcttaagcacaaggtccagaagaatagggggctattagatgcttgctttatttttcgcagtccagcattgccctgtgatattgtggtgagagagaaaagagaactgggccagaagattagagcacagggaggatttaggtttaataggattttatgaggctctaagaagaggttgtctgaggtaatttgacccaaaatgaaacaccctcctcaatactgctattagttataattgagggcacaaggttcacctctcttaaggtgttcccaatatttgatgagtcttcatccttagatggaattttacatgataagcacatttacagtaatagactttttatatattttttatgtatttagtagcagccaattcagggcattccaaagtacattctcaaacaatgaatttttctattggcagttgctcaggaaataaacaaaaaaaacctcaatcatggaattatatttactgtggctgattcctgtgctgtacgttccttaagtcaaatatgccttagtagtaaaaagaatcccatctgcaactagatttcttataaagatttttgtacaaaggccatcatccttctttaatgattatctgattacccctctccaattggtataacagttgtgataaagtacataaaataatgactcaagctgtaagagacctaagaaatcctactttagttgtaactgcttacttaagtgacattccaaaagaagagtcccatttttcactcaaggtttcacagctggttagagctagaactagagttttgggtccctgcctcctagctcaaagctcaggttcccaggttgggactttaaatttttagactttcaggcttggactgagccaacaactcttagccattaccctttgttccctactttaaatctacctatattctctagccatttccacaaaccaaccagagtaatatcaggagggatgaagaaggaggggtaggaagggagccagctgtgcttcccatcaa

SEQ ID NO: 34202 - DNA, 1033 bp, Homo sapiens
gatagattaaaaccaccacttaggcagtgtcttgttgaagttagtgaaaacaggtaggggtgtgtgtgtgtgtgtgtgtgtgtgtgtgtgtgtgttttcccaaactgtaaattgtttgctttgggaccaaggaaaggagaatgcagggattcttctagtttgatattgaaatctctcctttaaaacattagtgtttctaaattccttcctagacttacagaaggaaatgaggctgcccactttatttcctgatttgtggttttgaggtttcttcttagggatagctgtttgtggtccatgctctggagatccagtggatttacaaactgatgtgcctatctttaatatgtattaaatatcaccaaccaactaggcacagttcagagtaaaaaatttaaattctagttgtattttgctttcattttcttaattttttttgcttgaggcatgtaccttaggatttgatttggctttgctatgaaaaacaaacaagatgtttcagtggtgtggtcctttggaatgttgttgcttatcttgacatcccctttccctccattctgtatgagatattttaatgattgtttctctcttgtgaatacgttagtatccttccaagcttaatgtaagttttagagtacatatttgaacttactgatttggttgtgaattatttgttgattgagggttgcagttctaaaggtctgatacttttttttttagaatgttaacttgaagagacctatacagctcatcatagtctatcatgagtatccagtttcttctgctcacagaataagttttcctctgtctagcaacctcacttgggggagcagtcaacataagtttatagagaatagcgtatgctaggctgggcacggtgcctcacacctgtaatcccaacactttgggaggctgtggcgggtggatcacttgatgtcaggagttcaaaacctggccaacatggtgaaaccccatctctcctaaaaataaaaaaattagccgggtgtgtgttgcatgcctgtagtcccagcta

SEQ ID NO: 34203 - DNA, 1022 bp, Homo sapiens
catggataaggtgggggacctactatattttcctcattggtgctgttttatacaggcggtcaaatgataactcctatttcacaagaaagtaagacagcaaaaacgaactgcctgaaccttccatttttccatgttactcttcactatctctacaggttccttcttcctttattctggcctcactggaagagattttcttcttttatttaaagggtaattcctctacctttgttcagaatttcttactgtttttaaaaaacttttcatctaattttagacttgcggaagagctgcaaaaatagtagagttcccttacattcctcaccccatttcccctaatgctaacatcttacataaccataatataattattacaagtaggaaatgaacattgatataatattattgattaaactatagctcttattagaatgaaaccaaattttcaactactgtctgttttcagtcccagggtcctatataggaactcacattgaatttagcaatttctccgtagtctcttttaaagtttctaacattttgcttgtcttttatgactatgacacttttgaagaatactaatcagttatttttagaatatctcgcagtttaggtttgtctgatgttttctcatgattggactgagcctatgcatttttggcaagaataccacaaaaatgatgttgtgtctttcttagtgcattgtattgaggggtttatgatatatgtcttactacttatgattacttgatcacttggttgagtgtgttgtttttacactgtgaagttactatctttccctttttagttggtaagtatcttgttggagctacgtggagactgtgtaaatcctgtttctcctcaaactattgctctctaattttagcatctctcaagtggatcttgtctgcagtatttgtgatatttgcctgatgttgattgtttcccactttgcttcctatgttaatttacttatcgtctattgtgaagaagagttgtcgcttttcctccatttacttatc

SEQ ID NO: 34204 - DNA, 1025 bp, Homo sapiens
ttatctgtcttaattataatctgagagtgtgcccttatttataaacaaaagctattagtaatatgtttttttttatttcttggaggaattttgttgaaaatacaattcataatgaaaggttgaaggcttatctgtcttaaattataatctgagagtgtgtcgttatttataaacaaaagctattaggaatatgtcgtttttaaattttttgaaggaattattttgaatgtagatacatataaatatttccacagtgatagtatgtgaatgaattcagtatttctttgatgcaagttggtacatgattcaagcttttgaactacttagaatctagactaagtgggtgaggccaagagggtaggcagtgaaccaccaaaaggtacttgtaagttcttgttaaatattgttgaatgaatgggagagagggagaaaagaagattgaaattgtgtgtctgtggcaggcaggtgtgtgtgtgtatggtggtaaatggaaaaaaatcaataaaaatgttagatttactctcttgattagatggaataagatacaggaggatattgtgatcataaagtgagttattaaacttatttaaagtgagaatctagaagtgttgcttccgaagtgatgacaaggtctaagagtggcaatttgagtttaggttgcctgagtggaatatggggtatgaaagatgaaaggcattagaaatgaagatgttaatgaaatctgagactaaggtgtagattgggttatactaagtctaaaatgtcttttatctgccctgacacttttttggcatgttgtccaactacagattcccaaacctgatccagattaccaattttacgcatttctgcaagtatacggagggaaaataaaatcacatacctttacatatcattattactatcccctgtcattctgcatcagcataggtaggcaggctcatggaacagattttaagtgttttacaatttatattttaaaatatagcaacttactacctaccataacattagtggactgtatt

SEQ ID NO: 34205 - DNA, 1022 bp, Homo sapiens
acacagctaagagcaatctgcatttttaacaggatcctcaggtgattcctactgaaattaaggtttgagaactggttgtttagaagtaccaatagagagtttagaaaatgctgaccctgccttctaacaatagaatattgataagtagaatgttggaagataatcagttttataaaactcaagataattgtggagaagcagagaggccacttaaggggggttaatagtgttacagaactggggatgtggaggctgttgtaataatagctttgcttctggcagatactttttatagacagctaactgttaaactaacaaaggagattttaaattaacagaattcatcaaacatttaacataagtgttttagtttgtttctttaaaaaatttattatgtagatgctttggaaggttttgtcccttttgaagcatgagatgttactgagaaaatttcttgccaaatgaagtaatagacactctgctagatgtcaagaatacaagtggtgaacaagatagataagcttcctgatcttagcatatggtcttcggaatgggaagagaggatatagacaaattaattttaataccatgtgaaaaatgttgtgctaggccaagtatagcatggtctgagtactggtgggagcatggaaagattacctgagtgattactatataagctgaggtctgaaggatgacctagccagataaagggtgaaaaatattctcatcagaagcaactgtaacaacccgaaggaagtgtgagaccatagaactggaaattcatgttgttggaatggagaatgtgagggcaggtgtgtgagaaatgaggctagagagataagtagatagtagatcctgcaaaaccttgaaaaccatattgaagagtttagtctttacctaaaaggcaatggagagccactaaatgctataaaaatgggagtgtctcagttgggttcacattttagaaaactgtctctgtctagtttgaagaattgattgcgggactgacagtactagagaca

SEQ ID NO: 34206 - DNA, 1024 bp, Homo sapiens
aataatccttgttgtatctgtcaattgttgccataagtttattcttttgcttgtacttaaatatctttattcttttttttttttttggcactacagaagagctcttggtgctatttgatagggtttggctgtgtccccatccaaatctcaactccagttgtatctcctagaattcccatgagttgtgggagggacctaaggggaggtaattgaatcatgggagccggtctttcccatgctattctcgtgatagtgaataagtctcacaagatctggtgggtttatcaggggtttctgcttttgcttctttctcattttctcttgctgccaccatataagaagtacctttcgcctcctgccatgattctgaggcctccccagccatgtggaactgtaagtccagttaaacctctttttattcccagtctcgggtctgtctttatcagcagtgtgaaaaccaactaatacagtaaattggtaccaggaatgggttgttgctgaaaagatacccaaaaatgtggaagcgactgtggaactgggtaacaagcagagattggaacagtttgaagggctcagaagaagacaggaaaatgtgggaatgtttggaacttcctagagatttgttaaatggctctgcccaaaatgctaatagcgatatggacaataaaatccaggctgaataacttattgggaactggagcaaaggtgactcctgttatgttttagcaaagagactggcggcattttgcccctaccctagagatttgtggaactttgaacctgagagagatgatttagggtatctggcagaagaaatttctaagcagcaaagcattcaagtggtgacttgggtactgttaaaggcattcagttttataagggaagcagagcataaaagtttggagaatttgcagcctgactatgcgatagaaaagaaaaacccattttgggggagaaattcaggccagctgcagaaatttgcataagtagcaaggatcctaatgttaattgccaagatgatggg

SEQ ID NO: 34207 - DNA, 1031 bp, Homo sapiens
attctcttccattttgaacttgctttataatatatactgatctccaatattacattttatttcagtatatactggaaagcaatttaaataaaaatccactgtagagatcatctaagacacttcctctaggaccctgatgagttgggaaattggtggcaactttatatcttctcactacaacttcctttacaaagcttcctgtaggaaatctgtagtactctcatttccagattctttaggttttgctgaaaagtgtagatttatcagattggaatatatgtgaatctagttttacaacttctttcaagtgtccagtttatcttaatttgccttataatcagtatcatcttactcttcccactgctttggcttcctggaaacaaaaaacatttcctcattaattcttcacctctatgcctgcttgtaaccgttatttctgtgggggaaaaaaaggccactcagacagcagtgagtacatttctctcactgtgctaagaaacaatccttcttcaatgaattctgacttaatggattattatatctaggctgttgtgacagtaccacatgctttggcttttgaatagagtaaatgtctctgataatattgcatagggaaaaccctggtgtggaagaaaaatatgggaataagtgatgtatctatctcctttatcttgttaaaatttctggcattatttcttgctgatggttttcttgttaaaatcacatcttcagttcaagtttctcttgtgattttcattttctaggagtgtttgtacgttttccacagtaatactttatccccttccgtggttttgatctctcacccgtcctgttatttgtgattaaggatttctctacttttaaaaaataacactcttttgttaaaaaaaaaaaaagtttataaggctccttagttgatgagaatagaaaatgtgttgggaagtagaaaaatatataagcagatttgtgtatattgacaagaaaaagtctcagattattttgttcatagaaaagaaatattcaggatatta

SEQ ID NO: 34208 - DNA, 1038 bp, Homo sapiens
cggtagcaaatgatgtgttaggtatcccatagaatgtattgctttgtttgttttttccgttttatatacagtttaaggtcacagtttgcttcagatacacttgaacttggatgtggtagctgtcttttgtgcatttgaaactgaaggcatctctaaggtgctgtgatgtgttctttttgatagaactgatgtcatgtgaagagctacattcaatattacacttggtgctccaggctgggaatatcatgaatgcagtaagtaaaatccaaaacaattgtaatgttatgttttcaaccttgtctatctaaaggtgtgtgtgtgtgtgtgtgtgtgtgtgtgtgtgtgtgtgtgtatgtatacataattttttctttttgatttgtcttctttagggagggtatgccggcaatgcagtaggatttaaactgtcttctttgctcaaattggcagacacaaaagcaaacaaacctgggatgaatctcctgcactttgttgcacaggtatgtggaaatgattaggacttagagaacgcatatgaataccccttggaggcagtgaagtttttcccaggcataagatggtgtccagcagggttaggaaagggcatggcaagttccaagatggttctgtttgtagaagcgccattagcagattcctgagttgtactgcacccagggctatagggctgaagggaagtgggagagtgaagcagagaggctggtgaagccagctatgaaggatttaagtgtcaaaggtggggaatttggatttcatgctttagcagtggggaaccaacaggagtttgtgcacagtgtaatagcttgactggatctcttttgtttttgtttttaggcaaataaggcactgtggaggctgggttagagtagagaaagaactagaaataggaatacacctccgcagaagttggctgtaattgtttggtgagcgttgagggggagggtaatggtcatagggacagagaatagaggatggaggattgaaattttctgatgtggaattgactagatttgtgaccag

SEQ ID NO: 34209 - DNA, 1047 bp, Homo sapiens
agggagattgaggtgacagtatgctatctgtcttttatttatgaagataaccctgttgacccaccaggatatgctttgtagttttctccatccatcctatcaatttttattagttatgaaatttactggcccctgtggcacaaatctagaagaaccagctcacttggttcaagcctataatttcatcaacatagcaggtaactagctgagctcacttggaactgagatcataataatgatttaacctctcatttgagcaaggctttactgtttaaaaatcactttcacagaaataattccatcttatcttgacaatgtccctgagaggtaacatcttagaagcgaggaaactaagtttccaagaagtcaagtgacttttccagtaaagggggagtcaggactcacacctaggatgtctttctcactaaaatacacgctcaagtatacttgattggttgacatatgataaatggatacaagaattgtgggaagctctagaagaaaggatgttttgttgagaaaacaaatctaggaaagtgtctggaaaagtggttttcaatagagattgtttactttaaatttaactctagacccaagaatatcacataggaaaccattagggagtcatgtgaacaagacaatcaagtgtcaactcatatgatacagacattaagtacaatgatggttcagaaaagagagagaacacaataaggtaataaatcaaggataatataattgaggaagagggactaaagttagaacttaaagaatgtgcaagatttagatggaagagggaagtgggaagggcacaatgggcattgggaacaacccaagcaaaggtggagagtcattttccagacagggattaggagccagacacatctgatgggaggagggactgagcaggtctaggcaaggaagtcgtgggcattgaggtgaaataaggaggtggaatcaaagaggatcttcagtgcctattggagaaatacagacttgatgcttaggtgctctaaagggtggcggcatgagggagaatctgctccatgc

SEQ ID NO: 34210 - DNA, 1046 bp, Homo sapiens
ttttgccatgttgaccaggctggtctcgagcgcctgatctcaagggatctgcccaccttggcctccaaaagtgctgggattacaggcgtgagccaccacaccaggcctacttcagtcttttctacaaaactacagaactccctatcaagagtaatgctagagaaggaatattaatgggatggtttgttagtacctagaaaaaaaagcatcctgagttccataagaataaatgataccagaccaaccaaaattcctccttggatagggttgctgggcatgaatttatgtccaatatgagtcaatatgagaaaagtgccaggacctcagaggtaattaatagaaggatagagcctggagcaagcaaagtgatggtcttgctctgctctgtgctgggcagatcccacctggatatgtcttcagtttggggcagctccctgtgggaaacatactgggcagggagtcaggggtgcttgacctgggtcacctttactgcaaatacagcccggctgcaaagggctatcctgatccttgagactctgagctgaaggcagataactcagtccccaggagtgattttgagaggttctgtttgtgtcatttatttttttgtcaccagtgccttgtataccacctggcacacaatcacttgtgcaatgtataacattaaagggtcatctgaaggccaggccacttctggtgtgaattcttgggttggaactgggtcagctggttcccaattaatctactcctatccacataaccccaataggttaaggccaacttgcaccttttctcttttaaggatgcttaagagaaagtcctttctgcttcattcaccattacttcctgacagtcctgtttgtccttaaaacctcccccacagccactaatgaatgatcccaacccctaaacataggaggcctcaccagggctactgccagtagagaggaaggggctcggcctcttggggtccaaaccaaaccactcaatcaaactgactacagagagtctggactgtccagaaggagcttggctttgagggccac

SEQ ID NO: 34211 - DNA, 1064 bp, Homo sapiens
caattgcttgcttactaatccatctcccacactagattgtgacctccctgagggctcagaaatattaaattcttctctgtatcctcattgcctactcagtgcttggaacacatgacactcaacaagtcttcattggaatgaatgattgaatgagtaagttaacatcctctggctggaagcccagcaacaagaccaaagatctctcccacttctccaccttcagaaaacagagacctggtctagttataggtctcaagaatctgggttgactggaagaagagaatgagagagatcaggacaaagaatgtgctggggggcggggtcagcatttgatgaatttggctttgggataggcttagtagcagaatgagaagaagaaaggactcctgttgtagtaagtcagacacctgtctgatggcctgtcttaggcttgtaaaactcagtgggggtagcctgcttccagttttagaagtgggtcctaattaaactgtaaacttctaaagcagaacatacgtccgcacaaaaccttgtgcacaaatgtttatagcagcactgttcataatggccaaaaagtggaaacaacccagtgtccatcgactgatgaacagatgaacaaaatgtgctaaattcacgcaatggaatatcgttcagccatacaaaggaacgaaatactgacacatgctaccacatggatgaacttggaaaacattctgccaagtgaaaagagcaagacacacaagaccacatattatatgattccattccagaatagggaaacctttagcgacagaaagtagattagtgattgcttaggactgtggggatgtgatgtgggagggaagagagagatagctaaagggtatgggttgggtgtttgtttgtttgtttgtctgagatgatgaaaatgttccaaaattggctgtggtaatagttgcccacatctatgaatatactaaaagccattaaattgtacactttaaatgggtgaattatatggtatgtgaattacaattcaatgaagctttaaaaaaatccacaaaacttctaaaatagggtgttaactg

SEQ ID NO: 34212 - DNA, 1035 bp, Homo sapiens
ccaacatggtaaaactctgtctctattaaaaatacaaaaattagctgggcatggtggcacatgactgtagtcgcagctactcaggaggctgaggcaggagaattatttgaacctgggaagcagagattgcaatgagccaagattgtgccactgcactccagcttgggcaacagagtgagactctgtctcaaaaaaaaaaaaaaaaagcagggggggatagtggagcaagaggattgcttgagcccagaaggttgaggcagcaatgagctgtgatcgtgccaaagtactcctgcttgggtgataaagcgagaccctgcccctacccccacccaccccccaaaaaaagaattcaactcaagttagaaaaagagtaataaaataaacatatggaacatacacaaagaaagaaaagaacagaaatatctacacatagtatagtaagtttattaaatacatagtatatatatttctgcattgtaggaaaagctagaaaggtctcccatttcatttgtgatacgcttataaccctgataccaaaacctaatgaagatagaacaaaaagaaaatcattagtagcttaattaatgacattggctgtaaaattattaattaaaataccccagcaaattccttttttttttttttttgctgggtctcactctgtcaccaaggctagagtgcaagtggcactatctatcatggttcactgtaacctccaactccagggctcaagtgatacccctgtctcagcctccagagtagctgggactacaggaacatgctaccatgcctggctaattctttaagtttttgttgagaaaaggtcttatgttgcccaggctggttgcaaactggcctcaagggatcctcccatctggacctcccaaagtgctaggattacaggcatgagccactatgtccagcccaccagcaaattctttttttttttgagacggagtctcgctctgttgcccaggctggagtgcagcggcacgatcttggctgactacaagctctgcctcccgggttcacacc

SEQ ID NO: 34213 - DNA, 1073 bp, Homo sapiens
aagatgtgaccattggaggaaactgagtgaagagtacacaggacctttctctactatctttgccacttcctatgaatctataattatttcaaaataaaaatttaacagaagtaacaaagcagaaaccgatagaccaaaagaaagtgatttcacatccaaacatataatcagccccccgtacccccaaatctcacatttgtgaattcaaccaaatacagatcaaaaatttcaggaaaaataatttgttaaatacaatgattaaaaataatacgaattgtaaaaatacataatattatttacattatatagcatgctctaggtattagaagtaatctagagatgatttaaaatatatggggggatgtgcacaggttaggtgcaaatactaggctattttatataaaggacttgagaatctgaagattttggtatcagtctcctgggataccaggggatggctttacctgttgaaccattgacttcttacaacccactcttttctaaaaaggaaaaaataatttctactgtctcattgctattatgactcaggaacattcttccatcatctagttgctgatttttccccttataagtgtgggggaggaaaaggatgtgaggctggaagtggaataagtgaagatttaacatgaacaataagcttcattcatttttaagcaccatctagggcccttcccacccaatatttgttgtgaccactataggaatacaagtgaaagctagcagccaatggcatattcttctccaccacctggaaatagatggggagaggagagaaagcaaggtaagtggagagtaggattatagatatgatagtgacataaacaaagacatatccatagatggatagatgattacttaagtgcttttttgttttgcttttttttttttctgctttttttttttaagagacggggtctcgctattttgctcaggctgttcttaaactcctggcctcaagggatcctcccaccttcacctaccaaagtactggcattacagatataaaccactgcacctggcttatgctaatgttttaaatataaaagcatata

SEQ ID NO: 34214 - DNA, 1031 bp, Homo sapiens
catggacttctcctctctagctatgaaagtcctagatggcatctttttccaacagaaggctgttttgtctaccctgaaaattttttgtttagtgtagcttggctaggtcttctggataacttgcttcacttcatagtacttgaaacctcgtcttgcacttttacattatggagatggcctctttccttaaactttatgagtcaacctcttctagcttccaactttttctgtgcagcttcctcacctctcagcctacagagaattgaagagagttgaggttttgctctggattaggctttggcttaagggaacgttgtggttggctcgatcctctacccagaccactaaaactttctctatctcagcaatacggctgttttgctttctcatcatttgcgtgtttactagattagcacttttaatttctttcaggaacttttcccttgcactcacaacttggctctttggcacaagaggcctagctttccgcctgttttggcttttgactgtatcttcctaactaagcttaatcatttctggcttttgattgaaaatgagagatgtgtgacgttttttcacttgaatgcttagaggccactgtagggttattaattggcctaatttcaatattgttttgtctcaaggaatagggaaggccaagggagggtgagagatgggggaacggtgagtcactggagcagtcagaatacacacagcatatattaagttcactgtcttatgtgggcatggtttgtgacaccccaaaacaattacaatagtaacatcaagatcacagatcaccgtgacagatataataataatgaaaaagtttaatgcaagaattacacagagacaagaagtgagcacatgccattggaaaaatgacaccaatagacttgcttgactcaaggtagccacaaacttaatttgtagaaaacacgctatctgaagtgcagtaaagcaaagcacaataaaaacgaggtatgcctgtgcaaagagggatcgttcaggccatcttagaggatatcata

SEQ ID NO: 34215 - DNA, 1076 bp, Homo sapiens
cataaattaataattttaatgggcaagaaaagctttatgtggaagtgatgaaagtggtagtgcatgttctaatctgctagttctcctgaaatatatgtaaatttttttagtatttggatgatagtgaagcagctattttggctcgacagataataattataaagattaattatgttgtagaaacttccaactgaaatgacatttctctgtatgctgaagaatatatagaaattattaaaagtcaagagatgactttttcttcttgatagctatttctagaattttagctggaacttgttcattttcccccgtgtggtaatgatttagtcactgtgtgtgtggatgtgtgtttgtgggtgtgtgcacacacacacttgaaagagaaaaggagtgagtgtgtttgtggtctttctgaatattttttctaaggaaaagccaggtaaaaatgtgtaaggataggttcttcccatcatcttctggttctcttctttgcccttcccaaataacttggtcttaagaatgaaagaacaattcaacttcaagggaatgacttcctccattttactttggcttgtgttagtggacatagcatggggtactgtgatgtgcacacagccaggaaagagcaatgttgtaactgttatgtttaacctgctattcccctggagtcacctggcaatacaggaagtaactgaccactactgacttgaaatgcacattttttagtctttttccaaaaagaatagaatttccaaaatttatttttgtatttgtacccctgtccgtcccttccacacttcctgttctgacttacatattccttttctctggtgctgtggtaccccgagcataactctaatctgctggactatgctacaattgttggcttactcaaccccatgtcttagtcaacttgtatcagtacctagcaccgtttttggcatgtggtagattcaagtatttgacaagtgaatgaaaattaaaggaaataaagggtatgaagttattcttaacaaaaaccttatactaatttggagaattttattaatatggcagcaagtctatgtagtggtttt

SEQ ID NO: 34216 - DNA, 1066 bp, Homo sapiens
tcctagaagttaaaaatggttccttttaaaatctgcctgctttttttcatccatatttccatttctactttctgctttttttttttttttttttttttttttaaagagccagggcctcactctgttgcacaggctggagtgtagtggtgcaatcatggctcactgtagccttgactttgtggctcaagtgatcctcattcctcaccctcttgagtagctaggactacaggtgcatgccaccatgcccagctaatgtttaatttttttttttttttttttttttttttttgtcagagatagggtcttgctctcctggccaggctggtctcaaactcctggcctcaaccgatcttcccaccttggcctcccaaagtgttgggattacaggcgtgagccactatgcacagcctatttctacttttattactttagtcttattaaatctagttgaggtactagtcacttgttaggctctgactctgcctgacagttcgttttttcacattgtaattgattgtggtcctatctttagcaggcattattttatgtgtgtctcagcatgtacttattaagtggcttcacttgtcctttatgtttcttacttgatgggattttcatactctttatgtccattatttaggatttctggactacatttcttatttccaggttcttaatgtgttcctcagggttggattgctggaaatttaaccctctggttaagtggaacatgaatatgctgtattcttgctagcttcacagagtgttttcttttaatgactactgtcttacagcatataatgaaaaataagttaatccaaaaatattcaacaaacatccagtactcactacatgcaaagcaataccttaagttgttcattacccagctatattttgtgaaaagatctgagccaataatactgtaactgtatatgtagtaggtactttataaatgcttattgaatgaagagctttcctggcatgcattacttcattccagccactcttattcttggacactttgttgtatgtcccaaaatagaggaataggatgttttaaatttga

SEQ ID NO: 34217 - DNA, 1077 bp, Homo sapiens
cgtatgattcatcttcaaaaggaaacagactgcttgttcaggaggacttagaacattgtgtaccttatctagagcaccttctcattctcttgcaagagaacttcaagcacagttttcttaactaggttgaatactttcaggtgatttattttcaggatagcatgactgtgccctctagcagttcatcatgaaaaatctgagtttcacgataaccaaatcggacccttcatttactcttacttgccttttttcctgatttcagttttgtgtgattcttgtactttttccttggtgtgctacctctttgcttacctgtttcattctcttatatgtctaggacctacaactcttaggtatatccaaaaagacgtaagcttttccactccatggtccctattgtactgccacagctatttccatgggcaggtgaccctcactgacatcacctccaattgactccccagtccttttcttaattttgatatattctgcccactcaggaatgaataaaactcttatttaggcttactaaactactgtaacctacactgatagtgaccctgagccagtggatcacattaaggttcaggaaattaacagggatagggaattgtgccagaccaattcatgaagtggggaaaacttgtattttaggcatgtaatttaagatgttgccattccttgtaggtctgattcgagtagcacttttggcaaacacatcacctcttaggtaataaaacttcagaaaagaagttcagggtatacaaaggacggtgaactttctggagggtggaataacacagttgaggaggcggcaactgaaattttaaactggttgcctgcattctgctgtctatcttaacccttaaatttataactttggtaatttatttcccaacccaaggaaaacatgccattgtgaatgagtattatgagtattacagtatatgaggtctcactgagagaacaaacctgaaattttctgttttttcagtgagattttttttttttttttttttttttttttggagacagggccttgctctgtctcccagactgaagtgcagtgcatgatca

SEQ ID NO: 34218 - DNA, 1056 bp, Homo sapiens
tgtatatatatatatatatatataaatacatttcattttatatatataattttttttcaggccaagcaaataaagtagccaaagaagctgctaacagatggactggtatgtactataataatgctgataaactatagctaaattcccttcacacttactgcgacgtgaaattcagataccttgtgctagctttgttcaagaaaggacgttaatgaaaaatgtatgcattactcaaatgtttacatattaaatcatttcagttatttaaggttttttttataatcttatgagtcattttgtaaagcataagatatttttgtaaaactaatgattgcttccagtttaacttttgtgcaacttttcccaagataagtcacctgggctaatcacttaactttcatatacattaatgtaagatacacttttaagataatgaaatcttaaagatttatcatcttgctaataataataataataatagctaaggtttgttgaggactatttgccagttactgtaatgtctgtggttcattctcattttatctccatgataatcttgaggtagatatgattattatccctaatttaggagacaaaactaagaccctcaggagtccaaggccacacatgtgtcagacagcagaacaggaattataatccaacttttctggctggacttaaaatgactatgtttagtcaaaggcgattagtcactgcaagaacagatgctggagccaggtttctctgactccctgtccaggcctctgtttcacacaaaaaatataataattttttttcctactctattttagaattaaatagactggtaaaatcaatataattggcctttcggattttttttttctgaaattgcagttttatttattacaaagttatttcttaagtaaggtaatgctttagtgataagaacagagggtgaaacagcaaactgacatgaagtaagtgtcccacaaagtataaataaatgtggatttttaggttaaaaataagatacgaatccaaggtgatttcccccagtattttcaacaaagaggc

SEQ ID NO: 34219 - DNA, 1082 bp, Homo sapiens
tgtaaacacatatgagaggaatcttaatgagtgaagagggacaggtgttatgagggcccaacctagattcattgcaaatgatattgcccatcctattcctataggtatctttgctgtgtcaccgtataaatcaaacagaaattctgcccgtcttaaggttgtttctttaaaagaaaaaaattattctatatccattcataaaaatttctacattaaatagggaaattatttgacagagaatgaactatcaagattctcagtggcattttatcttgaaggccgacatccagtggctcaaagaaatgtttaatcagagtcttctttgaattggtccattaggcattgttgtggagaggtttttatttgttctttttcttgcttttaacctttaaatgtttataatgaaatggtttcttatcctcctatgaatcaggaaatccttcctgtagaggctgttcaatagtcttaccctggtgcctcattctcatttctgatccaggtttgaagtttgttccctacaagcttcctacattgttgtatctgttctctcatttcctagaaatctttctgtattcatgaagcctatcctgtaagctatacacataagacttggccttttctctctgagacacctatcactttgtaattgtttagtaataaattattttttttcactcttatgtcaacttgaaggcataggtttttcacattctgtaatacctgcagtgcacctgatacttgtcttatgtagcagcagacataacatttggatgtgattagcaagaatgtactggttgggcagagactggtaaaaattatcctagaatatcttatggtgttattttaacattctctcttaggttgttaggaaaagtaaagattcattttagattgttacaaagagtaaagatcattttaatatctgttgacattccataacactttgattgaaagaagttaattttgttaacattattctatttgatgcagtagtattctccataaaattcattccagaaatgtgtttatcaatatttgatacttggaaataaacttccatagaaaaaatattttaaaaagtg

SEQ ID NO: 34220 - DNA, 1028 bp, Homo sapiens
gaggagttgagtggataagagcagcaggctgagctcaggaggagaacttgataaggagtaggggaaaggaaggtcaggaatgagccaaggctgggagatcagatggtgagatacaggtggatgtggtaatgatgacctgaggcaggagatttttgtctaacctcaaggtagggtagtagctcagtggctaaaagatatgcttgggactgggtgcggtggctcacgcctgtaatcccagcactttgggaggccgaggcaggtgggtcacaaggtcaggagatcgagaccatcctggctaacatggtgaaaccccatctctactaaaaatacaaaaaattagccgggcgtggtggcaggcgcctgtagtcccagctactcaggaggctgagggaggagaatggaatgaacccaggaggcggagcttgcagtgagcggagatagtgccactgcattccagcctgggtgacagagtgagactctgtctcaaaaaaaaaaaaaaaaaaaaaagatatgtttggggctgggcgcagtggctcacacctgtaatcccagcactttgggaggccaaggcgggtggatcacaaggtcaggagttcgagaccagcctggccagtgtggtaaaaccctgtctctactaaaaatacaaaaaattagccgggcatggcggtgcgcactggtaatcccagctacttgggaggctgaggcaggagaatcacttgaacccaggaggtggaggttgcagtgagccgagatcgcaccactgctctccagtctgggcgatagcactagactgtctcaaaaaaagaaaaaaaacgcttggagccagaccgtctgggtttgaatctgatgtcatactgcttagctggtgacttttggtgagttgccaaacctctccatgccttagtttgcccctctctcaaataggggtattgttaatagtacctaccacagagtttgttttgaagattacataaatctgtgtaaggcatttaaaagccttgcatgtaaatgctctaatgttacctgct

SEQ ID NO: 34221 - DNA, 1031 bp, Homo sapiens
cacattttttaaggattaacacctgtggaagggagggggcagaagcagagttgggcagagcgagaagtcaaactgcagtataggcctgcagagccttgaacaacaccacgggaagctttggagtgtttatggcccatcagagctatccagtgttgggttgaaatggccaggcttgtttttatctgcctgtcttcatcagtctctggatgtgaactgtcctttggagggtgtgttttgggcgggtggctgttagtagccgaggcaaaccctgaaggactaactgctagaggctgtctccaactaaggcagtggggtccttgaagtgggatctgcgtggcacatctccacgtcccccatgcttgctttttctctagtagaagactgtgtttacagtggtaagttaggaagatgagtttcttctcattgctgtggacttctgttaccttatggcttccaagagtctggaacatcgtgttcacatttgtattattctccacattgtgagtcctcatgtcccaaaagagaatacaaaacaaaacaaaaacgtaagaacctatcaaaccgtattacccagattctcttgctgttaggatgcagacttttgacttaagtttctcccatttgagtgagatcttgtagcaagacttggattcaggagtgagatgcaaaacaaaaaaacaaacaaacaaaaaaccagggaacgcttatgtggtgtgggtgatttcagaggcagcttcctcatcgtaatacagctggggtgcatctagtggccatgttggcagctgctcccttaccagaccggttctacagtgggattcagcccagatcctagggctgggtatcaccatcctctgctgcagtaaatgactttgaaacacatagaatggattctgtagttggcagctaagaacgctgacacatttcgtgggtgagttgtgtggaggaaagactggaggcaaggagactgattagaatgtgaaggcctgaattaggatgggtttagtaaaataggaattgatttgaggagaatg

SEQ ID NO: 34222 - DNA, 1006 bp, Homo sapiens
agcccaggaagggaacccaacacgttttacctggcagcgtgtggctgagcctggagtgtcatcttgggcccctgactctgaggtgaaggctgtttctgcaacatttgggtctaacctcgtccttttactgcgacctgcctcaggaccaccttgcatttgtctctcttcagtttcctcttttttggtactatatgcgtacaacttcgagaagcttctgtaattttagttcagtttgtgtgttgtgcagccataccattaactgagcaggttcttttcctcaccgtctggtctgaatttccttgtcctgcggaaaggcattgcctgccacgccttgttgagttctctcatctctgaaataaagaggaaaatagacgttatacattttgaaagcctcagtttacttccaggttttggcataatataaaacaggttacagcttgcctcttcaggtggattatttagtcgtaaaaatggaaacttattgatagggaaaacccagcctacgaaaacagaacagagcgcaagactgcgtttgagctcccagcagttggcattggtagatttgtgtgggtgataaaacataagttttgtatttgatgtatccttttccagtgaagtgggaaaactgtgacatgtttcacaatattgaaaaaagcgtaccagttttaatatagagtgtgaagtctggtggcagtaatgcagataaaccattcccctttggaaatttaggggctttaaaaacaacaaaacaaatcacaataaggtaagaaaaagtgtaagttcaaaagcaggtaaaggaggaaaatacttttaaatttaaggaggaaattgctttctcacttgcattctttttaatgtttttcctactttccctaaaataacagaacctggtctcttataggttctctgcctaggctgtctcgtaatgtgttcatattaaagttgctgttccacaagcaaagcaggtacagcgtatgcctctgtttcagagcttccaagcctaata

SEQ ID NO: 34223 - DNA, 1025 bp, Homo sapiens
ttccaaaggtccagagcattcagctgtctcaaatgcaggtcattttaatagatttactttgaatgctggtggccaccaaactttgtaaccttctcagaattggttattttactattttctgctttttgaaaaaattatatagaagtaatatacatatataaaatatcagtggattccacctaacttctttttaatggctgtggagttcacagtgttgatattccagagtttgcttaatcttattgttggtcttttgaaatgtttcctgtttttcactgttattaccgttaggccatatacctattttataagtttctttaattttccttctgaatcctctgtttccttggggcatgtttcataaagaggagagattctttagttaaagactgtgaacgattttgtagagcttgttaaatcttaccagcttgcttttcagggaggcagcccccatggtcacaagtaataacaggcccctaaggatgtcctgcttttagccctgcccggatggggcttggtgggaagaactatttctgatgttatagtagatgtataatgataagtttaaattcttttaatatacatttcatgaatcattttatagggttggctactttttccctttgattatccatatttccttgtaactggataattttataattgagaaaagctcttgaaccaatatattatgaaacttacctcttctttctgattggtaaataaagaacattgcttagaatttgtagtcagtaccattagtacctggggctttcattcattcagcggttttcctgagcctctgctttgtgccaggccttggtctagagtttgtatctgcgtagagcctacattccagttggggagaagaaccaaattaatttacctctaggattatatctggaatctttatcaccaagtacataattcttagggatcttaaatcatatttttatttttataaaatggaaaagcccctccttgcagaattttaaggaagacttcttttaatttgcaaatttata

SEQ ID NO: 34224 - DNA, 1083 bp, Homo sapiens
taagagatttactttttcttgtctttttgagatggactctgttacccaggctggagtgcaatggtgcagttgcagctccgcctcccgggttcaagcaattccccagcttcagcctcccgagaagctgagattacaggcgtgtgccaccatgcccagcaaatttttgtatttttactagagacagggtttcaccatgttggacaggctggtctcaaattcttgacctcgagtgatccgccctccttggcctcccaaagtgccgagattacaggtgtgagccactgcgcccggccgagatttacttttataatgacttctaatatttagcattcaaaattgtgaaaggggagaaagatgtctgagaaatacagaatctaagattgggatttgtctaagtaattctttcatatttcataagttgtagtccttaaataaaaaggtttcatgtggttattaccaggaacatcaagcctcttgttcattctgtctggattaatatagattctcaaatatatttatttattaggctgtgctttactcttgttgataagacatcagaatgacttaatactttaagtctgttatttcctttcctgtttaattgcacacagtccccccaaatcacacccttcttgtggcccagggcaccagcaattccttagcaagtgaagggagatgattcctttctctctagtatccagttccctaaattcatacttcttcaccacaaaactgtggaaatacatgacatacaaaaggagttttaacatttctattttcttgacctttgcattttatcttggtatggttttctaatatatatccctgtgttgatggatttttaggcctttaggtacctaggagaaacagatttgatctattttaatttgttaaaaaagtactgactgcagttgaaaaacctgatttttttttctgtttttctactacctagccccaagatctttgataagtctcttaacccctccaagccacaatttcccccatcttctaaaaggggataatactttatatgaaataatatgaaatatataaactatattaatactttcaatgaagactact

SEQ ID NO: 34225 - DNA, 1050 bp, Homo sapiens
atgaagttattatttatataaaattttatgatttttaaaacatgtatttttcttttaacattttcagaattacttttaggagacttctctttctctctttttaaaaaactgtttttaaaagagctcaaagggaccaggatatagcctttcaaaattatttgctcttaccattattcaaaaatattatgtatatgtattgttctaaaaagattagtaaaaatgagcctggttcatgataaaatagtaggttttttgcaaaatatcacttactgaaatttcaagattacttttgtgaaatttaaaacagtgtcatcttaagcattatttgtaacctatcatttctataaaaatattccaacttttgatctggaaataactgagtaaaatcatactttctgaagtatagaagaatgttagcatcatactttataatgattttaatcataattagtgttaggaaaagtaatttctcttgcttcttttctttttagattctgaatttcactggccctttatttctacctccaggctgttggaatatattttctttgaaacttgctgttaaagacattgccataaatctattcaccaatgtatttttgactacaaacataggtgccatttttgcaatacctctacagatttattcagcaccaaccaaggtattttctacaatactatatgtgtgttacagttttcttaattactgttgctttttattaacctttagtgcttgagttttattaactgggttaagctcacgttctttaaggctaagaaactgaaggatattaccaggccagtcttggatgataaattgttcagacataaaaatctttatttggaaagagttttcttttttataaagtaatttgaagttcttgaatgaaataaggcatgaccaatagattaatagatgtcattttcatttatttccaaaatttgtagagcaaccagtatgtgtttgctatagaaaacacaggttggcttttagtacatacttgcaatgacttaataaattaaattgttaaatgctttatttggatctct

SEQ ID NO: 34226 - DNA, 1023 bp, Homo sapiens
aataaggtctggctctatcacccaggttggactgcagtggcgcaatcttggctcactgcaacctccacctccggggctcaagccattttcccatcccagcctcctgagtagctgggactacgggcacatgccatcatgcccaactaatttttgtactgttttgtagagatggggtttcaccatgttagccaggctgagctcgagcaatctgcctgccttggcctcctaaaatgctgggattacaagcgtgagccactgctcccagcctatggtcagatttttgacaatttttaatctggaaaactcagtcaccttttgtcttatttgaagcatctaaatataacttcatctttttcacttcttgatattggagaagaggtacagaaatattatggattgactacttctgatgagcttttatgcatttggtgaaaatcctcaactgaattttaaatgttctgtataaggacatttctaatttaaaagaaagttggagtcctctgaggggaatgtggtctaggcagctgcacacatgcattcttggtgcatttagtccaacccgtttgtaccgtttcccctggcagtggtgcacacgcctgaagtggacttatgtctgcagggtggacactgtgccctgtctcctccacctggcgtgtgagtatgccccctggtaatgcagttcacccagatcttcaaatcaaaccatggcataccttgtctgtggatgtattatgatggggtgattgggtgtcttattctgtttctctcccagacactctctggggtctagaatacaaaacatttgtgaaaaggtgaattatggagtgagtcctgttggacatttcccctgttacgtgagtcttttaggcttgagcacagtctttgacataggatgactttgcacacacttgaaattagagttgagggaatcctccctccagaagtgcttcttctgtgatcgcttgtgcccacaagagatatgtgcctgcaagatgcaatgcccgtggcagtgtggtagatgga

SEQ ID NO: 34227 - DNA, 1118 bp, Homo sapiens
tgcatgtgcatctaccacagaagactgaaggtttgcctgatgattccagtgtgggattttaaaaatggaggccgggcgcagtggctcacacctgcaatcccagcactttgggaggccgaagcagacagatcacttgaggtcaggagttcaagaccagctggccaacgtagcaaaaccccatctctactaaaaattcaaaaaccagctgggcgtggtgacgagcgcctgcagttacagccactgggaggctgaggcaggaggcggaggttgcagtgagccgagatcgccactgcactccagcctgggtgacaaagcgagactctgtctcgacaaaaaaaaagggggtacattagttaagaaaaactacaagtgtgtcttttgcttgagggaaaggctaacattagtagaatgatgaaaattattaatggtgttgctgtacagtagcatagtatgcagtcttcaagttgcatttgaaggttatataatagtagggaaatgtccccagtgtaataaatggtgtaaaaaaacaaaagacaatgtatatgtgaaatatgattccaattttatacatatacacacacataaaggagactgtaaagaactttgggaggccgaggcaggtggatcacctgaggtcaggagttcaagatcaccctggccaacatggcaaaaccccatctctactaaaaatacaaaaattagctgggcatggtggtgcacacctgtaatcccacctacttgggaggctgaggcaggagaattggttgaacccgggaggtggaagttgcagtgtgccgagatcacaccattgcactccatcctgggcaacagagtgagactctgtctcaaaaaaaacaaaacaacaacaacaaaaagagattgtaaagaaatatacctaaatgttcataattgtagtataattgcacgattcatgtttaatgtttaattaaaaaatgtgagaatatcagtttaaagtgaaaaatcagtcatgcattaatgatattaataacctatgcattttaataccgaatatacagttgaagtgtactttttgaaacttgtgataatgtgtttcttttaatgcaggagacagtgtttcacaaaatgattttccttct

SEQ ID NO: 34228 - DNA, 1024 bp, Homo sapiens
agttttgttctacttttataagtatggatattgttttcttaaggaatggatatgaaacaaaacaagagcagagtagttctgcctgtttgttcatgtactgtgatttgaatatctttatccagtgtgctcttcctatatctaataaaaatgccattatcaccactttatctggcaatcatagcaagaattaaaaggacattttttcttttttttataagcttcaacttattttatgtcttatattttataacactcttcttagagactcagccactattttgtacttctctcaataaagtttattatggattatgcttgtcactgaggaagatacaaagcaaagtttatgacacacactccttgacttgaaggaatttaaagtctgcatgaacaaaaccaagaaatagtctcagaattatacatgtcagcacttaacaatgagcataatatttgtagaatagttttaataagttttaaagaagttaggagaaggaagagagttcggtatgatggaaatattgagtaaggctttccagaggaaatctaagacttagctgaggttttaaaacaagatcaggatgttggacatcacaggacctgtaggatttaaatgtggcaaacagtaggaagagtattctagacagaggaaaggaaaggattcactgcagggatcagatgtgtgtgtgggtgtgcatgtgtgtgtttgatgtgtgtgtgtgtaccctgtgtgtggcggaacgggtaatgctgagccttcccaggccatagctttgaagtatttatttgtggagaacaccacttttccatttctagcttttcgtttccccttgttcaatctttgtggggcccacacctacacatcttgtagatctcaaactaagctctgcttcttaaaacctttccctgaacttccaagcctaaattgcatgccttattatgttttcctgtaacacattgtgcttcctttgtagaattattatgatatgaataattacttgctgaatttttactattatactgatac

SEQ ID NO: 34229 - DNA, 1015 bp, Homo sapiens
ttctaatatttcattaaaggaattagacatgcaacttattatataatagaattagataagataaaaccaaaatagaatctttctgctctaagctgtgctgcaaattctataattttttagttcaataaaaagaactgttgacttagatataactttcttggtatattctctaatgctcatcaagtaaagattgctttctatatttgtaggataatgagcattggatatattattagagttcccttaaacaagctttgatgcatgaaaaaaatggtttcataagtataaaacattaaggaatctttctgagaagctagaataaaattgtcaatcatttatttaataacttatgtcagcacaattttcttgtagtatgcaatgagcatttacatttggttgtatgtaccaaaaaaaaattttagggttgctctgaagttatcaaggagacactgatcatttttttcctgttataaaaagttgcctagagctctagtagaagaagcatcacagctttcgtaaggcaagtgactgaagacttgatccaagactggacttttatctttttttaaaaaaattatggacctatggatgctaggcaagaccaggcactttatatatattattccaaattcttaatttgaatctgttacatcatgactttaccattttatgtgtgaaataacagaattcatgaagttatgaaacttgtccaatgtcacactaccaccgagtagcatttgtgatagtcaacatgtattcctcccatactgggtagcagtgcttttctaagtgctttctatttattgctttgtttaatctcacaacacatttatgagatagttgctattattatccttatttttcagatggagaaaattgaggtgaagttcagttaagaacttcactaatgtcgcagagttagcacatggtagacgcagggagcaaacacaggccatctgttcatgtagcctaagcttttaactgctacgccaactccactgcctcagggaacaac

SEQ ID NO: 34230 - DNA, 1033 bp, Homo sapiens
gttctagctgggctctcagcaaagagctggaaataactaccagccatttgattgatccatcttggaaaaccagcctgctccggcattctgataatttcagcccagtttccatctgattccgtcccaagggtagaactttctaatttagccagacaacccacagaaccatgaaaaataacaaataaattattaaagttgtttgacatacagctatggataactagaccactactctgtgcattatttttccctttatattttatgtctgtgttaatatgtgtgtatatgcttgtacaatgagtcaagagctttgagaaagctgtatttgataagataatctattacccctgggaataggagccatgtcagtcccaaacagggctaccaattcaatttcgatggtattacattattattacattatattgtttttacctcccctacaaatttacagagttaaaatgcaattaaaatgagcagcgaaggctgccaggttgactatgaaaatatacgtgggcaaatgcaattttagagaacagttaggatttaaattatgacctaatttaaattagaactcaggtgaatagttagatcagcgttctttcattatttgctggagacactggcttcttcaactaaccttgatatgttgacagtttcagtcattcactcaactcagatatatttgagtttatcaactagcgcctctgttcagcctgccatgggattttcttcaattcctgttggctccaggttttgacttattaaatacaacattgtgatttggccaccaggaacaatctgagattgatgactgatctaattcttaaatgtttgtgcaaagggttattttaggaaatatgaggattttcctgaacagctgtaaaattctaatacttccctaaattatttatatttcttaagaaaaaagagcaccattcactttatttttaactttggaattttaaaaaagagctgttttctcagcatccacaacgccaatttctataatccaataataaaaatagtttta

SEQ ID NO: 34231 - DNA, 1062 bp, Homo sapiens
tggttcaccgcacctggccaagtcttttttttaataggaaagattaacattactggtcaatgaaagtaaaatagagcaattgtacagtatataagtaaacaactttctcaaaatataacgtgcttttaggtaataatgcaatatatgcagtgatttggaataaaagttaattttctattacaggtcatcttcaattaatatttctcaaatgtaatattgatcatagataacattttattccagcatcattattatttaaatagagattattatggttttacagatgttccataagagatgaggtacattttgggaagtatattttgtaaagaaaggacactagaattggtattttgtaataggtgtttgtatgaatttgtgagagtaaaattctggagagagtatcatgatccacgtaatgtctagcattaaattcagctccatgtgaagggatatttcctgattttcacccttaatagtcctgcttattctagtgctgcagcatattctgatgtcagggccaaatttctgggtatatgacacaatggccctgaattatgtttgtgtgtccctccttggccatctgcccagctggatatcagctgggaacaatggaggcaggttcaggaataaccacaatctacaaccatctcaactcttcactgttactgtttttgtgccacaagctggagattagcattttagggaactggacattgtcaggccttagtattcctaagcgaaaggacacttctttgtgttttagatattctttctattaccttttctttgatgaatgttgggacattaacacaaactgttgtctatgtcatatagtcaccgtaattctatgtatggaatcaagccatcttgggtttctgtatctgagcaagctgataaggctcctgttctcccagtacacccaccccccatcctacatcaaatgtcataatcaaattattctgaagatggcaacagcaaatcttataactaccatatatattacgagagtattttagaggacattctcttttcacaactacattattaaatagccttatg

SEQ ID NO: 34232 - DNA, 1055 bp, Homo sapiens
cttaactcagactcaaaccctattgtcttctttgggaaacctttcctaatcctgaggatttagataatcacattctgtgcccccacagttccccaattgccactcatacataatacagtatgataattatctattgtaattgtctgctttccccactagattgtaagctccatgagagcagtgtcttcattaccttaatcaccagcaagcaacatagctcctggcacaaaatatacatataataaaaatttatttaatgaagtgaataaaaacctaaagatctttgactatctcttattaagtcattacatctggattttgttaagttacctgaaattgactgatatgatccctgtggaaaatttagaaatatggtctcaatataaggatacctaggtgagttagcagctaggtaattagtggaataccttcaccctggattatgttacctggttccgttttggcctcatcatagtcaattatttgtcaatgactgaaataaaactacacagagaaaaaatccacactgaggctctgtgatattcagatatgtagtgaatatgtgagacagaattaggatccgatctgatcttgaagggctaaatgagataggtctaacactgttgaagaataaattgcactttggtctagaagccacttgggtaagtataggatgaggaagaacatagcttagcagagcacatttgggaaaaatattacataataattatcagacaaatgaatagtgttttatatatatatatatatatatatatacacacatacttacaatttagtattttaagaaagacattcttaaaattaacacattcttaacataaaattagtaaaataagaactattttaatagtaaaactattttgctaattttatgttaagcgtattactttttagaactatttaaagcaaggtttacagagatttctgctctgtgctagtgcagaaatatttgcaggagagagaaataagaatagtagaagtaattaaaatcatatcatattaggaagagctgaaggaactgagatacttgaaaa

SEQ ID NO: 34233 - DNA, 1072 bp, Homo sapiens
ttttttccttctgaattctgctggaggtttatctgattgcatataacttcctcccaagtccagctgaaggattatctgattataacataactttttccatatatgaaaatgccagactaatcagttgtattttattgagtaattacttaaacctctcactcattaaggttaattctattaaggatgtaatttttaaatatctatatatatgtttttagtagttaaaatatactttattcctttgtgtcaaagttacctttttttagtgtacgtacatgaaactcaacaatttgttatggatactttcctcattaccttttttcttcaagttacattatttggaagcattggtgattaaatttcacaagtaagagtactgtattaggcattgtggaaggatgaaaaatgtccaagttttgttttctctttctagtaatttgattattgttattagtggatatgaaaaaaattaatggtgtgaataatactacacaacttcctgaactgaactgtcaacatgatacagaaggcatttcctcattcctgtatttaatagaagtgtattggatgctttttatactcagcctcagcaggtctctattctttatggggtttccagcctagtgtggcaccatagcaccacctagcaggctctcctaatagaaatggactatgaacatagatctagaaaaattaattatccataaggttttattgaagaatctttaattataaaccttgaaaaatgatatattgagaaaaatcactactatataacctaagagtttttacaggcatttgggtaacttgcaattcttatatggaattttaacctgacttgaggctaaattttaaatccttttcaaaccaggcttttaatagccctattgacagaactttaattataatgctgccagatgctataagagctgatctcttttatttatttgaatgctaatttttgccataatgcaaagaaaacaaatgaattaaagattatatatgtgagctattctaacaacattacaaaatataaacagttcttaatattaaaatatcatttatgaaactt

SEQ ID NO: 34234 - DNA, 1046 bp, Homo sapiens
cccgcccagtctcctcgtgggtctcagccccggaccacaaagacgtttcatttttcgggacagccaatcatatgagtcaattcaccttaggcaactcacggctcctgcgcgagcctccaatcgatctcgaagggcactcgtagagaaaactacacctcccaggaagccgtgtgcgtcgccccgccttctactgcctttcactgcgcgtgcgtcgtgctgtgggattcgcggacccctctggccgcgctgtggctgtttcaccgctccccggctgggacttggagtcccttatctttccctggtttggtacatgacccggaagcctcggctggccgttgcgtcatccatggcgccggcgcagagcgagaaggaggtgggaacgccgtgaagcaagagcggtcggcagagcggggaggcgaactgcagcagagttcttgctttccggcaggtgatggcgccccccgcggcctagaggtccagcgcccgccgcgagcagcggacagtcctcctgttgtgtccgaccgagagtcctggtgactttgaacatgctggtgccgctagccaagctgtcctgcctgggtgagaggaaacgggcggtggggataagtggaggagttagggcaaaagggacaaggccggtcctgggggctgtaggcacctctcgccccttctctcatcagctttctcaggctatctagggcaaaggtcacgcgctgtcagcctgttgggggaccctggcttcctccctctggggttgccccagttggtagaattaatatctaggctaaaggtcaagggcggggaaaacttgtcaacacgccctcggcatcaccaccacctgtcaacacacacacacctcggtggactcctgaactgaggcttcccaaatcctggttctaatcttcaaacctctgttggaaatggaaaaaaaaaaatcgtatttgcccagtttttctccctggtcctgacctgactttcgtcttcggagccattctagttcagtctaaagaaattgaagtctgatctgtcacatcatggttaacatt

SEQ ID NO: 34235 - DNA, 1024 bp, Homo sapiens
tggcaggaagttggcgtttaataaatacctgttgaatgaatgaatgaattcaagagttttgaacactgatgatccttaaagagtctctagtattccagaatctgatctcttgaaatatttcttgatgtttctagcatgcgttgtgacattttagaaaatgaatcttgttacagacaactcaaagaaatttcctcctttttgtcaatattagtgaattattttcctggtatcaaaatgatagggtaaaagtgctctaacagttgattgacctgcacccccacctccctaaaaaaacctttaagaagacacttgcctaagtaatatatcagagatccagttatgaaatcccacagctgtcagaaatgacctactgaaaaatgatttaaatatttatgaagctatgaaattgttagctgtgggttgatgatgtagaactcttctctatatacttttcagattcatttgaattcttgtatggcttggtaaaactgaaatacattatggaatgaaatgagcaaattggttctctcaaatttaagataatagtacacttaattgtgaaaacaatattgatattctgaaccctgcgaagactatatttgcatgttaaatgaagtaagcactttagaaaaaagatggaatcatctctgctttccatgtatgatttttccatttgagaaactaatttagaaatggatttgcgaatctgacatgttctttaaaaagaatgtgccagactaacatatcattaatggtggcctaccctgtgtgaggaggtgagccatgagtaaacattttctccaagcatatcaggcaatgactgtttgctttagaatggtacattgagtaagttagttgctagggcagaagggggcggccggaactactggccctgccctacccagagggcagagatggacccctggtagccacttggtgctgagtgcacaggctccacggaagaccatgtggacgctggtaactggccctgcagtggggttgccatatattgcttagtgccatg

SEQ ID NO: 34236 - DNA, 1023 bp, Homo sapiens
caggaaggaagtgtttggttaaacacagtttagctgggtggattccacagtgttttaaagtggagttctgccaggtggctaatcattacagtagttgttgggcttgttaggtaggtgaagggagggagggggaaaccaagaaatctctcaggtgattcactgtaggctttccaggttagatttgtaacagaaatttaggtgagccagcacttgaccctttggtggacaggagatggtttacctcttagtttcttgaattatttcccatttctctgaaggcctcacatggatggtctagttgagcagctatcactggggctgctcatagtggtggcaggtggaggggaaaagaaacacaagttttcaaaaggaactggaatcttcagtgtaccagagcactgataatgctggaatctggaaacataggctttcttagaagcattcatctaaccaaaaaggcatcttaggttcaggaggtttgtagcttgcccaaggctacaaaagaatccagtcagtgctctattcactacaccaggtggtttctccaattatagactgttcagcattgtactccagccaaagggtctagcagtctgaagcagtggcacctcgtgtcacttaggccctctgaggggctgtgtttctggcttaagtgagattgagtaacagctttatctttagcgtgttgagggagtgctgggtgctcaggaataatcaagtgccactttgaatgccatcattgctggagtgacagttgtggtccagcacattttgtgttttccttacgttcttttcccattttcagtccccaccgccccagcctcccttggcaagcacaaaacgtcatgagtttgtatcaagcacatgactgcaggcatttgcattagaccaccagtgtgactgtcacattggagattagataagctgcaattgcattcatgtttttttccaagcaaaagctacacaaggaaaaaaaaaaggcaaagaagactcagaatagaaataacttatcatagagggtgc

SEQ ID NO: 34237 - DNA, 1025 bp, Homo sapiens
cagcatatctaccttctagcacaataagtatacagcttaggtcaatctgaagcattcctagaagtctgtaatacttcagagtgttttccacagttcatgccagaacatgagtttttctaagtaactctacaataatactgtgtatgggtgtatatggaaagaaatggaggaagaaatatttgaaaatgagtataaatgttttctatctgccaagagagtgggttataaacagagaaacattttttgaatttatgaaatggttttcaagtatttctcttccctaagtcgcctacagttactaccaaaactgattataaagcattttgaaatacattgctatttaaatactactactaatgaggaaaatggctaaaaaaaattacctgagaatgtttattcattgcatcaactgcacgaatcatttattattcagagttttttttttaagagttgaacatcactcagaaaagtttgtatgcttacaattgaatacaggcagatttttatgagatggttacttggttctcttttcttctcatcatctttttatatatttaattttgccttctagttaatctctattaaaagcttatgccaatcatcagtagcagtagcctactttgaaatttaaaaattactgcagtcattttaaaaactttatctctgaagagcccaataacatggttttcttgttcctttatcttagcacacagcacaccagttgatatgccaagcagaggacagaatgaagacagggacagtggcattgctcgatcaggtacttgtactctgtttattggtttaactaacagagtgaactatctacagtggtgtggaaggtgggaaagtagaagacaggtagataaccctcatcctgttctttgttttttccttcctaagatagtctgacatatctaaagatctgaaactttaatgtacagtatccatgagtgattgtgcaacataaactagttttttctaacactcaaatttatatgagactaatgtttgttaagaaatttctt

SEQ ID NO: 34238 - DNA, 1061 bp, Homo sapiens
cactactgcactccagcctgggtgacaaagtgagactctgtctcaaaaaaaaaaaaaaaaaaaaacccaagaggaatgttaaattgaattccagggcatagtgtgcaggtatgtatttctgtgacaaatccaaacatagttttctagatcttagagttctttaaattctgaaaacttagagattgactgataagccagatcataatatgtttacactgcccagtctctaatggggttgagtttcctttggaaagatgatcagaaatctccagtcaccagaactttagcttcaactctctgaccctgtgcaagttcaggcctgatcagggatggccagcagtggccccggtggcccttgaattgtaactaaaagtagttgatgatatttttatctctttccagcattcatttcttttcttgaatatttagacttccctctagtttgttcttcctttaaaaggtgtttattctttagtaaataagtaagtagctactaagtgatatagttagatggaggcaattggattgattcagggaattgtgtgttatgtatttagtagcctgagaatatgtaattcttggagttttttctcttttgaaaaggttctgctggttcttttctgttcctggggcctgcatgcataaaagtcagcaatccatgctgtaaggaacacaagatgctcatcgactcttgtcatttgcttgtgcttaatctgtctcattttcattcagcaagtaacatttttcaaatgccagctcctgtgctagaggctaaggatgcagagagaagattcagccccactttcaaggaatggactcccgcaaattcttgtcagtttgtctcaatctgtgtactcattgttctttcgtctttactcaggtctctacctcagattctgcctctttgctccagtgatttaaaaatgacttgtgagcctataatcccaacattttcagaggtcaaggcaggcagatcacttgaggccaggagttagagacaagcctggccaacacagcaaaaccctgtctctaacaaaagtacaaaaattaggtgggtgtga

SEQ ID NO: 34239 - DNA, 1044 bp, Homo sapiens
taaatacaccaatcagcaccctgtgtctagctcagggtttgtgaatgcaccaatcgacactctgtatctagctactctggtggggccttggagaacctttgtgtccacactctgtatctagctaatctggtggggaggtggagaacctttatgtctagctcagggattgtaaacgcaccaatcagcgccctgtcaaaacagaccactcagctctaccaagcagcaggatgtgggtggggccagataagaaaataaatgcaggctgccagagccagcagtggcaacccgctcgggtacccttccacacagtggaagctttgttcttttgctttttgcaataaatcttgctactgctcagtctttgggtccacgctgcttttatgagctgtaacaccgctaaggtctgcggcttcactcctgaagccagcgagaccacgagcccaccgggaggaacaaacaacaccagacgtgctgctttaagagctgttaacagtcaccgcgaagggctgcagcttcactcctgagccagcgagaccacgatcccaccggaaggaagaaactctgaacgcatcagaacatcagaaggaacaaactccagacgcgccaccttaagagctgtaacactcactgcgagcgtccgagcgtccgtggcttcattcttgaagtcagtgagacaaagaacccaccaattccggacacagtatgatcttggctaactgcagcctcaacttcctgggctcaagtgatcctcccacctcaacctcctgagtagttaggactacaggtgcatgtcatcatgcgtggttacttaaaaaaattctttttgtagagatggggccttgctctattgcccaggctggtcccacgctcctggccccaagcagtcttcctgccttggcctctcaaagtgttgggattacaggcataagccaacatacccagcacaatctctggcatttgattggattgtttagtccatttacatttaatgtggtcatagtcattgatttggtaggatttatgtctgttattttgctatttgtt

SEQ ID NO: 34240 - DNA, 1104 bp, Homo sapiens
tacaagtcctttatcagatatgtaccttgcaaatattttcttctaatctgtgcttgtagtttcattttttaaagtgtcttgtgaagagcagaagtttttaattttgataaagtttactttattaatttattctttaatggatcataccataggtgttacacctaaaaattattttgttaaaaaaattattttttgtagagatgggatctcattatgttgcccaggttggtctcaactcctggcctcaagcatgagctactgtgcccagcctaaataatctttgtctaatctaagatcacaaagtttttctcctatgttttcttttagaagttttatagttttaggtttatacatataggtccatgacccatttcaagtccatttttgtatataagaagagatatgaagttcaattgtttttgtatatggatatccagttattttggcaccatttgtaaaagactatcacttttcactaaattgcttttgcatctttgttttaatgatacatatcactgcacacacacacacacacacacacacacacgcagtgttgttaactgggtccctatgtgaaatgtatttcttactgtggactgcagtcagaaaagtttgaaaggcagtgctatgatggctacctgaattacttttttctctctctctggtctcctaatcattcttgtctatcacttccatatattcagtccttcctgcttcttcaatttccactgttcctctaaaacgtcattttctatgaaagcacatttatgatcacctcaggaaagcattgtttttgctattcctttcattttttcctcccctctctgctatacagggaaatgataaaacattttatatctccctgccaagtttataccactctctgtgtaattcgccctgtgacctttcattcagtgtttcttgtggttcgcaattggtttacagcacatcatttcctttttcatttgttttgctttattgggagacagcatgatgtgtagaaaagagaatgggccatactccagctgaaccctatttcataataggctcataaccttcttcaaaataccatctctcaggctcagtttctttatctgaaaaata

SEQ ID NO: 34241 - DNA, 1058 bp, Homo sapiens
aaaaagttgaatagctaagttagtgcttttagtttaaattgcagacatagctgcagagcaggcatgttccagtacaccctcgggaagggcaccctgcggattcttttggtgttgcacaaccttgtcaaaattagataagtttgttaacctttatacatttgtttacctgcaggcttactcttctcttacttatagcggctgatagggttggatttggttgtctcaagttttactggagagggggaaattttataaaaatgtggtagcttaattttctccgcctttagttgctgactggataatgacgcatattcctaagcgttgggatggtgactataggagatcctgcctgccaaccctcttaagacaaataagccctcctgatccttgggaccatcagacatttaggatctaatgcttgaaagtgttgcttcgcttgttagatgttggatgccatctgttcaaatccaaatgctctccttctctgatgttgattattatttactgtggggagagcataataaaatagactcttcccctggctgcctttggacaagccccaagagtggcacctggtaccgtttttgatttttcattttccttgatggagctgtcacatctgggagatcatggatagattgcacatatttatcaaacgtgtggaagatggctgtaattttacaagaaaatttatctgtctccagaaagttcccattctaaaagactatttttatcccaacaaggaatgtcctgcattgatcttgttcttctcttggtgttgcacacgctgcctttcctatgcctttctcatctatttgttttaaaatggtcagttggatcagtcttctgcatctgaaaatgcacattccctgtctcagtgtgaaggaaaagcagatttcagtgagatatttcatttcctttcaagaatattgttttaagtgccaagtgaaattacgcatgctgagaatattagaacctagcaaggctggtcagaaaatgatgtcagaggcctttggtggaaattagagaagggggaagtggtgcatttggttgattag

SEQ ID NO: 34242 - DNA, 1018 bp, Homo sapiens
ggtaggggaacatgtaagatgttatcagatgtttctctagtgggaccagtactgagcattattttattgttccacacctgaattgactctgtatttaggagagtagaaattcctggaatttagtttgagcagtattacagaagacgtggtaattcttaagtgtgactttggtctttctcaaggaataaaacagcacttttgtctattggcagacctctgccatttaattagtaaatgcatcccttatgcctcacaatgcactctttttttttttttaaacatttatttttaatataacacttatagctataaaatttcctctcggtactattttaattacatctcacaaattttgatatgttttagttagtgttgagttctaaatatttgcttatttctattataacttttactttgattcataggttatcaaaaacttattgccaagtttccaaatatttgaagatttttctagatatatgagctacttattcccttataaaagttactgtaaaacttaggcttaaaacactgtgtacttgttatgtctcaatttctgtaggtcagggaactaaggatggcttagcagattccagtgcttcaggttcttttacaaatctgtaatcatcctctggctggggctacagttttatatgaaggcttgattgaggaaggatccacttccaagctggctgttggcaggactcagtttctcaatagaaatgaaaaatcttttgaaagtgtcattctacttaacatcccacagcacttgaaattgttttatatattttactgctgcgtgttgttaacttctgaatatattgttactaattttctttgaacaatttttataacacaactaaaaaaagaaaagaatctctgtttaatccctatgtgttatatctactttctgaattcttttctataaattatgatttgtatgtaattttttttttagcctgaggaactttttttttgcatttaaaaaaaattatactttaagttctagggtacatgt

SEQ ID NO: 34243 - DNA, 1034 bp, Homo sapiens
attttatagtatgtgaatcatcagtaaataaagctgttaacactttgaaaaggagaggattattttacaaatttcttaaaatagatctgttgtagattttgactaaggtttaagagaggagtaaatatccctcatattcttgatgtcagaaactatgtgtaatcctagactcctagatattagagtcttaaaatactaaatcctttctggcttgtcacaaatgaatataaacaggactttgaatttttacttcttctgaactttcataaataactttgagtctttttttttctatttactgcaatgtgatctggtaaaacaaggcacgttttcttttttaaaagaaaatatttaaacttaagtatttctatataagaaaatatttctatataagatgtaattttggtaagaattgaaaaaaattgaatttatatccatttttaagtgtagccaggaaataacaagcattcattttatattgactaagaaaataatttgatttaactatggtattgacaaatatactgtgaaattaaaactttgtacttgctattttgatgtaaaaggcagaaacaggtgataaagaacgatttatgaggaatttatttttataagttaatcattttattttatattttagtaggtttagtgcatatcccagaagcagttgtaatggatgacatttgtacaactgagcttttaataatgtttatttttactgtcttaagaaaacatgtatttttaaaaaagctatccatagtttaatttggtttgtagatacagtgtgacttattttagaaaccccttttcctgacaggtctaataatttctattcttttctttgaaacaggatctggaaatagtatattcctatttacatggtatggaagccttatcaaacttgagggagcatcaacttaggtatgtcattttaatattcagttaatcatagaatggtaaaaatttgaagcatgtaacaatttaacattttaattttttacttttattcttacttgacataataattgtacata

SEQ ID NO: 34244 - DNA, 1031 bp, Homo sapiens
aaaatatacaaatttttaaactgtaataaatccagtaacagaaatgatgtaatgtatttgtgaaaaagattaaaattattgtgtatctggaaagccatctgtctattggaaggtggccattgttagaacttatttttttgaagccgtggaacactttgttcatagaaaatcctgttcagcccaacaatagtagctattatggttgaaagaggtttggacgccttgaaatcccaagggctcttgacattgaaaacctctgatctcaactgtctgcgggacgcctataaaaggatagaggataatttgttgtaaataagtaattttcactgtggttttttggcataatcgtatatttgagagcacaagtctaagctggccagaagtctgtaataacagcagtgtaggtgagcaaaaatgggaccctgaactgtagcaaagggtttcgatagagacttgggaggggaacccgcagaatgtgatgataggctgtgaagagggagaagcttcggaagttgtccctttatcttttggttggagggtgttggtgagaccgcagatacaggaaaataaaggtgtttttctattttttggtcatgggtggctggccctctggagttccttgtggtccccatgtagttattggaacctttgttagtcttcattttatttcactttcttgttttataggcatgtgatcaatagccctcgatgatgattcctgtctccttttctccagatgccaacagctttgtcttttgaatgtgatactgtgcggtattacatcctggatagtataaagtgacctttctaaaatagcaccaaaattggtatttgatgctatatgtggttctcagttgtgccgaacctgtctcagatagctgtgtcgtgtgctcggctcagccactgtttctggacattttgcctattctttctcacaaagcaatcgccatctttttgcttctctgttttaatgaccttgttaatgctgtccatgtgaagcatttagaggagcttcctcactcccctgggcc

SEQ ID NO: 34245 - DNA, 1028 bp, Homo sapiens
aagatagcttagataaagggggacgaacttaaagagtatagcaggcagtctcataaacatctaaagagaggcaaagaaagttcattaagaccacatgggactagaaatggaaagccagggactttcattgacattttttgcttctcaagaccatatggcctttcatttttgcatttgtctgtggattggctacctgctctgtaaggctgttaattcctttctccctgtgtctttggcttgtatgtgctgactactcacttatggccttatgtccctaatgtttacattgttttgactgcagtgctggtattgtctttagattcctcaggatacaatctgactggcctgggttggggcggatgtattcctctgttccaaccagctgtggccagaaagggttagggctcatctgttacatacatgattgcctagattcaggttccccaagggtgtcagctactgagtttcagtagttacgtttctgtgtgcttttcgcaagtaaataatttttactaaaggttttaaaattttaagtatttttattttaaattactaaataaatattttatttgaatcgactaaagtacagggattgcccctttctgtcacttagctcttctataaaaatattgtaatgtcttgttgataaatattctgactgggtcagggtcatattaagaatctatttgaaagatgtgaacagatttttataaaaggtcagagtctgaaacaaggagaggtaattttgcactgtagagaaagatcagcctgggtgtggtagctgacgtgagtagaatgggcttttggtggccagaatgctagtgaaggagtgccagaggcacgttgcatttaattaaaaataatcttgggtgcgattctcatgcctctttgcccttctacttctttgaggtcaaattggcaaacatagtctctttggaaaatggtcacatgagggagggacactctattgcctgcttgtttctgtagtagcaatagtcttagaaatgatgctagcattggtggtggtg

SEQ ID NO: 34246 - DNA, 1024 bp, Homo sapiens
cctcccaaagtgctgggattacaggcatgaactaccacgcctgaccccatttaagtgaacttctaaaatcccttatgtataggaaattttgtgtttgaaagcatcattgtggctgaaacagatttttttcattgattatctatgtcagaacataaagtaattttagtctttcaaatatagtagagaagagctgcttgattaccactcaagcccaagaagcatgaattttaatttttctaagaacgtgcttgtgggacagtatatagaaaagactttagagtctttgtgttaggcaataaagatggtttgaagatgacatggggcaagactttcaaagtaattgcccaaggtagagattttcaaaccaggcagttattagatttgcctggcttaggatgggcaaagtactgagtcccacgccctagagattttggtttgccacatctgagttggaccttagactctcttgttttaaaagcataccagcaggtggttaatcagattcgaacagagaggctgtaggtgaatgactttaaaatcgatgtgtaactgttttaaaggtagagcaatagaagaagagaatccctggaagatctggtaaagttgaaaccagagacaggaaccttatcttaatggtctctgtgtgccaaagctaagggcctgactagtatttccatggaaaaagaagttgatggagcataatttaaaagggctaattggtggaatttagtgactgaaggttcagacaagggaagaaaaaaagtaaaagatggcttcagatctttgaatttggatgtctacagagcagttactttgacagctataaccaaatctggagggaatgaggtaggtgggtatcagagttgaaatgaagatacttgattttaggcatgtttaattaatgcattaacaaataggtgggagctacaggggatataaagagataacctgggtcacctgagaaaggttgtagatacagggtagggtaggtggagagttgggtaaatagaaagaataccagagg

SEQ ID NO: 34247 - DNA, 1050 bp, Homo sapiens
gtaaacaattctaggtctcttttcagagaagatgtagggtttttccctatgatgtaggagaggaattctgtcagaaatgagaacttcctcatcaaagctagcgaactttttgtaaaatttactaaaatatttggtaaagttttacaaaacgtactcaagtgagaaagtagcatagtaatggtaaggatttaggattgggaagaatgtaggcagatatatagcactttccaacagtagatagtcttagatatttccttgagattttgccctctgttaatgctacttttagatttctctggaggatttttagtctttaaaactgagtattttatacttgctgatactacacaaactactaggtttgctggtgtgagaacagttttgtaacctagacatgcctccattatgagaagtcacatgaggaataacctaatgtaacttttattccctgttcattcatcagcatttctactttttttttttttttttttggagacggagtcttgtcgtgttgtctagcttgaagtgcagtggcgcgatctcagctcactgcaacctccacctcctgggttcaagcaattctcctgcctcagcctcccgggtagctgggattacaggcacgtgccaccacacccagctacttttttgtatctttagcagagatggggtttcaccatgttggccaggctggtcttgaactcctgacctcgtgatccacccgcctcggcctcccaaagtgctgggattacaggcgtgagcaactgtgcctggcctaaaatttttttaaatgaggaattacttttaaacaacactatttataaaaaaagaaaccgaagtcatggaatgaaagtagaaggagaaacccttgcgtaacctaccaaagccattctgttagcactgtttttgagtcattcaggatttggaagtttttacagatttccatcagggtttttttttttttttttttcttttttctacgttgcttaagacagtgtggcagttgctttcataatgtgtggtaatgtatcctgtgagatctttcactaataa

SEQ ID NO: 34248 - DNA, 1030 bp, Homo sapiens
tttggggggttttatttcaggtggactatatggatgaaaatgaagaatattttcagcggcaagcttcccatagacagtctcgaaggagatttagaaaaatcaaccagaaaggtgaaagacaaacaattattgacactgtggatccttatcccatgggcaaacctcctttgcctagaggctatcacacggtaagttatacaagtataatatttttatttatttctagttttttgttggggttttgtgaaaagatgtttaagttttccatttttgacaaatcttttcaattatatatatatacacacacattaagtatacttaaatatttatttttatttgttatattaataaatataaaaataaatatataatatgtatatattatttaaacatttattatagaaagagtagatttttctgggaaacatgatatgattagtttttaaaagacattgaaataacatgtcaacagactttgctagctcctttatttcttaagttgttctctgaagatcagctttgtgataagcacatgtaattgtaattggaatattttaagttgttttaccttaatctaacattttagcgccctcctgtgcactccacccttcactcccaacccaaatgactgctgtcatccctgttttttattttaaaagtagatatgtaaaaattacattatttttcatagctttttatacctttatgagaatatctctgagatttattttttaatgcagtgaaggaggaataatttgaaataatgctttttaaaatctcaatgtaaagatgcttagaaatatttctaataggttcaaagatcctcttaaaggcaggcagacataacccagttcattgtcatttatttcataaatattgataaataaactgctttttatgtttgaggaaaccaagacatagataatgagtgctttgttcaagatctcaataaagtcactttaaagccttttttttcttattcctttgttttttcaagagcaaagtcgcttagattcctggatatgtcata

SEQ ID NO: 34249 - DNA, 1045 bp, Homo sapiens
gcacttaaaaaaatgaatggaacactgtccttcactaacctgctttgcaaataaaaaaatgaagagagaaaggcaggcagacataaaggattttttttcctttttatgtgaaagcttatgggaaattcattagaaatttacattttaaatactacagatgaaaactttaaagttcaggaatctcaatgggagaacattttgggaggccactggtaaaatttcagtcagatttttttttaaaaggttggtcaaaaaggaaacaaagtttaaaatctcttgtattttcttatttgcactttatttttaacaaggtttcttgcttttatttcattctacattttaattgaggtctgtaataatctccttgctcacttctttgatgccagtacatgactaagtactatactaagtactaaagtacattactaaagtactgtactaagtactaaaatctatgattttcattatgagttctttgaagatctagattacatttggggttatccgggaattttgagtcaaggaagaaaaactgatttatccttgaaaactaattggttaagtaactagtagcattttatgcttgtgttttattgttgtacagggaaaagatcatgaataatttattcacattggggaaatctatcattgatatatctttggctattagagtaactttgcctaaaagtatgaattttatgtataatttttcgaattaaaatgagacagttcctttatgttctatacaagagagtacgtattagaatgccacaggtgtcatgattgctatattggtttttggaagcactactaatttttaaatgatgtggtaaatctaaaacatttttatgtaattttaaaattttaagttcactaaaataattttaaaattgtacagagttttatgtacctcagtgttttgagcttttctctgaaaagagtacacttaaaatatatataacatgatattttaaaagataaatcaatatgtaattgatcttcgtctttttttagcataaattaccagtctaattccaacttagaa

SEQ ID NO: 34250 - DNA, 1028 bp, Homo sapiens
gtgtattttatttcttgtatcatagaaaagctcaatattttcatttatatatttttggtcatttaacaaatattcattgagtgcccaccatgtttcaggtctgtcccaggctctagagatataaaagtcaacaacacaggagaatctgcctcctttgcccttacaatctcacagggaatacagataaataaatggtacacacccagggcccctacaggagtcggggatggtttcatgaaccacctgaatatcttggctcaaagaaagatattttgtacagaaagaatcttatttgttcaaagacttagaggttgagtggttatagggtttttgaaagccatgttgaaagttgaactttttcatgactgtaaggaacaacaaagagactgaagcagaggtgtgacatactgagatttacatttaaataaactactctggctccaagatggaataaattttggggatagggatggtaaagtgggaccacaagacctggttaagtaatggaaatggaagtggtggctagaacatggcaactggagtaagaatgaaaggtgagggatttaggtggtattcagggagaagaaagtagaaataatttgtttctttttttttttttttttttttttttgaggcagaatttcactcttgttgcacaggctggagtgcaatggtgcaatctggctcaccgcaacttctgcctcctgggttccagcgattctcctgcctcagcctcccgagtagctgggattacaggtgtgcaccaccaggcctggctaattttgtatttttagtagagacaaggtttctccatatccgtcaggctggtcgcgaactcccaacctcaattgatccacccgccttggcctcctaaagtgctgggattacaggcgtgagccactgcgcccggccgaaataatttatgtttcaaaataaaactttaaatagctctaattcattaatttctgatgatttgctttgtgggcagtactttctattccaatagtgtttaatgaccatattgtata

SEQ ID NO: 34251 - DNA, 1050 bp, Homo sapiens
gtctgttcatgtcctttgcccactttttaatggagttgtctgtttttttcttgtaaattttttttgtttctcgtagactctggatattagacctttgtcaggtggatagattgtaaaaattctctcccattctgtaggttgtctattcactctgatgatagtctcttttgctgtgcagaggctctttagtttaattagatcccattttgtcaatttttgattttgttgcaatgctttcggtgtttttgttttgttttgttttgttttttgtgaaacctttgctcatgcctgtgtcctgaatggcattgtctagattttcttctaggattgttaatagttttgggttttacatttgtattagtcagtttcacactgctgataaaggcatacctgacactgggcaatttacaaaagaaagatatttaattggactcacagtgccacctggctggggaaacctcacaatcatggcagaaggcagggaggagcaagtcacatcttacgtggatagcagcaggcaaagagagggcttgtgcagagaaattcccgtctttaaaaccatcaaatctcatgagacccattcactatcatgagaacagcacaggaaagacccgccccatgatttaatcgtctcctaccaagtccctctcacaacacttgggaattacgggagctgtaaaatgagatttggttggggatgcagagccaaatcatatcaacatttaagtctttaatctatcttgagttaatttttgtaaaaggtgtaagaaaggagcaatttcagttttctgcatgtggctagccagttctcccagcaccatttattaaataggaaatgttttcctcattgcttatgtcaggtttgttgaagatgagatggttgtagatgtgcagtcttatttctgagttctctattctgtgtcattggtctgtgtgtctgtttttgtaacagtaccatgctgttttggttactgtagacttgtataatttgaagtcagggtagcatgatgcctccagctttgttctttttgcttagtattgtcttggcta

SEQ ID NO: 34252 - DNA, 1115 bp, Homo sapiens
ttatatattttatttgaatatggtttgcttataagcttttttgaaaaatattttaaaaataaaacgaatgtctaaatatatctacatagagatataaccatgtgagcatgtataaaaatatatacgtgtgcgtgtataagtgtgtttgtaatttaaatgaaagtttgtaaatgtgtccttaaggtctctatttaaatttccttgttctgagatctttgttctctctgacctactttttcttcatccttaacgagtggtctttatctttatagacatgacacatgcttgtgatatttccatatagtattaagatgccagtgctattagtattgtcttaggtattacacagaatgggctaaatggaacagtgtctgatttttggaacataaattaagaaactaatagaaaaaatatattagggaatgtagatataaatttgctactttaaagctactttaaagacatgatataacagagcacactttaaaaatgcaacaaattgcatcatacaagaagttcccttaagctcaccaatggtccctgccactcactgtctttcctattggtgcagaaacacccatgtcataaagaattaatcacttgtcactctctgccatttcttcttcttaactgaacccctaacataggccttatatgtagttatgtttttctctgtctctcgtgtgtgtgtgtgtgtgtgtgtgtgtgtgtgtgtgtgtgtgtatgatatatgagaatcttataattgcacagtctgtgatacatcatatctttataacttatcaatcatccactgtctatatttcttttgtactctgaagtcactatataaatatgccccatatgcttcagatctcttcattctacatcaatagaccaaattctcttttacaacttacactggatattcatcataaaggctgttttcagagacatcttaggcatgagttagccttagatttattaacaaagtgacagcctgaaaaatttctttacaattatcaaagttacattcttctttaatgaactctagagaaatacattattggtttgtaatattgacttggtttgattattaaatgaaacataccctcctttcccctttatcgatacat

SEQ ID NO: 34253 - DNA, 1082 bp, Homo sapiens
tgcagtgtttggttttctgtccttgtgatagtttgctgagaatgatggtttccagcttcatccatgtccctacaaaggacatgaactcatcattttttatggctacatagtattccatggtgtatatgtgccacattttcttaatccagtctatcattgatggacatttgggttggttccaagtctttgctattgtgagtagtgccacaattaacatacgtgtgcatgtgtctttatagcagcatatgatttataatcctttgggtatatacccagtaatgggattgctggctcaaatggtatttctagttctggatccctgaggaatcgccacactgacttccacaatggttgaactagtttacagtcccaccaacagtgtaaaagtgttcctgtttctccacatcctctccagcacctgttgtttcctgactttttaatgattgccattctaactggcgtaagatggtatctcattgtggttttgatttgtgtttctctgatggccagtgatggtgagcattttttcacatatctgttggctgcataaatgtcttcttttgtgaagtgtctgttcatatcctttgcccgcttttttatggggttgtttgattttttcttgtaaatttgtttagttctttgtagattctggatattagccctttgtcagatggatagattgcaaaaattttctcccgttctgtaggttgcctgttcactctgatggtagtttcttttgctgtgcagaagctcgttagtttaattagatcccatttgtttaattagatcccatttgtcaatttttgcttttgttgccattgcttttggtgttttagtcatgaagtccttgccgatgcctatgtcctgaatggtattgcctaggttttcttctagggtttttatagttttaggtctaacatttaagtctttaatccatctccaattaatttttgtataaggtgtaaggaagggatccagtttcagttttctacatatggttagccagttttcccagtaccatctgttaaatagggaattctttctccatttcttgtttttgtcaggtttgtcaaagattagat

SEQ ID NO: 34254 - DNA, 1035 bp, Homo sapiens
tcgtcttaatatcacatcttaggtcatccctttctgtctagtcactgtttatcacatcggtttcttttcatctttgctggatgcagtacttatcacaacttgacagtttcttgtttattatttaattatttgtccccacccactagttgtaagatgcatgacagcatgggctttattttactcattgctgtatttagcaaactcagaatagtgtctggcctactggttttcaataaatgtcgtttgactagttaattgaagagtaaatgaactgtcgtgtttattttatccaaactgcacacagtcccatgaaataggatgttatcagtgtcctgcctacttcttcataaggaatttagaatttcactgtggaagaattttcagttataggtcgtaaaaatgatcctagtatttgtttaggataatgctagctattgtaccaaacaaaacaaaatataatggttcaaacacagtagactttcttttaagtctccttttcataaatctgatggtgttcttgatcaatggacaaattccttctagatagtggttcagggttgcagcccctctccattttttggctcagttgtgtttaaccttcaatgcaaagcttgcgttttcttccaacagagactctctttaatggaaagggaaagatcatggagggtctcatgtgtaaggttgttatgagtaagatatagaagtggcgtactcacttctaactgttcatactccagtggtttgaactcaattggcacttacgtaaccggaagggacgttgggaaatgtaatctagcgatgcacccagcaagagagcactggtgaatagctagccagtctcagccatgctactgtatgtagatctaagttcatttgcatttaggtgtaagatagctttataacttttaaagagttaaaaattaattatgggttaatgtttttaattctgtgtaaggcctccttcccaaacccaaccttttttgttcacaaagaaggcagcttagaatcctccatggatcccataggaatcttttt

SEQ ID NO: 34255 - DNA, 1100 bp, Homo sapiens
gccaggcacttctctaagtccttcacacccatttatttattcagtcctcacaacacaggctttcaataaatgatggatgaatgctgaatgaaaatatagtatcctttattttttacaaatacctcagagaaaaatagaaaatatgtctaggaatatacttactccaccttgtagagattaaaaacgtgaacataaagactcaaaaccctgacaatgatatggggaaagcagtgttcatttgggtaaattctgagtgatgcatcttaatatgaagttagttttagtcactaagtgtgatatttattttactttaagtagatttattcaaggtaagatgcctgggaaaattgactagattccagtgatcatcaccccaaaccttgtgcattctgttataactgttacttaaagtggttccaagattagtttgggaaattatcagttaaatacatttcagtcaatagacagtatttttttgtttttaactattggatttctcagcagtcctaagatgatgatgatatgtatcttggaccatgaaactctcttttacattaaaaaaaaaaaaaagacagagagaataagcctctgttgataataaaattccacaaaactcatccctaaaacttggggatctggtaccacagatgctgcgctatatcaataattagtaattcaggacggaaaggaagaagaagggcagccacccttgtttgtactgcactgtcaccaattttaggtattttaccaatttaactttttttttaacttattattacttatttacttatgagtatttacttattggtatcagagacttcaaggcatccatactcatctttatgttcaagatcgagttcatttattagctagtaattttataaatgccaaccattagattaatcagtgattatcaaattcctatttatatattatagagacttaaataatgtgtagaatttacttttacaaagctaattatggtagcatctgtttgtcctacataataaaaaaaaaagctattatacaaatgataccaaggttttatgaaactacaattagttttaggtttatgcttatataaagtattacttcctgtg

SEQ ID NO: 34256 - DNA, 1078 bp, Homo sapiens
ctgatgagcagggacattgtgagagactgcctagagaaggacccaattgaccggacagatgatgacattggtaagcttgaacaggaaaatgaatctacgagcaattaaaaagatttagtggcaaaattgtctgatgaaatagagcccaagactagtaggctttaaaaactcattaatttattaatttcctttgtataaacagtagtatttgttggacaaaaattggaaaaaatcaggtttactcagtcttaccttcaggagtctacaaataataatgtgaatgaaacttcttagtaaaccctttccacataaaccctttcttaagcttagtttatgacaaaaaaaaaaaaagttaaaatgagcctttcaagcagtattacttctattaattttctcgtgagcactgtttttattaagctcatgttttctgtatgtaaacataaaggcagttggtaaaattgtcacagtgatttgcttctactctggttttgtgtgaagacgcaagtgggtggaaggagacagcaaaatgtcaggttagtggcatataggctgtgtgatggttgagactttttttctgtctttcttttgctgtttttgtccttttttttttttaatttttattttatgttcaggagtacaagtgcaggtctgttacataggaaaacctgtgtcatgggggtttgttgtatagattatttcatcacccaggttttaagcctagtaccctgtagggaccagccccacagggtcggtgggtctctccccatgtgcagagacgagagagtgtagaaataaagacacaagacaaagagataaaagaaaaggcatttaggcccggggaccactaccaccaagttgcggaaaccggtagtggccccgaatgccaggctgcactggtatttattggatacaaaacaaaggggcaggataaggagtgtgagtcatctccaatgataggtaaggccacttgggtcacgtgtccactggacagggggcccttccctgcctagcagccgaggcagagagagagaggagacaaagagaaagacagctaatgccattatttctgcatatcaga

SEQ ID NO: 34257 - DNA, 1044 bp, Homo sapiens
cctgccttaaaagcagcatggggcttcttctccccttcttcctttcccctttgcatgtgaaatactgtgaagaaattgccctggcacttttcagactttgttgcttgaaatgcacagtgcagcaatcttcgagctcccactgttgctgcctgccacatcacacagtatcattccaaattccaagatcatcacaacaagatgattcactctggctgcacttctcaatgcctggaaggattttttttaatcttccttttagatttcaatccagtcctagcacttgatctcattgggataatgagaaaagctagccattgaactacttggggcctttaacccaccaaggaagacaaagaaaaacaatgaaatcctttgagtacagtgcttgtccacttgtttacaatgtcctccttttaaaaaaaaaaaatgagtttaaagattttgttcagagagtaaatatatatccatttaatgattacagtattattttaaaccttaagtagggttgccagcctggtttctgaaaaaccaaatatgccggacagggtgtggccacaccaagaagacgggaagacctggcttgtgaccctggcttcccatgtccttctggtctcacccgcgaagtgccctatcctggaagtatgaaatgttagccaattaataccaagacacctcatctgctccttccccagtggatggggttcttctgtaaaactgtttgcacatggccaggggagggaactaggacccttgtgtcctgtctgagccttatggaggcaggacggtgtcattggcggatgtgtcctgctccattgagatggatggcaaaccccatttttaagttatatttctttgatttttgttaatttagaggtgtaggttttgttttttgtttttttgtttttttttaagagaaacatttataactggatagcattgcagtgaaagcagcttgggatgttggagctaatgccagctgtttatactgctctttcaagacagcctccctttattgaattggcattagggaataaacaagccttt

SEQ ID NO: 34258 - DNA, 1064 bp, Homo sapiens
tttgcacagactccggaaaagtgaaggctgccaatctgagtagtactcaaatgtgaggaactgctggtcttggattttttttccattaaattcagctgatcatattgatcagtagataaacgtaaatagcttcaaattttaaaagtggaattgcagtgttttttcactgtatcaaacaatgtcagtgctttatttaataattctcttctgtatcatggcatttgtctacttgcttattacattgtcaattatgcatttgtaattttacatgtaatatgcattatttgccagttttattatataggctatggacctcatgtgcatatagaaagacagaaatctagctctaccacaagttgcacaaatgttatctaagcattaagtaattgtagaacataggactgctaatctcagttcgctctgtgatgtcaagtgcagaatgtacaattaactggtgatttcctcatacttttgatactacttgtacctgtatgtcttttagaaagacattggtggagtctgtatcccttttgtatttttaatacaataattgtacatattggttatatttttgttgaagatggtagaaatgtactatgtttatgcttctacatccagtttgtacaagctggaaaataaataaatataacataaagccttgcctatattcttaatgaatcatgcatgctttttattattaaattggaatagaagcctttcgtctcctgcagaagcaagtccttcggctggagagatttagcctcatggttattggaaactgcccaatagcctatttattttaggcagatctctgttgatccaaagcaattaatatcattaacgttagcaccagccaaaccatgttcagaattcagtgtttcttgaaaatgaagatgctgtcacaatatatttgcataacatttgtctcttctcaaccgtttccaacaataatctttatggtacgtaatattttggttcccagtatacatactgagagacaggacctcagagaaactgacattcaaggtcatgattattaagtggagagtacaatttagctagtg

SEQ ID NO: 34259 - DNA, 1082 bp, Homo sapiens
gccgcacctttgcatcttactgtctgtgtaagtacagttgaccctccctatctaagggttctgcatccttggatccaaccaaccacagatgaaaaatagtccgaaaaaaaaaagtatgtactgaacatgcagaattgtttcttgtcattattctttaaacaatacattgtaacaactatttccatagtattaggtattataagtaatccagaaatgattttaagtatacaagagggtatacataggttatatgcaaatactacaccatttttatatcagggatttgagcatccatgaattctggtatctgaaggaggtcctgggaccagtcctccacacatactggggggatgactgtaataaaacagtcttacaagggcctgtttctctactggccgaatccatcagcctttgcttgacatttcccattcgggattttggtacttaccattccctcttcctgcgttgccattcccctgagcttttgcaaggccaacaataactgattgttctctcttcctttaggtctgagcttaaaagtgttctctctatctaaagcatctctacccccacacccttgctactcttggttaatctctatcacagcacccagtttaggatcactggacacataatgacagtgattaatgatctaggaatgtttgctataatttctggtggtgagggagggtgttaagttcagatttccattttgggcagaggagttggctcatataattagcagactggtagaaagccctgtaggtccttagaagttggacatttggaaacagctttgttttttgctatcaccaaacctcttagattctaatatcttgcttttaatgtttattatccatgcaattatctgaatccactattatctctgaacagaaaaatgctgttatatgcttatttttctatatccaagacttattcttgagacagtcccgctttagattacattgtgatttctcttgaactctttttttaaagcaggtttgaaagtccacatagtttattttcattggtttccctctgtttgtgtatttatttatttgtaccatgtcatgagttagtca

SEQ ID NO: 34260 - DNA, 1034 bp, Homo sapiens
ttaatgtaggacatctttctttgacaggctactgtatctataatcaccgttaatctagctcactgcaatgtcattcacacatcagttttacatgaatatgcaaagaacacaataatcaactgtcaaacctaaacgattaattacttatcacagaatctgttgaatatttttgttttctaactgagcaagggaaatcctgtcagcttttaaaagtaagggctagattcttagtcataattactcatcatctgtcaagttgacacctcatatggatgaaataagccttacacatttgatttaataacaaaaataggtaattttattcccctattgtaagtacttcatagtaacaatttatttatttcacaactctgctataggcagattgattgttttatctttctatacttttggatttttaccctttagagatgtgaacttcatctgactttaaaatgaggacacttaatttaatgcttttaaaaatcataactaacttttgtgactttgaaataaaagaatgaattaaactgttttgaaatactcaacaactgttaaataaagcagaagcttagtctctaattttacggctgtgctatccaatatagttaattcaagttgaagtgtacttttaaattaccaactggattttgaaaacttggttcaagaaacagatgtaaactatcaatcaatcaatcaattttttatattgatgacatgttgaaataacatatagtgtttttaaaaaatcaaaattcattttaacaaacaaacatttatttttactttttaaaatagggctactgggaagttaaatatttgcatctgtggcctgcatttgtggctgttgtgtttctattggacagcactgtattagaggaaccagatgaaaataaatataagacctgataacagttctgtgggtatttaacagagctaattatatccgaacattttctgaaaatcttttgcgtgacttaaacaaacgtaattaattccaaatatcaatgtcttcaaatgtatattgcatctat

SEQ ID NO: 34261 - DNA, 1072 bp, Homo sapiens
taatataggtttaagctttagcacatgctattcctctgtttagagtgccgcgctctttacaataaacttctactaatctttcagaacccactccagggagaaaaaggtgcaatctgtcatgaggttggcaaacacagcattcgtgccctaattactaccaacactctttcctgctaatccctatgatagcttcatggttcctaacaccacaatctaggtcaacttctggagttggcatgagaaaaaatctttttgccatctggcccagaggaagaagatgccttttcacaatattgcaaattccctacatcgtagtccaggagaaaccctattaatgttaactaattaaatgctgttgtttggagtaaaatagagtaactctgaacttcttaataaaactaggagaaagactgacggtttcatgtctctccctacccaagtcgctatttaaaaaaattaattagtgtatcatggagttaaactctttgaaggaacagattcaattatcaatatatttacttaagagaagatgctaaaagatgttagaaaacaaatcgtcaagaaaacagacctttgattttagaaactttagagtacgaaaatggactataccaggcatttatcattaatcagtgtctgttagtcgtatacaaatgtttccatggtccctttctcctatagacttctttgatcttaaggataggaattttaaaaatagaagtatgctacttggatttgatttatttatacaaatgcatttgcaacgaacacgtgttcgataatagcactgttgttatctagtggtaatagtggtactgtatcatgtattccaatactctccagaaacattttcattttaggataaaaaatacagaaataattacatacaattatgagatgaattgctttatacttatttataaatttcccaagtaacttatagacaaatataatactttaaagtagtaataataatttttgaccattagtgcaacttttaaaaaatgttgttctactttgacagcactagttcctcatctaaagatttcacagtatcgttcataacgaaaca

SEQ ID NO: 34262 - DNA, 1046 bp, Homo sapiens
agtttcacagtcaggcacagcttccctagctgcatgatagaatcatctaagggtgactaagtataaacctctggggataaagcccagctttgcagcattaggaacataccacaggtaatctaccatgcagtaaatgtggagaagccctggggagggtaaatgcaggatgctatgggactacgtggtagggcagtgactctccatccttagccagcatcagaatcacctgtaggcttcttcagtacaaactgctggcctccaccatcagggtttcataggtctagggaagcaggaggttaaaaatatgcatttctagtgaacgcccaggtgatactgatgttgttggtcccaggaccatactttgagaatcactgtgctaggaataacgatcctacttcagggagctgtaatgagtttcccagaggaagtgatgtttaaggtaaactgcaaaggctgagttgggatgagggaggtgtgtgagaatatatgagtgtttgagtgtgtgtggtggtggtggacaagagaagctggaaggaaatgttttacagagagaggaaagctgagcaagggcctggatatagatttgaggagctgaatgaatgttcggcctagctggcttcaactaggtcacgggggcagcatagtcccactgaggaatttcggttaccttttaatggttaagtgggaataggatgtgattagatttgtgtttttgtaaatctgctgggattacattactgagcatgggttgggttgaagttggcaaaactggagaaagtctagtcaagaagcttctgcagttttcaagttaaaaatatgatagtttccacatggatggtagccatagggaaggaaagaaatggacagattccagaggcattcgagacagagtgaataggatttggtgattgatttaaggtagaagaggaaggagatcagagtgaaagctgtgtatctgggtttggctactagatgttagtggtgccgttcccacaggtgttagagtgagaagtggtaggggattatgcattgcgacacgctgagac

SEQ ID NO: 34263 - DNA, 1047 bp, Homo sapiens
cacagaaaccgtccctgctacagagcaggagttgccgcagccgcaggctgagacagggtctggaacagaatctgacagtgatgaatcagtaccagagcctgaagaacaggattccacccagacgtccacacaagaagcccagctggtggcagcagctgaaattgatgaagagccagtcagtaaagcaaaacagatttggagtgaaaagaaggcacagaaggctatgtccaaactgggtcttcgacaggttacaggagtcactagagtcgctatccggaaatctaagaatatcctttttgtcatcacaaaaccaaatgtctgcaagagccctgctttggatacctacatagtttctggggaagccaagatcgaagatttatctgagcaagcacaactagcagctgctgagaaattcaatgttcaaggtgaagctgtctcaaacattcaagaaaacacacaaactccaactgtacaaaaggagagtgaagaagaagaggtcgatgaaacaggtgtagaagttaaggacatagaattggtcatgtcacaagcaaatgtgtggagagcaaaggcagtccatgccctgaagaacaacagtaatgatattgtaagtgccattatggaattaacaatgtaaccatctgaaagcaacttttcttggtgtctcaaaggagtaactgcagcttggtttgaaatttgtactgtttctatcataaataaagttatggcttcttgttggaaaaaaaaaacctagatgatgggttgataggtgtaggaaaccaccatagcacgtgtacacctatgtaacaaacctgcatattttgcacttgtaacccggaacttaaagtaaaataaaattaaagaaaagaaagaaagaaagttatcagaagtgttttgatggtgacacaaaagggtatacaggatgctatgggaggatggagaagtgatagaagagtcaacaactttggatgaattacccattctaggactcactttcttctgctttgtataggaggcaattatcactacttctcagttctaatgcatagg

SEQ ID NO: 34264 - DNA, 1014 bp, Homo sapiens
acatggtaaaaccaggtctctactaaaaataccaaaaaaaaaaaagagccaggcatggtggcatgtgcttgtagtcccagctatttgggaggctgaggcaggcgaataacattaactcaggaggcagaggttgcaatgagctgagatcacaccactgcactgtagcctgggcaacagagagactccatctcaacaataacaacaacaaaaaagaagtcctccagttactgatatgctttcattttattttccattctttggctcttaactctgttattagtttatatatcccaggccccggcggtagtaactactttacccaggcctgttcaggcacccctcactgtccagcttctgtcctttccactaggcctataaaatgatcaaacttttttatatgcgcaagtattttcatgtgtgtcccctctgtctttgtcataaatgaaactttgtgtttcccccaaacctgtatgtcgtgagcagacttctcgaagggatcactccccacagcccactgggaacctaggtagaagggtaccacttccagaccattgctctcactgccatcagcctaacttttttttttttcactgtttattacaaaacaaagtaattttaagatatttttaaagattgacgttaagaagctagattaggtgacttcttataatatgtgacattaaatattttgagaaattcttggtttccttggaaggcatttataatgataaaccttttttcagttataataagatactaagcagagataattttgtcatcccagatagcaatttcttattcacaattgataacatttgaactgaaagagattcctggctttatttctatatttttttctacttaggtatttaacttttttgacatcctcttatcccctcaataggatccaaaatatgtctaaaattaattcaaaagaaaactatttgaattattgcttgtgtttgaaaacagtatttactgtagtattccacagtttcttctttttttaggcta

SEQ ID NO: 34265 - DNA, 1046 bp, Homo sapiens
gtttcctgataactttgggaggttatcatacttcttttagttcagtcccttctccagacccagagcctttggtagggggcacttcatagattgattcatttattttcttcctctctgtgacctaaaattctctaaaccttggtaagcatactatgttacttctaagagatggcatatttgtagtgttattttgtgggtagagaaaggaaaatgaaaattgcaatgggcaagattcccacaatgaacattccctggagttagttatgattttgggatacaggattgtttcatgctgaaacatgctgcctggtatgttgctgctcacgagtctccaggccctcttaggatgtctgttaaattctgtgctagcagggggccaaaacaggcaacttcatctgaactggaaaggtcttgttgccatatggaggactgcatttccgtgtatttttacaggggtgggggaataaagcaccagaggttaagacagtaaggggcagaggtacatctcttgcctgataacatctgcaaaacattgagctcgtcaaacatatctggtgattccagttctccctacagggattcagagaactgtgagccacattgcctgccctcaggctggcacagggacataaacattatagaactaagaacaataaaaatttgaacaatttaaagtaattatattatagacggtacatttattaaacctgaagtacacaacatagatgttatttgctatagggttcgggagctggacataatcccttttaggctaaagtggacagggaaggcatcatagagaatgtggaactttaactgaggattcagagttaaagagaacagagtagatggtgataggagcctgtccgattaggacagcagcatgaaaaaagttgagaaaagtgaaaagatggttgaaacctgagtctagcagtctagtttctccattcactgattccgtaatatctctttagcccaaggatcagcagactttctcttgaaggaccagagaataagtattttaggctttgtggttatatggtctc

SEQ ID NO: 34266 - DNA, 1028 bp, Homo sapiens
aaaccccatctctactaaaaatacaaaaaattagttgggtgtggtggcgggcgcctgtagtcccagctactcaggaggctgaggcaggagaatggtgtgaacacgggaggctgagcttgcagtgagctgagatggcgccactgcactccagcctgggcgacagagtgagactccgtctcaaaataaagaaaggaagaaataataataataataaccttagaaagaaagacaatttagtgattggatgttcttgcaaatgaatagcattttcaaggatttatttaatcaggctcctcctaagagtagcatgttctgacaacagctatagatttatcagaaagcaatctttggatattggtggtagttgagttgcatgttgatcattaaatgctgtactccttttgcaggcatggtctacatggctggacttgtttttgctgttggtggctttaatggctcattaagagttcgcactgtagattcctacgaccctgtgaaggaccagtggaccagcgttgctaacatgagagaccggagaagcactttgggagctgctgtgttaaatggattattatacgctgtgggaggctttgatgggagtacaggtaatttccttttcatttattctacattgctgctaaaattaacgtagtagtcatgtttatggaataaattgtggcaacattagggcacatgtgaggttttttgtgtttttttttttttttttgagatggagtcttgctccgtcgcccaggctggagtacagtggcgcaatctcggctcactgcaagctccgcctgccgggttcatgccattctcctgcctcagcctcccgagcagctgggactataggtgcccgccaccacgcccggctaattttttttgtattttttagtagagacggggtttcaccatgttagccaggatggtctcaatctcctgactttgtgatccgcccacctcggcctcccaaagtgctgggattacaacatgtgaggttttaactggtatttaaagataagtttaaa

SEQ ID NO: 34267 - DNA, 1021 bp, Homo sapiens
ggaagtagagctcagctgtaatacttgctcacctgccgctcacctcctgttgtgcagcccggttcctaacaggttccagacaggtaccggtccatggcctgcggtttggggactgctgctgtataagactgtcaactgattttaacagttgcttgggggaacaattcaggtgacataaatgtgtaattttatatctggagaagggctgttaagggatggattgccacagttatttatttatatcctactttgtctcccaacagaagttaaggaaggctctaagtattattattattatttttttttaattgacttgggcaaatttgcaggtttccaccccctcctcatcgtaggtgtaatctgtgcacttagaaaaaaacagctttattgtgatataatccacatcatacaattcacccatttcatgtatacagttcattgtgcatccatcactgcaattcattttaaaacatttttattatcctctaaaagcaatcctgcttcccttggctcttactcgtatcttacccaaccttcagcaactgctagtctactttctatcacttagagatttgcctcttctgaatattttagtcatacagtatgtgatctttggtgactcacttctttggcttagggtgatgttttcaagatttgtttatttatactgaggcatttattagtacttcatgcctttttaatgccaagtaatattgcattgcattctgttattaatttttgatttaaccttttttccgatttcctaagataactttggtatttaattctgtcttacaggatgttgttcacttatcaaatagtgttacctaaagatataatgagtgtgctattttatcagattattgatgaaagtataaaattaacatcatcagctataccctgcagatcttcataacatgatttgattaccccatctgtcaccattaggcaagaccctaatatatttcataaaaatcagcagcactttaaggggaaactctgctgccatgaaggaaaatat

SEQ ID NO: 34268 - DNA, 1035 bp, Homo sapiens
gtgtgctttgggagtagtggggttgggaagggcgtccgagaggaggttactgaaggatgactaggagttgaatgggaggacatcacctgtaagggaacgatatttccgtgggcagagaggaatgaagcagtagcaaccatgagtgatcagatactgcaaaaatgtgaagtgtaggatggcgagaatgtaagaaatgaagagtgaagaagtctggaagggcctcgtgtgcatcaatcacagcggggcttgatctttatgcttagggcaagcactcccttgaactttgagtgttttaaggaggttatctctgatgtttaaatttatatagatcgtggcattgcatcttagaaataaggtttaggaagggcaagcttggaggcagggcaagtccagaaaatgaaggagctggtgaaatccgtgttaaagtgccaaaggacagagactggctgacagctaaacttcaaggtttctgagaatccacaaataactaaatttatctagtcaacctgttccagaacaggcttccagtcatttaggttgcccaagaatgagtaaaggaaaaggaaattcaattttccaagaccttgtttcccctctcctctttaattccttgttcggttagcaacagtatatccattccctcgctcctttgtgaaaagtaaattcctgaatgttaactaaaccaagtgtttctaaattgggtaagagtttgaagacttaaggcagcagaatgggagagacttaaaacgttatgtctgagaattaggcattaaaggaggcctagtatttgggcgggggttgtgaggagcacatactgaacctttggacctgttgagtgagttcatgtgcctctgaactctctgactggatatgaccagtaaacttggataattagatcctggagtttaggggagagggctagagatagagatgatggatgtcagcatatttttaaaacagaaaatagttaagatcacccaagacaatctggaatcgttagaagggagtaaggaaggcattattgggaaactttcc

SEQ ID NO: 34269 - DNA, 1082 bp, Homo sapiens
ttggggaaggggacttttaaagcactatttagaatgcttctgaggctttaaaatactcatttttaaaatggtccaaaaaattcataaattagaagcagcagtggtgaacatttttaggaaagtgacccttgagaagtttattttttggttagtgacctattgagcttatttattaggtaagtagaacatgctcatttaaaaagtttaaattgtgcaaaagacatatgtcagatttttttttctgtcttccataacactatttcctaccccgccgcgctctgtcttccgtaacactctcccctaccccgtcgccactctgtcttccataacactgtcccctactccaccacactgtctcctaccccgccgagctgtcttccataacactctcccctaccccgccacgctgtcttcattaacactatctcctgccctgccacacaactctgttttcctagaagtcaccagtgtgaatttttccctttatccatatgtacattttttgtttctgtgtgtctgtgtatatacatatgcataaaagtgcatagataaaatacatatccttttcaaaaaatcttaagtggggctcttgctatgcatactgttctgtaacttgttacttggattaacactgtatcttagacatctttctatgtagagcgtatagatcttccctgttcttttaaatggctgtataattgtctatggaaggacttaatttatttaacccataccttgttgatggcttatttgtgttttgcttttattttttcctctttgtttttgctgctacaagcaatgcttccttccatcttagcggatctgtctttgtacccttgaatgagaaagttgctggatcaaaggatgtattcattttgaattaggtgttgctaatttttcctccaatgatacactgatgtatcccccctgcccacagtgtgtggtcatgcctgttctctcaccctcttaccagtactggacattaataagcttttaaagatttgctactcaggctaaaagtgtctctttgttttagggtgcatttcctcatttaatgaagtgaagattcttccttgtttagt

SEQ ID NO: 34270 - DNA, 1618 bp, Homo sapiens
tttgagaaaaagactgaataaatatctcacgtaaaccttcctgaaagataaacgttttcctgaattcagaaactagtagctaacattgcttctggagagcagaaataagcatgtcttctggctactaagtgataaaaagaacattaacaacctttaattaccttcctagtgggaactttttctactttacctacaagttctatatatgtagaaatgaataaatatatatttaagtacagttttcatgaggaagttttaaaagaccatgttcctaagcttccaagaaggttttggatactagaagtattaatctatggcttttctcccagtaaaaccataggcctgaagttcacattgggtctttaaatcttttagatatatactggtcatttcagaaaattcttcatagtggtattggccttatatttaactttttttttattttttttttgagacaaagccacactctgtctccttggctggagtgtggtggcacagtctcagctcactgcaacctctgcctcccagttcaagcaattcttctgcctcagcctcccaagtagctgggattacaggcacccgccaccacgcccagctaatttttgtatttttgtagagatggggtttcacgatgttggccaggctggtctcaaacttctgacctcaagtgatctgcccaccttggcctcccaaagtgctgggattacaggtgtaagccactgcgcccggcctttttaactttaaacatgttttagaattcacctaaagatcaaaatatcatggattgaacctcatcaattgatagcagtgagtgactgaagcttccaaatcaagaaaagccggcaccaagaacttccattctaatctagagctgaccagtttgagctgattctctctttgaagagtccttcttgattgcagtgcagtactggcatttctgaatggatgtaagtggagtattttagtctaaaggcttttcaaattacttgaatttttttaaaaattgaggagctttatttctatttacccttccatttttgtatatcaaatttccattgtcattaaaaactgtatcttgaaactttgtgaactgacttgctgtatttgcactttgagctcttgaaataaatgtgatttttgtgtgattatctggtttccagttttaaacattaactgtcaccttttattcttaaacttgaaagtacagaaatcattaaattattaagttgtacaataaaaggattggtttcttttcttttttttttttttaagtgcttcctttgccgaaatgtttcctggctgtttgaacatgaatttttcaggtttaagtattgtgggaaatcatcttgacctaataaagcaatacatactgaagcagttctttgccctgcttagataatgtatgttttctgtacagttgaagaatagagctaaacttttcagggctgataaaatctcaactatctagtttgtaactcatcaagggttgggaattcttagtatgtggtgttaattatttttatttttttaagctgcggagtcattatctggtaacttccttttttttctttttctttttttgaaaccttacacggtaaagatgtccaggtgtaaggga

SEQ ID NO: 34271 - DNA, 1049 bp, Homo sapiens
agatttagaatgcctttttttcaaatatgaaaataaaagatataatagcttatttctgtgatatatgcatacataattgcttcccacctaatttttttttcacttttgtagccttatatgtgtgactgtcttaatatctcaaagggctagtgctatcctcacccttattcttagattttatctctttaattattttctttgctttgttattcccaccagtttgtcttctagaaggtcttcatatcatgttatcacttaataaacattctcttttttattctgagtgaaaatgcaccaaagtataaatctgagaaaaagtgaatgttttataacttttgtttctcagaaaattatagcagttatgttaatattggtgatatacttctcattgtagtcattcctatgctagcaatatttttattgctactgtggataaattatttcattatatttttaacttgttattgttggagtaaaacaactatttatttttcatataaatattttgtttttggcctttttgctgaactctgaattctaatggctgtccagtttgtttatttatttctttattttatcatctccattttacaggtgatgtctagtttattttttctgttttttttctgagtgtactatataaattgtatacagtgttggtactttatatttttaagtttatatatcgtaatttattcctatgcataattgaatagtagagaatttctagtatactgttacatagtatgtcttttccctgattttaatgggaatggcatttctgtgctcatatgcatagtcaagcattcaaataaccattcttctgaagttgcagattaggtactttaagcatttggaataattagtttttattaaatgtcattttgatttaagataattttttatttataggatactaaaagtaaactttggagcagatttttaaaacacacatttctactttctgacattttacttaggttttcatatgtatattcataaaggaaattggcccgtacttctctattttatataaattttatcacact

SEQ ID NO: 34272 - DNA, 1033 bp, Homo sapiens
atttaagaagagttggatagttttcactaacaaaattataaatttctgtgttgaaaaatgcacaacataaagtaagaaatacaagtttagactgagaaaatatttccaatactgcattataaacaaaagtgtaatgtacttatacaatgagacttaataaagcattaagaaacatagaaacaacaggcaaagcataagatttggcaagatacattggatggaatgcagatggccaataaatgtatgaaaaatgtttaactttttaaataaaagaaatacaaattagagtttttgttttgctttgttttgtttgttttgagacagggtcttgctctgtcacccaggttggagtgcagtggcgtgatcacgactcctgaactcaagtgatccacctgcctcagcctcccaaagtgctgggattacaggcatgagccactgcgcccggcctagagttattttctaatagtttggaaaaaataataatttttattgctggccttagaatgagtaaacaaaccctttcacacattacgaaggggggtgtgaattgctacaattgttttgggaaaagctattgaaatataaaattcatattctcctcaaatcaacaacactgctgttagaaatcttacctactgaaatgaaagcacaagtatgtattgataaacaaattatgcaaaacttaacaatggagatatgttttgagaaattagttgttagatgattttgtcattgaatgaacatcagactatatggtagagcctactacacatgtaggttatgtggtatagcctattgctcctaggctacaaacccgtctggcatattactgtactgaacactgtcatacattggtaagcatttgtatatctaaatatagaaaaggtacaataaaaatacagcatgaaagattaaaaatggtacacctgtatagggcacttaccatgactgtaggactgaaagttgctctgggtgagttagtgagtgctgaatgaatgtgacggcctaggacatgaccatttaaaactgtaaa

SEQ ID NO: 34273 - DNA, 1064 bp, Homo sapiens
ttagcaaaacatcttaatattatttttagtttggagtgtttgtagaatatttaaataaacattaaaaaattcctaagggaagggacaggtgaaatactaatacaaacaaaaactgttacaaaatcagaaatgtcaagattttggggggctactgtgtatctgtttatctacttgatcttatatgcgattttgtctttcatttcattactcttcttcattgggaagaaaaaatcctctcaaggtcctatctcagtccctgaagaaataaataaaaaagagtagcagaagatggatgagattgagtgggaggtaaaattagaatggttgcaatcagtaaaaatcttgaaagtactttagtgagagaaccataaacaaaatatgatagtgcatatcctataagatccatgattactcataatttattcacaagtacattaaaaatgtaaaaccatgcataattatttaatgtataattaaaatttaaatattgaatttgaaactgggacaagcaatacgctttcctgtcatctgaacagttctggagtatcataggattatttcatgtctgataatattccatcatcttcctgtatctaacatcagatttaatacacacagcaggtactttttgatcatacagtttagcatttataatgaatcttggagctgaagccatatagcagccttgaaaattatgctgtatgcctttgaatgcgtgggcactcaagtaggttggagtaagaaaaagcactcaagtttttgttgttgttgttgtctttaattattttaaaagtcagtctcatttgatctctctttctttcccccactcttgattttggaggttccaaatggcctttctccactcaaagagtggttcttaggcctgcaggatagcatggtccactgacaagccgcatggcatcccaggggagcttattagagctacaggctctcaggccccactccagatctgccgaattggaatctgcattttaataggatcttccgttgcttcacgtgacatccaaatttgaggagccctgccatatgggataggtctgaat

SEQ ID NO: 34274 - DNA, 1128 bp, Homo sapiens
ctgaaaggaaagaagaggagaaggaagaattgatggaatggtggaaaatgatgtcagaaactttaaatttttaaaaaggcttctagttagctgctttaaatctatctatataatgtagtatgatgtaatgtggtcttttttttagattttgtgcagttaatacttaacattgatttattttttaatcatttaaatattaatcaactttccttaaaataaatagcctcttaggtaaaaatataagaacttgatatatttcattctcttatatagtattcattttcctacctatattacacaaaaaagtatagaaaagatttaagtaattttgccatcctaggcttaaatgcaatattcctggtattatttacaatgcagaattttttgagtaattctagctttcaaaaattagtgaagttcttttactgtaattggtgacaatgtcacataatgaatgctattgaaaaggttaacagatacagctcggagttgtgagcactctactgcaagacttaaatagttcagtataaattgtcgtttttttcttgtgctgactaactataagcatgatcttgttaatgcatttttgatgggaagaaaaggtacatgtttacaaagaggttttatgaaaagaataaaaattgacttcttgcttgtacatataggagcaatactattatattatgtagtccgttaacactacttaaaagtttagggttttctcttggttgtagagtggcccagaattgcattctgaatgaataaaggttaaaaaaaaatccccagtgcatgtatttcagttctctaagatttttggtctggcattgtggtcttatgatgaaaacatgtatcctcttaatggcggcttctcatatattcatcctgtacattttaaaatttgttaagcaactactgtgtgctaagcactgcatagcctctatgtatgttattgtggcaggcaaaaggttctgattttgggcacaacctttatataaataacacaaaaattaatgtttggacacaaactctaaatcagtaacacactggttaatatgtaattatgcattgtgataagtaaaatgacaagaaagagtagggaaagagaaagaatgacagagcaacttaaat

SEQ ID NO: 34275 - DNA, 1096 bp, Homo sapiens
ccctacaaacctttattcacaataattttatacctaatagtcccaaattggaaacaaccaaaatgtccatccttaggtgaatgagtaaacaaaatgtacatgttagaacgtggattactttatgttgattttattcaataaagctgttaagattgaaattcaacttatgttggattttaattgaacaaaaatttaaatatttccctcatcagattaaactcatattaaactttcctttagccctgtattataatgtcttgattcacaaaggatttcgtgtactaaattcttcctggttattgtgattttctgttgactcctgtttagatcttatctcctgggccttattcacctcgtcatcttctcctcctgttgtcttcctgtttactggcatgccctgcttgcacctcctccctggaattacacacactcctacttttatagaggtgaaatttggttgaaattagcatcacatacaactttgaagtgagcatagaacaattaagagtgataatgttggaactggttaggattaggggttgaagtgaagagaaggtgtctgaatgtgttaaaacaaacattaggattcctaatctatttttgaaaagcgtcatcggttgcttttctgactcatttcccagtccctcaccgtgagacaccccacaaatgtctgctgaggcagataccatcattacgttctaggaatgattctgcttgccttttgagagtcataatggcatagttcatttctaggataggagcagttttgtatacattataattcaggagtcagcaaactaaggcccgatgcctgttttggcaaataaaagtttcattaaaaaaagttttattggaacatagctgtgctcattctattttgtattgtctatggctacttttatgctacaacagcgtatttgagtacgtgcagccactatagatagtgtgagcctctagaaagcctgaaatatttatttttcggccctttaagaaaatgcatgttaacctcttagttaattaaaattaataataacaaacacatagtatgcactacgtgccagcttcttgtcatatgttaagtaaaaatattagttct

SEQ ID NO: 34276 - DNA, 1030 bp, Homo sapiens
cccatgtgatagctttactggaagcaggttgccaagtcgatttcctcctcgttccatagttgttcaatagaatgtgagaagttagggactccggtatcgttctgtcagggtatcttgattaggaacttttttattgagagataattataacaagactgcattctattcccttaaaaaaagtatctgtttatacttactgttgtgtaaacacatcatagaaaattacatttgaaattacatttcccatagaggtgcttatcttaccatagaaagaaaaaaaaaaagcttttggattgagctgttttctttttctcatttttcttctttaatcaaatataaaataccttaattatgcattggagttcaccagcaaatatttgaaaaaatcatcaccatgccacatgaactatgaagcaattacgtgtttattccaagcagtttttgaaataagagatttcggccaatttcccaatggatacttttcttatttaaataacaagtccagatcattgacttaaaaaaacaccaacaaaactcccttagtacatgatagtttgttataattaaagtcttctgtgaaaatgaaattatttatgcttattaactcaatgaatctttaatacatgtctctgaaattctaagaatctcaataggttctggaaacatagtttatatccttatgttgctgaatgttgtctgattttattgtgagagaaggccttctcagagctgagtgtttttgtttggtatctcatactgtttctcagagacagcatatatatgttagtttttgaaatacggtttaattagaaagaactcttaaaccaaatcaatgatatgtagcttactcacttgagaaattcagggcaaagctgatcctttttaggtatgaaggtctagttgaaaatatgtaagtgctgtgttgcaaaacagaatcctatatcactgagcctttccattctgcatattgcccttaatttgctgttatacaatttaacagctgtctcttaatagccatttaaactgagat

SEQ ID NO: 34277 - DNA, 1035 bp, Homo sapiens
aaacagtgagaattttacttctttctgtccaatttggatggcttttattttgctttattttttctcgttgtcctggctggggctttcagtactgtgttgaatataagtgacaagggtgggcatccttgccttgttccttatcttaaaagaaaatatttcaggttttcaccattgattatgacattaggtgtgggatttttatatatagtttttattatgttgaggtagcttcctcctattcctagatttttgtgtgtttattatgaaagggtgttgaatctgtcaaatacttcttctatatcagctaacatgatcatatggtttttgttctttattctgttaatgtaggtatttgaagtttcttagttttaaaaattctgaactcacagagtctataaaagttccaattgtttttatgatgttgcccatcaatatatttaggaaatcacttatgggaagaacaggaatgtatctatagggtctttatatgagtgactattttgtaatatacatgcttctgaactgtggactgcccatttttcatttaaaaagtcgtaaaattttacaaatttttgttaaaagtatagctgatttgctctttcaatgtagttagaacaaatcaagaatagtaagtgaaccatgatatgatctgtctctgcctattgatagtggctcactgaggaggttcagtaagattttgcattgcttacttgtcaggatatggagaagaataattgttaacttcctgaccacaaaaaagaagaaaagcatgagtgactaactcccttgaaatggaagggagattaccttagtagacagaatgaaacaaaattcataattctgttgtctgaaattgaatatattctctccaagatgtcattgaccttttcaaattgaacctttttttggaagttaggaaaaaatcgaaccccagaggccacaaatttgtttttagaaatagaaaaagaaaatggtaaatgctttgttagtactgaagtactacagaaatttaatactccattaatttgggtttat

SEQ ID NO: 34278 - DNA, 1071 bp, Homo sapiens
ataaactttttttcaaacaagtttttgacctttgagccaacccacccgtagactacgaatgtctccctatggctggtagcatttgaagactaaagacttgtcaaatatatcaagagtatatcattgcaagggcagcacttgtcctgtggaacaactacttataatgccttagaattcctgcacatgatcaaacagatcctcctaaaacacaccttttgaaatgttgaacataatagtgtatgttaattaacagctctatgaagaaaatccatttccatgactgaagcattggatataaatatggtgtcctgctttttttgtagaaaatgtaatttgaggatgaattttctgctttaaaggcatgtgtgtttttaaaattaatgaatgtagatgtgtgattgtctgagtgagtgaaactacaagaggtaaaaaataatgggtggttgaaaagttaaaatgtatgtgccaagttctactagaattccatttgaaatagcaccttccttaggtttcatggacaaataatgggaacttctaattttgatcaatcccattaaaaaaaggctctttcctttagagaaactctattttgatgtcaatatagattactgtatgaagtagctttgtgtctgttacctgtccatgagcatacaacattgaatacaattgggtgtattctttcagttttacacaattaaagtatacacacagatgtagcttatctgtttttttcttaaattgttgccctgaaaaaatttcttgcatatgaattgtaaaatgtaaatacatttttataaccaatgttttgatcttattgaatgttactttgaaaatgtataactattgcctgcaatgtagatgagccttttagtagagctgatttattccagtaacttcttccatattttctcactaatctcccgttagccaaaatatgccagaaatgggaaagagaggagaaaaagtcattaacattaacacctatactgttctatactactcctacccgtgtgctaggaatgtgcactagctctttttaaattccatgctacactttgaggactgtcatca

SEQ ID NO: 34279 - DNA, 1855 bp, Homo sapiens
atagaagtatgtaggaaccggcttccctaaaaactgttttcttagccattgttaagtggaaggaagaaaaacagacgtgactacaatacatctgaggcaagagataaattttataggactaggtcagtgatattttccaaatgctaaaacataaatagcctttgaaattcaggaaaacatttaagcattctgtttttattactgtctcttcctaccctcttcctttcctctgagagagtcactcttgctcgctctctccccctcctctctgtctctttctctcccctcacctccttcattccctgcctctcttcctctttctccatctcactccctcattctttttatttattttttctttactcttctctttactctcttctctttactctcttccttattcatgggcaagatgttttaaagctccagaaataaagttgaaattccctagtacctagatatagccccattaggaattagatatttagataaagaaggaaatagcaggttgtctccaaatggatctgtgcaactgaaacaggtttttcttgtcactgctgcgtcgtatctgtctgatgtgttttacactcccctctctgtctagacagaagtcagcttgcatcacaaatcttttcagactgttttgtgaattaatagctagtcagcttacttaagaccaacatccgtttgtcatagtaccttctctggccttctttgaaattctgactttgtactgatagactccttcaaagactagtctgggggtgggggacacagaagactcatttgacagctgttaatactcagtctcttactcactcagctgtctggaaacagccacaaactgtgttgagttacttctatagcactgtctaatagcgtgcaaaattaaaaacacaaaaacgcgtcttactggttgtggaattatacatataaaagtatattgcctcctgctttcaattttaatttctgctcaccagtgtgacccatgctagatcttgtacggtagagtctaggctttgattctctgattcaaaatataaagtaagttacacttagttaaatgtactaaggtgctgttgtaggagggcaatgatagggatgtttcttgagatcccagtagattgtatgcagtaaaaacttaatgcatgttctaggttaggacggtgggttgaacaaaagtaggccatatgaaacttatagttcaccaagagtgtgacaggatgccctggggtgccacaccacgctgacagggatgctgtaatatatttgaaatttttttatgcaaacacattcaaacttgacatttgacagatatgacacaatgactggcttgaactagttcagaatttcaacattagatcaccctccattcttttctatgacataatctctttgtgaaactgagtttttgatgagtgtgtgataaaaagtaagtacctcatgaaaatccatgtaaaacatgaaatgaggctggctcatccaatctgattccaagagaggtggtacagtgcccagcagatgcacacagccattagtaagaaatagtggttatttaagaataaaataatagtatttttctttcaatttatatgtatttttaaacactaaattgtttaggcataaacacttattaagttctttggaaataactacataacaaacataactattagttatgtcttttggcttaggagcaccatttaaaaagtattgagaaacttagagtcccatgaaccaagaaagtttgttttactctctagaggaggagtgtccaatcttttgaattccctgggccacactggaagaagaattacctggggtcacatataaaatacactaacactaatcatag

SEQ ID NO: 34280 - DNA, 1018 bp, Homo sapiens
ctgagttaggcctgagcagggcagcccttcaaatgcaattcaatgctgctgagagggaaacgaacggagtccatcccagccgtggagtaaatggactgattaacggcaaagctaacagtaataaatctcttccaacaccagctgtcctgctttcacccactaaggagccaccacctctgcttgccaaaccaaaactgtgagtatttctgcatggttttataataatttccatacccctgttacatttcctgtctggtgagaaaaaaacttttgcctgtattcaactatgtggcaagttggccttgactcatgggaccttgctgccaagtggtgtctttcaacaatataaaagacacctaaaaataaagaagggaaatgaaaagcttggtgaaatctgccctttgctgaaagctataactggttatggctgtgaaaatatctgtgcccagtgtgggcttccaacatacagctaaggatgtagccactccctggaggccatggaaaagggggatctactttcagccctttattaaaagcatttcaaaaagtgagtataagtactttgcatttgttactttaaatattaagtatcagtaagaagatctgatatagacaagcggggaaagactaaaaactgaggctggaaattcagggtgcagatcctggcagggcaatgaaactggagggaagcaggcttgtgggcaagaagagcgcccttcacaacacaggctacttggcttggaattccatggagctgcatatttccatgaataccatcttcacagttgatgtccattattttcttaggatgataaaccttgcatgagctgtttccattggcaccgcacagcagagagttgttatgaatggagccattacaatgtcagagagaggcagaaataaattagctcaaagggttctaccatagcgcaagagaccctgaattactgccctgccagaggttagtggaaatgtaagagtcatagtgaatgtgtatgtattctatgaggtcacattc

SEQ ID NO: 34281 - DNA, 1014 bp, Homo sapiens
atgttcatgttatctctgctcttattttcatcttcattgtacacctccccttacatgtatttgcaagtctctcactttgcaaaatggaactgataagtactaaacctcctcaaaaaaagcacaaacagccccagagtgatgatgcccaaaacttaaatgaccacagcaaccagtgccatgccagtgagttttggagctgagctttggtcttgtccatagaagcttttaagttgaaagcttataaatagagggtttctatattctgtgaatgatagaggtacacagttccaattgtattctgtattacgtgtatgtgccctctttgcataaatgtgcctgacactgtagtggaggccagcttcttgaaagcaaaaaaacacgcatcccattcatctctgtatttccagggctcagcactagtgggtgctcaataaatatactgaatgaatgaataaaagtattactgcaaagatcagtaagtcccatgccaaaaaaagaaaggaagaaaaaagaaagggaaggaaggagtgagcgaggaatgaaaagagaaagagggaaagagggaaggatggtgagcctcttcagaaagacggctgctcatgcttgctctcttgggcatggagtgggtcactggctggacgtttaatgggtttacattattccttaacagtcattgtttcaaaatgaggcatctctgatggctccatgctggcttgtctctttccgcctatgacattctctcaagagtttagagtaggagaggattttagaacatgatagtaacaagtaaaattagtattttttggactccaggtacctgtttgaaattatattgtttagaatataacaataacagtgaaattaaattgttgtcttaaagtgaataactgtaaagccatgtgtgatctgaacccccgagcctgcccttatctatcaaaatcctggtgtctgaagaagtccaaaatggaaacacactctgaacagatttccggcaggagcttccaccaggttttc

SEQ ID NO: 34282 - DNA, 1018 bp, Homo sapiens
atactccctgaatctaaaataaaagttgaaaaaaattttaaaaagaaaattgttgggaggctgaggtgagaggattgcttgagcccaggaactcgagaccagcctgggcaacatagaaagaccctgtctctaccaataatcaaaaaaattagctgggctttatggcgcacgcctgcagtctcagctacttgggaggctgacatgggaagatggactgagcctgggattctgaggctgcagtgagctacgatggcgtactgcactccagcctgggtgatagagtgagaccctgtctcaaaaaaaaaaaaaagaaaaaaggaaaattgtccaaggaatttaaaaattttcattttggctctctcatgcgcagtaaccgtgagggtttaaaggacagtgccagggccccatgttgttagagagcactctgttgtctttggcatgggagaggacttcagtgcaaaacggtgtatgaagtgtgttgtcagcagaagctaatttacaccctgtgctggacggagggttgcttgtttggagttgtttttcctgtggctaaaggattcctgggaatgctgttcaggcatgtctctgctggtggtatgctgtcatccttttcttttccatttacagtgtagagctgttacagttgtaaacaggcctggctttttacattgttactcactggtgtgggaacaatgtatgttaatgacataagtactgcccttgagagtactgcccaaaacagccccaggttgaaaatgtatcctcacagatttaatttttcttataaaagaaagaggtatgttccttctgtgtagagcgaactagaaatatattaaccctgcaactaacatgcagcacttcacaactcattagtgaggcccctgggatatggctccatatatttgcccacaagttggtataggccagaaaccagctgctttttcacctacgtggtgagagccagaggccagtcaaggaacaaggaactataggagaggaactacaaggagaatcttca

SEQ ID NO: 34283 - DNA, 1027 bp, Homo sapiens
acggccgggccaacaagggagggtcccgtgagcagccaggctggccctccccgggcctgggtgagctcccaaagctggagcgcagggctctaggccggccccgccccggggctgggggcttcccgcccgtttgtctcattttaacttttgggggcagctctgtcccgaatggtgagtggtccagactctagaaaggggtttggtcgcttgagcccggattgaggcttgggacctttgctctcttgctggggacggaagggggcgcgctgggcaggagagggggcgtctcggtcgggtctccctgggctcgggcatcttcccaccctgcggagccgggtcttgcgctgcgtgccccgaacaggcccgggcacaccgagtcccgttactggtcttcaggcgaaattccaggacgggtgtgcattcatcaacctgggagtctctaggagccagagatgactggctctacattttaatgcgtaatcacagagaaactagcacgagaaaaggacagagggaccgacccaagcttcagagacatggaataatatgatcctggttcataagccttgaaaagctcccctccgccaggttaaggaatggtgtcaccagccttggctgtgaggataatttcttgatttgtgttatgcaggctcctgtcaggactgtctccttaactcccactacctaaggaaaagatagccagagaattgtccagggatttgggtttgggttgcttctagaaagacagcatctttcttgctattttttttttcacatccccccaaaacaatttttttcccccttcagacttggcagactttgatttagataagaggtttgagttaatttgattttccccatgtctgtttagatcaatggatataggagatagtttgaagctaatgtacccctatgcctttgtgtgagtgtaagatttataacttgagggaggcagttaataaatagcacatccttgaaccataaacatacgagatagacaagagctagataataaacagtttttccc

SEQ ID NO: 34284 - DNA, 1067 bp, Homo sapiens
atttgtcttcataactataaatggatgtatttgtgtggaagatgtagattttttttaaaaaaaatctatttttggctctattaagagacaaaatgaatccaaatgtattccatacttctctcacattgcaccattttgttatgtaacagagaacgtttgagtacatactgtccacaccagcaactataaatctgtcctggcaagtgactgtaagatacccaggaacaagagataaggagctcgcctctccagggagaagcttttatttgcaagagagagagtgatatacaagaacttgcaaatgtctttgaagggcagaaaaaatcagctagggctaataaggcagctgtccaagttcatgattccttggcccttctttatacacaaccaccaagagttgtcagtttgcaaacctagaaaagtataccattgtaatatcagttcatctcccgcttttccagagctactcagaagcgtggtggatgcttagtgaaacgaccagaggtgtgaagctgccagacctttacccagatcaacttctttgactcagggtacaaatgaacaacgtagtctgacagctcacctaaaagttatttggaatgattttatattgagagatttttttaaagcctaaatttagattcatcagagcatatcaaggttgagatatgtgaaaggcagtgctatatgggagggtcaagttccattcgtttaaaaataccaggacatttgctgctgtttagtaggggagttgggtagggtagatatcctcacctccactatacagatttatttatttatttattttttgagaccaagtttcgctctgttgcccaggctggagtgcattggtgtaatctcggctcactgcaacctctgcctcccagggtcaagcaattcttctgcctcagcctcctgagtagctgggattacaggtgcgtgccaccacgcctggctactttttgtatttttagtagagatggagttttaccatgttggtcaggctggtctcaaactcctgacctcgtgatcctcctgcctcggtctcccaaagtgctgagattaca

SEQ ID NO: 34285 - DNA, 1050 bp, Homo sapiens
gttaaagactcagggttatgttgtttggatgttttgttgtttgctttttgaaaaagccagatcagatttttgtcattgtataaactccagtaggagaagagggatgcgtttttaaggtgatttctagaatgctctggccgacttagctgcagaagaaaaaggagaaaggaagagacagtgtatattttggcactgaaacttctttagtaacaatgcattcattcacaaatctggagagaactgaatgtctgctttttaaagtctgaattgaattctcgactagactttgagaccctgagaaggttttcaatccaaaccatgcttaatattcacgttttatcattattgatggaaagtgaaagaaaatttgaattcttggtagccagatttgacattagacttttacatttataacctcacttaaactttacaagaaatctcattacaggtattattatccccatttttaaagcaaaaaaaaaaaaacactgacccttggaaagaagaactggcactattgagattcacaccacgtgtggctggctgcatcagggggctcataaagaattcagagctggcccccagcttatcttccccattccctcttctcacccccaagctacctccattaaaagagatgccaggctatatttattttattatgtatacttacgaatgcatttgctcatctttggtgtcataaaatacaatgaataaactcctatccagtttttcagtgtatttccttaatttttaaagcaataaactcctttaatcctcccttatactcaatactaaaaaatgaaagatctgattttaagcaggaaaagttttgtcttagcatatagccaggaaacttcatctgcctaggtcctgaaatgtaagtgatctgccagaaccaagcgtgggggtagctcgcgaggcctcagccctcctgctcctgtgtgagagtgctttcttctgcaacctggctcctggaaggaatgaatgctcccccttcagcccctactccccaccaagaatttaaaagataagagggaaacatttccc

SEQ ID NO: 34286 - DNA, 1024 bp, Homo sapiens
ctaacatagcattagttttataggaaaacaaactcagttgccaaatttttgcctcaaaacttataactgcttttctttcctcatgcctcccctttcaaaatactccacttttatttctaactctcaccttgcatgctacccctaaaccctgtcctcaacttttaatttcgtaaagtgtttctgaattacgttagtccagtgagatgctctgaaaaagagaagaggttccatattagaataagtgtgagaaaactgtattccatacctctttcctcagggttcacagtgcccatccgttggccctgccaggctggttctggtcacaggacctctgcactgccaagctctccctgtaggtctcacatagccagccacttcctatggtttaggccaccactgtagagtcacctcctcagaagtctgatggaccacactgtctgatacagtcatctgctcatacttctgtcctttcattgcgtttaccacctcctgatatgtcttgccttccattcttttctcttatctctttctgccatatccaccataaaaatacaatttttctaactattgtgacctagttcaacattgtatttctagcacctagaacagagttgaacactgagaaggcaatcagtaagggttatttgcacattcttgtaaattctggtcaagaattcttggcatctttttaaactccttcccctcttccattctgtttatctcagccaatcttgtctctgtgacttacttccatgctgaatattttctgtttgccacttcagatccactcttactacaccaggcgctgttctaagtgtttagtacacattagttcatgtagtttacccagtgatcgcatcagatacgagctgttaatacccacattttacaaaggaggaaactgagacatatggtcattaggtcactagcccaaaccacacagcttttaagtggttaaaacaaaacaaacaaacaaaaaaacaggttatcacgtctgtttctttattcacgctgactctgaatt

SEQ ID NO: 34287 - DNA, 1068 bp, Homo sapiens
atcacgaggtcaggagttcgagaccagcctgaccaacatggtgaaaccccatctctactaaaaatacaaaaattagccaggcgtggtggctcatgcctgtaatcctagctactcaggaggctgaggcaggagaactgcttgaacctgggaggcagaggttgcagtgagccgagatggtgccactgcactccagcctaggcaacagagtgagactctgtctcaaaaaaaaaaaaaaaagaaaaagaaaaagtagaataatcagtttttacttgagccaaagactaattgtaattataccctttgaaaggataaattacccttgtggcagggacacaaaccaaggtgacaactctatggaatgttccagagcagttgttctaagtccctttaagagtcaaatatactgagaaatgcttcccaaggaacaggacttattctacagtgaatagacaggtattttcttgtccaagggaacttgtggctgacttttaaaaaccagttctccgctcctccgattgagatgacctgttctgaccttgatggtctccctgtctcccctttctttttcatttgtgctgagaacacagctcttagtgtagtctacctgcagaaacacagtggtgccttctgtcattgaaggctgctcatcagcacatagttgttctatggtctacatcgcacaggcttagagtaataatgggaatgtgtgtgttcccagtccttgctgatgtaacagagagctggctgccttcagtttacctttaagatgacttcaaaacctagctcttctagttctcagatgtaaggctgtagtgaaatgcagagaacttcacttccaaaattgtataatttttacttgtcctgggcctgactttttacatagggtctgatttcacatggctctggcacaagttttcttgactgaggaagggaggggagagagaaatcagaagtagagatggacagtacatccattcactcatttcagaaatattatttgagtgtctgttaacagcactgtgattaacaaaggagccatggtaagggagagacaatatgaaaaaatag

SEQ ID NO: 34288 - DNA, 1400 bp, Homo sapiens
agggaccacaccttgagaaccactgctgtagcagggggctgttttgcttttgcctgtttataaatacaagtatatcatatatattcttctgtgacttgctttttttcaccggaactttgtttttgaagttcagctttgttgatatgggtagcgataggtcaattcatttccccattgcttagtattctatttctcattaatttttgtccactgccctatgagggaagaggaagaaaaataggaagcaacttgcttaaggcaccaacagaagtgattctgtacccctcaagcatccagcaccaatgacccttggctcacacagctcaggtcattgttgctgcctttggaaggaaagaggcagtgagatatcacctgtcctaagagccctggcctcaccagaagttcaggaggctttgagacaccaggcacagcaggacctgcagacctcccagagccctcttgtataaaatagacctcaaataacattggcctaccctaatcaaatcaggatataaggggatggaagggaaggtaacaaacttaatattgatttcaaatgggctaggcactattgttgaataatgattacaaagcactagaagactgaataaaagtatgataaaaatacgttctctttcaacctctcaacattcatatgtggtatatatttttttaaaacttgcccaaggtcacaaacttaatacgagatagagtcagattttaaacctagctctacttataaatcatatcattctttcactttatgctgccgcctcgctaagacttaaatgtaggccttccccatccttggcatctacctacccactaaggcatactcccctaatgtatgtgaaccttctctgaaacctggatccaattagtgttacctgaaccagctttcatggttctttccatcatagttgcaacagatgtagcataaaaaatagtgggagtgacatgctgataccttgcactgtctttgttggacttgaacgtttgacttggatttatatgcctgacaactaactatactgccttgtgtttttatcctgcagaggatttccaaagaaggccagtagaactgctagaatagcctccgatgaggaaattcaaggcacaaaggatgctgttattcaagacctggaacgaaaacttcgcttcaaggaggacctcctgaacaatggccagccggtactgatagatttgggacctggacttggaatgttagctacccacatacctttcttcctttctctaagacttaggttcttgatatttgtccacaacatcatcattattattattattatttttgagacagggtcacactttgtcacccatgctggagtgcaatggtgtcatcacagctcactgcatccttgacctcccaggctcaaaca

SEQ ID NO: 34289 - DNA, 2120 bp, Homo sapiens
gggtaaaataactactctgggtctatcaaaaggagaaaaaaaaaagattcaaagaacccagagcatcacagtaaacagaccagtttctaacactacctattatagtattccaaccaactccaaagatcagttgacactcccagcatcttaaggggtagggctaagagtcttctttacctaaataacccaagacaggcaaaaggaagggaaactcatgaagtctaggcctcagtgtgtaaatgtatatatcccactgaaattgctgtgagagaattttgatatttatgccacttagcagtagtagtatttgttccaagtttctgagcatgttgcctagttgattttaattccaagagtaaaaccccttcttttctgtcttgggggcttcagtaactggtatgtccaaatatggcagatataagttctgtgagtcatcacttaaaaattggagtgaacttcactatccattagcaaaacaaagtggcatttaaaccatgaccagtgacacaccatttttctacctaactcttggcataagttaccatttgttgctgtaaggatgccattctggaaatgtttaatgctcttagaatctcagctttacaacatctattaccgtatattaaaacttttttcttataatttatgaattaagacatgagtttaaatagtcatgtcataaaaggtggtgaaaaaaaaattcaaaatagctaaatctttcaagatatagtaatcccaaaagcataaagtgtagttgacagaaaactgaagttgactccttacttccttaatgccctttagttaccttaaattttgaaattttaaagttatttgagtttagaaaaaaaagtatttgggtttgaaagggagaatacatgtatgttttctagtacactgtagcccagatgaaatgaaataaccaaggaaaagaggaagactagagtggaaaaattagttcagtaatgaaacacagacggtagagctctcctgagcagtggaaaataattacagaaagcagccaagagaagggtgagaaccaaggagggaggaaaatattaaagttcagcagaatattttatagaatatgatatttttccacctgggttaatcttttgggaataagaaaaacattagatattgttgactgcatccaaattctacttgggatagaacacacagctctaaacatatactgggctgtgtatcacactcgatgtgtgtagctcaagcaattcataagagaccaaagcaatcacatagtttagcaaaataatgagtgactgtgcagttacaccaaagagaatgccaaaatgaggatcacaaatacagtttattttagactctaatcctatctttaagaacaacgacatctaaacacgaatgttttactttgttttgttgtgttgctaagttactttgtattgcacttggattttggaatggctattttgcagtctgatgtttcctcaaactgcattatgtatacaagtggcaagcttttatgaagacctgtgtgccacaagttaaatttcataaactatgaaatataaatgttatttccatattacataaataattggccttgcacaaggtatgaaataatctttacaagctggatgtttaatacagaatcacttttagaattcaaacttatttgtaatataagctttaaactctgtggatttgtttggaatggaaaagtaacacacaactgagttaaatataaaatgttagtttgttgcttgtgttttgttttagcattataaggtttcctggctcatttcaagcttcactctaaacattcccttccattattcttatgttcatagtaaagcagatagaaatgagaaaattaataaaagcaaatgcagcagcattaatgtgcatcagagcctactaactatgattaccagggttaataggcatattattattaaaatcacttattgctaattctatatgacctttgtcaaaaatagtatgttcagacttaaaaacctgaattttctattatgcacatggaaggcatcttttcaaaaaagcttcactgaactctgggggttttttcccccaaacaaaaatgacaaaattatacaacttcttagtttggatgctctcta

SEQ ID NO: 34290 - DNA, 1055 bp, Homo sapiens
taaaatattcaaaaggggcagtctgtctttcaaaccttgtacttcagccatcttgttccctaccctttgggcaacttacttggaactctctcctgagacaaatctatacatacacaagcaaaaatgtaaatatacgttacatttttcaacttaacaattggagatctacctggagaaattcttcattcttttttacaactgtataatgagaataaaattattacctcaccccaaaatacttaataaaggtaactattgttacagtgaatacgcttaattttttttagcacatagatcataactttccttttgtgatgttaaactagatgatttttattgtatgtttgaaaaatgttaaaactactttttcccccccacagataatcagacagctaaatggagtctgagcagctgttccatagaggctactatagaaacagctacaacagtataacaagtgcaagtagtgatgaggaacttttagatggagcaggtgttattatggactttcaaacatctgaagatgacaatttattagatggtgacactgcagttggtaagttcagcatgacagcctaatgtttgtattcatgaatatccactaataaatatgtacactattttattgaggttgaatttttcagtaactttaaaaatttgagatcaaatttacataacataaacttaaccattgtaaagtgtggaactgagtggcatttagcaggttcacagtgttgtgcaactaccgtttctatctcgttccaaacattctcaccaccccaaaagaaactactacatttaagggtaagcttttaaatataatgtaatacagagaggtgtgcaatcatcacatcttagtgtggaaattgatgaattcctacaaagtgaacatttattatataactactcctcaatcaagaagtaaaacattaccagtagtttcagaatccttccttgttccaccttcagtttcaatattattttgatttctatctagattaattttgcaagtatttaaactttatgtatgtggaattcatactgtgtactctttt

SEQ ID NO: 34291 - DNA, 1040 bp, Homo sapiens
cccagtagtgtttcagtatacattcagaccaagaatgtatgagagcttccattgcttcatgttcactaaccacttgatattgtcacacttttaattttgtcagtgtgctagctatgtatggattttgattgtggtttaaatttgcattttctttgtagtcaaagagatgtagcatcttttcatgtctatttggaaatccttttcagagtaccagtttgggtcatttactcatttttctattggagtgtctatcttacagatttgtagaagttctttattttctagacacaaactttttgttggataaatgtgttacagctatcttctatggagtgcatttcactcttctaatggacaaattatgaacaaatattcttagttgtaatgtggtcctatgtgttaatcttttgctttatggccaaggctttttgtgtcttaattttaaaaaacgtccctaccctgatgttatgaagacatttttctatattattttgtaagagctttgccgtttacatttagttgtgtagtcatctgatttgtatatgtgtgtgtgtgtgtatgtgttagagtgtattcatttttttctcatatagatagtgtgttagtctgttttgcattgctgtaaaggaatacttgaggccggacaatttataaagaaaagaggttggctgggtgcggtggctcaagcctgtaatccctgcactttgggaggcccatgtgggtggatcacctgaggtcaagaattagaaaccagcctggccaatatgataaaaccctgtctctactaaaaatacaaaaaattagtcaggcgtggtggtgggcgcctgtaatcccacctactcaggaggctgaggcaggagaatcacttgaacccggagggtggaggttgcagtgagcctagatcatgccaccgcattccaggctgggtgacagagtgagactccgtctcaaaaaaaaaaaaaaaaaaaaaggaaagaaaagaggtcgtgcaggctgtataggaagcatagtgctggcatttgcttctgtctggtgagggc

SEQ ID NO: 34292 - DNA, 1047 bp, Homo sapiens
acttcatgtttgaaaaacatttcaaaagctaagaaaaagtttgaaaacctgtttgtaagtacacctggggtaaaggtacaccctgtggcataagatgtcgggaacaactgagggtaagaatggggatgcattactatcgtaaacttctgctaaagcataaggatgtgagtgctgggagcaaagcagtgctcaccacttctgcaattttctattgcagcattttaaataatatgggaaaaagtggactgcaaccaaaggcaaagagggatggtgatggtgaagggtaagattgtatttattgtccaaaggctaagtgcatatacatatgtgtttgggagaaggcatcacgtaatagttcttaacctactctgagagaaggttgtccacatttcttaaagtatacatgtaaaccaacaatgaaattattttagtgacttgagaatcaaagtgctagagtttgaatccctgttctactacttgctagcggtgtgaccttgggcctgtttaactcttgacaccttgttttccaaatttataaagtggagataataatatctgtcacattgtgttgttgtgaggattatatgaactaatatatgtaatgtcctgagaacaatgtctggtacacattaagttaattaaaattagctgttcttactgttattattagacatgagctagataacagtggcctctacatgggaaagattattttaattctgatgtagttcagtttatctattttttttatttttgtcccttttgcattgatgtcatatctaaaaaacctgcctaactcaggatcacaaaaatttactcctgtattttataattttagctctttagatctaggatccatttttagctaatttttatatatggtgtgaggtaggggtacggtttcattcttttgcacgtgaatagccagttgtcccagcatcatttattcaaaagactattctttcctcactagaaaaaatatttctttaaagaataatgaatccttttttttttctttttaaccgctgttactcagttggaaaaaga

SEQ ID NO: 34293 - DNA, 2033 bp, Homo sapiens
ttacaaaatggttgcagtttaattgttgttccttttttatttattagcttgcatatttctatagagagtttaccccacatcaaccatttggattacctgaagtaagggtggtacaggaaagggagaaatcttgaaatactaggttccttagcatcctcaaagttgaccaatgagattttttgcttgtttggttgtttttttctgtgtcttcatggactcatggatttaagtatatttgtggtttaatcatcactgttattattcttattgatgttcatgttattttagattagtgggagcttttttagtttgctatctgtgtccttcgtcatgtccttagataatcctaatcctaatcctgattcatcgtagacatttcccgcagcaaacctggaatcagccatttctcaaggagctctctgattccattgaaggaaaatataatataggtacaatctaggcactaggtgatacttgttacttctgggttggctattgtttctagcctcctaagtttatatgactgtactaatttgaattcataactatgggactaaacttctaattcttaaatctgcatttcctttaagtcatgccaaaaatctgaacatcacaaacatagtcatttcgtttaccccacaatacacacatacaacattgtcagtataacagtaccaacaccatctccaacaatatgcctactgaaaaattttaggtaatctgtctccagcctcccaggtagctgggactgcaggtgcacaccaccatgcctggctaatttttttttttttttttttttttaagagactgggtcttgctatgttactcaggctggtctgaaatttctggcctctaacagtcctcctgcctttgccttccaaagtgcagagattacagacctgagccaccacgtctggcctatcctttatttattccaccaaagttatttatacaaattactttgttgtaaagtcccttggaatagtttcttctgtggcattatgttaccagttagatgcacctttgattcatttaactttacttcaatttttaaggtttgctttttagatttagttttgttttattatacatatatgaagtatttccacggttccaaagttaaatgaacaaaacaggcatgttcaaagaagtctagtttctatctctgtcccatccaacccattgtcttcttccccttataagtaataatttacatttttaacttgtggtttatcttctgatttttaaaaatataagcataaatatttatattcctgtcttttagcatgcttttagccatcttgcttttttcctgtataatgctaaatatatctcattctttttaattgctgcagaatttctcattacataggtatactgcaatttatttatctgatgctatgttgatgaacatttaaatgatttccagattttaggaacggtgatgattgaactctctgtacatatatcttttttacttggtacactccatcaagcaactacttaagtgactgactatgatgctgtgcaagcagttatataaagaaaacagcagtgactcagcctgaaaacggcttaatattatcatgttttcttacacattatttttattgaggaaaagcaacatggagtttagtgattatttttgaaagaaataacctatttctaattctaaagaatggttaatatctgtgtttggttgcttatagggtagaaggggtaaaattgcctcattcaacttagaacttaccgtgtcattttagtggggcgttgtgacttcaaatagacccgattcttgaaatagactgggtccatgtcctttgttgggacatggatgaagctggaaaccatcattctcagcaaactgtcgcaaggacaaaaaaccaaacatcgcatgttctcactcataggtgggaattgaacaatgagaacacatggacacaggaaggggaacatcacacactggggactgttgtggggtcggggagtggggagggatagcattaggagatatacctaatgctaaatgacga

SEQ ID NO: 34294 - DNA, 1028 bp, Homo sapiens
aatttagagctaggatatttaccattcaagttataatatatcagaaacatcttataaaattatagcattaatttttcttttccttttcttttttttaggttagctattattttcctctcaaaactttatggagatcattttttgctgctttagtggctgcatttgttttgaggtccatcaatccatttggtaacagccgtctggtccttttttatgtggagtatcatacaccatggtacctttttgaactgtttccttttattcttctaggggtatttggagggctttggggagcctttttcattagggcaaatattgcctggtgtcgtcgacgcaagtccacgaaatttggaaagtatcccgttctggaagtcattattgttgcagccattactgctgtgatagccttccctaatccatacactaggctaaacaccagtgaactgatcaaagagctttttacagactgtggtcccctggaatcctcttctctttgtgactacagaaatgacatgaatgccagtaaaattgtcgatgacattcctgatcgtccagcaggcattggagtatattcagctatatggcagttatgcctggcactcatatttaaaatcataatgacagtattcacttttggcatcaaggtaagtgctaatgtgaggtgatatttgggtaattttggcatgttcaaaacttatatgtggaatgagagaggttgttgtttcataaatgactgaaaaaagtacttatcttttgagtttaattttaagtaatgaaaaagataattccttagcatatattgttgaccatgttatctgttgctatttaacaaattaccccccaaaacttagcagcttaaggtaactacttattttgttcttgatattgagtcaacgacttgggaagggctcaactgggcaatttttgcttgtggtctttcatatagttgttattagacatggcgagggctaatcatctcaaagcttctttttttcgtttcctttttaaaaaactgtttttgtggatac

SEQ ID NO: 34295 - DNA, 1039 bp, Homo sapiens
ggtaaatcccaactttctcacagtcagttgaactacaagaagctggaggcaattggcaggcctttgttaagtcccacctttgactcagctctggctgaaggatcatacctggcaagagagtgtaaaacacactttgattttttctattgtttatccttttaatgatcctaagagactcaagagtacatgccatcattttgtgtttggctcatttcatattcagaggagtttattactctttcagtagtttgttcgtttgtttgttttttgagacaggatctcgcctttttgcccagactagagggcagtgttgcagtcttggctcactgtaacctccacctcccaggttcaagcgattctcctgcctcagcctcccaagtagctgggattacaggtgtgggccatcacacccggctaatttttgtgtttttagtagagatgtgattttgccatgttggccaggctggtctggaactcctgacctcaggtgatcctttgggaggccttggcctcccagagtgctaggattataggtgtgagccactgaacctggcctctttcagtagtctttaaatgatcttgcttatggtgcttcttatccctgtttattatccttattaaatttaatcaataaatatttttctctttttaattgattcatataaatagacttacctgagagatataggttcagttcagagcaccacaataaagtgaatatcataataaagcaagtcacataaaagtcttagtttcttagtgcatataaaagttctgtttacactatgctgtagtcttatgtgtacaatagcattatgtcttttaaaaaagtaatactttaatttaaaaatacttgattgctaaaaaatgctaatagtaatctgagtcttcagtgaattgtaatctgttttgcttctgtagggtcttgccttgatattggtggttgctagaggtaggactggctgtagcaattcttaaaataagataacagtgaaatttgccgcattgattgacactgcctttcatgaaagatttctct

SEQ ID NO: 34296 - DNA, 1054 bp, Homo sapiens
ttttttgtatttttagtagagatggggttttgccatgctgcccaggctggtctcaactcctcagctcaagcaatctgcctgcgtgagcctcccaaagtggtggaattacaggcgtgggccactgcgcctggcccagacagacattttctgaaacacaactggcaatgagctgtttttacattttgaaagtgattcttcacttcctagttcttaattatagtatacctattaagatctgtaagatcctgaagacataagatcatgaagccatataagaatgaggattgaaagttgagcaaaattttcgggattttgggaaacattcttagctgtgctatctgcctaaaattattccttattacttctctcctttgacagacttcaagttttcttcatagccctttcaaagttttttgagccatccagagtaaaatcatttctaaatgatagttctgtatatctccaactcgtcttaagtgtatttgcctgtgtgcaacgtattgctagactatgaactcctcagcatggctgctggataacttaattgtcctgagttaatagccttcaaaggacaaatcggtttctttgcagatagcttcgtaaaacttcacatggagtttattttatcatatttcccttttttatttctgctcctcctttaattgcccatcttgcttcagagactgacatttcagggtggatattaattaaagcattaattttgttttttggtatatttctatccctagtatttctatcttactgctaaaatacaggaaaagtgccgtatttttaatgcatttagtggttttctttggtgttatctgttccatttttctttttcatacattgaagtgtgtctccttttcaaccaaaataatgaaatagtggagaccatgaaattgttgtgcctggctaattggcaaattaatttaccaatataataagtgtagcgccttgtttgaataccctttttgagaaggtatgatgagaatgggcaagggtgtcagcatctcttcttcttaataattaattgttttcagttttggttcac

SEQ ID NO: 34297 - DNA, 1026 bp, Homo sapiens
tactttactgtaatagagtatataatgcacataacatgcaaaatatgcattaattgacagtttattttattggtaaagccactggtcaaaagtaggctattagtagttaagttgaaagttacatgcagatttttgagtgcacaagaggtcaatatccctagccccagcacttttcaatggtaaactgtactagcagtgcttcctacaatgtctttcttgaattcatccacgtctcgttacaccccttgtgagtgtcctagttgggatcaccttaaaaactttactggacttctgtgagacaccctcagaaggatactctgccaccagcttgctctcaagttcaccctcacagcagccagagctgtttatccaaggtgcttaactgagcaggctactccagtcttaaatctctttattggactcttacagcttcagataaaagcttgttttctttgatacagcttaccccgagtcttcttgatatgcacccacatccaattgatcactatttcactgccaagactccctaagcctcaaccattttgagcttcttttagtttcctgggagtatcatactttttccccctggaatttgaagacattttctctgcagttttgcctggttaatttctacttttcgtcaagcggtctctgggaaactttcctaatctcccatgtttgcattagatacaacagtttgatgttatatcttctttttctgcccttataacggtacttatcagtctgaatatcaactacctgttcaggtagtttattctctattgatcagtaagtttcttaaacatactagtgggtagaatggtggcacctaagaagatatgctcatgtactactccctgaaacctgtgagtattatcttatttggaaaaatggttatcgcaaatgtaattaatttgaagatcttaaaatgcagaggtcattctagattatctgccctaaattttgggccctaaattcaatcacaagtcttcttacaaaagacacactggggaatttgatggacag

SEQ ID NO: 34298 - DNA, 1029 bp, Homo sapiens
gacaaattctaacctaggtctcgtaatttctagaatgagttagtgttcccacaccagtaatcaaattattattacttaataagaataatcatcatttaattcaaattaaataattaagagcttggttggcttcaatttaggtgtgtaaataaattttatgaattatccatggtctgcctttccatttttccttgcttttttttattatttatttagtgggtaaaaacaaacaaaaacaaaaggtgaggtaaatactgatgtagaaaattttaaataattacattttgatgactagttgtggtttcttttaaaagaatcatttggagtaatatggactgtgtgttattactcatccaagttctggctcgtattgacaatttgagtaataaaagtttgtgagactaggagtgaaaaatctggactggaagggaagacctctgcctactctcttgagtatgaagtttaccaggatggttgctctctagacaaaactcataagcaatgcattcaaagagaatatgtgtagactaggagataaaataggctggaaagataaggtttatcttgtaaacactgaatttattttgcttttgatatttcctaccttaaggactttttaaaaattatctcttttttatttcaactatcttcagattgttaaggaaaaagttctatgtcaacacttgtaccaataacaaaagtgattacagaggcaatatgatgatggcattggtgttcctcaaaagaaatatggaaattgaaagatgaatatctaagcattttaatgttagagcattcttacacaaatgtgaggaagcaggttttattttataatggaaggctgaaatttcattcattcatttatttccaaatatccattgagtggttctaacctgccaggtactatgttaggctatagggtcataacaatggggaacacggaagcggtctattcactcataaagtcagcatcacagctatcaccttacacagcttaggttaggttaagaaaaaattgcgtattatttt

SEQ ID NO: 34299 - DNA, 1087 bp, Homo sapiens
tcaaagaaactaaggtacatccatttatgtctcccacataggtctgaacatttcggaaatgtttggcgaattcctaagaattgttgtatttatcacttctgtggaaaagttttccatccagtggtctatgtgaggtcaggcatcagccctgttaccacctgcttgcccctcccccatccccatcctcccctccctaagacctcatgaagaatactgataacacctgaagtgggagttcctgctctcacaatctagttgggggtggggagagctattgcttaatccagtagcaatgtaaagaaataatacaagaactgtcacaaggatatgtttcatcagtagtcaaaccagtaggtggagaaggcttaaaatggcctttggggaatgcacagttactagtaaagagagaatgaaaacttttgaacagcagtctattttgtgacttaggctggttgcatgggatgggagataacgtgtgagatacgatttgggttcctgtataaactgttagacaatagtaaattggagaaagaggaagagagaaaataattcacgaatgaaaagcaaaattctgagcttgagccatctgtaaacagaatatgtggaaattctaacttgagttattaaaaaagttggtcagcaagatttgagtagctattgaatgaaggaaaatgactgtgattattcagctcctaactagataattgtctttgttcatattttgaatttcgattctcattcctgaagaatgaatgtacaatctgaaaagtaactaaattaaagatttcagtaataacagcaacaataatagtttacatatattgaatccttactttgggcctaatacatattctacatgtatttggttgtttatttgtaacaaccaccctctattgcaagtccgatggaatcccaactttatagatgagactgttgtggtatagagaggtgaactctttgtccaagtttattcacttaattaattgtagagccaggattcaatctcaggtgttctaacttcagagctgtgctctctgatcttgcactacagtttttaacaacacagacaagtacacatgggctacat

SEQ ID NO: 34300 - DNA, 1047 bp, Homo sapiens
acaaaattatctacaacccatcctatccaaagataattatcattagctattggtgtatttcttgcctaaatatatgtactatacatagacatagtccacagtataaataaactctgtggattgcttttttaatttcactgtagaaatattttaattgttgttaggatatgtatagatttgtaattttttttaaccatctggtcattttagtattgagatggtttgaggaaagaggacattagaaaaaaaaaaaaaacctgtgtactgggaattacagatctgaaattgtcatatacaccacatttgcaaaattttttcacctgcccttgaaaaaaaccaaggcatgattttgaattttataagatggtctattaagattgctgaaacttggagtgctttctggcaaaaccagcaattaaatgaagagaaacagaagccatcactagaagagcaactattttgtggcagttacttgtttcactatctcttccctgttctttaccccaacatagttcataacttaaagttgtggactttaaagcactctaaggcttttaaacttctgcctagtgagttagtattaagaaatttaagtcagtgccatggggttaaatatgaggtttaataaaaatattggtttcttaattttgtttattagtcttactcctatagtctgtgtgtcgtgaagcataatttctcttttctttctcctgatgcaactcagccactccaggattttctcattttccttcatattatgaatatgtaaaaattaaaacaaataccttttcttttagtcattgcatagttggactacacttatttcactctgaggtgatagggctcttcttttctatgtctttgcatcttaaatacatacagacattatgcatttatttatacttatatactaatacaacaggtcagcacagtcactcctcacccatgtggggagccaaaattctagtctgaaaattgagcatcaaatactaataagtaacttatactgaactcttaggtatgtttacattcttaatttaatcttct

SEQ ID NO: 34301 - DNA, 1068 bp, Homo sapiens
aaatagacttcatagtcttttatggtactgttagggatccatgccccttctctcttgttactctgtcattcctggagagttgctttagacttcatagtcttttatggtactgttagggatccatgcccttctctcttgttactctgtcattcctggagagttgctttcatctacgtggtctgagattttactaccatgtccacattgcagcagtaggaaggaaggaaacagaagggatttgcttcttcacctgtacgtgtcactttcagtatctttattctaggtagccatgtgcatagctaaaaatggttttagtgagtgggtaactaatgagatagaaagggagaaaggatattgggaggaatcgtagtctttgctacaaggtaataccgtataattttttaaatgataaagttgtataagtaagggtcaaaagtcacttgtagctaactttcattagttccaccttttccttgcctagcacagttagcatggtcttggtatctagtgtaaatctgatcttatccaaacatgaatttgttactttttatattacttggttaactgttgatttcaagtctcttttcagacttgtctcccaagttcacatgaatagggccaggctttaagttttttttaatgcgttcattattaccaagcagtgctttttaacactagtgttcagtaagtttattgaacattgggttatgatgatttattgaaattctacatttattgctttgcttggttgttaatagagtcaatgtctcttgtcttttttctgccaactggaataatccctactccacgtatgtgagctatatcctgtatcagaaatgtagaggaggcgtggaattggcaaagatttgttaccaaaaatcactatcagaccccattgctgttggcagtcagggaaccatggaaaagattatgggtcatggaaggttataagcaaaagtctgtggatttgcatagcagcattgagaggtaggtcttacaatgggcaggttgtattggaggactgaaaaaaaaaaaatggaaatattaaggaaacacacagatagtgat

SEQ ID NO: 34302 - DNA, 1095 bp, Homo sapiens
cctgtccattatgatttttctgtacttcagccatattgctgagatattcaactttataagcaacaagttcctttaaaaaaaaatacctttgtcttcaaactgaaagccgtctcatccctgtttttatataagttgccctttgcagaacaatttgtagtttctgtatgtggatcctccctacttctgaaaggttgtctggagaggtatcagaatcaccaaacaatgaaagatgcccaagctgccatgccaccagaagggggcatgtctcattcatatgtacactcgagttcttgaattatcatcgttgccttgaaaggctgtagaagtaaattattgggaaaccatcagaatgcacctgcctgagcctttctccctcagtcttcctgtttgtgttcagtggttaatattatcctctccacgtataaaatttgaattcagcaggaccttgtaagacacatgcgtttcattttaagctacatcccattctcagttctctgtccctatccatgggtgggaaggttcaaccctgttccatggacatagctgatgggacaggagtatccaagctaggtcaactgtattctctctcctgggatttttgaatcatgtggtgttgtccactaaagacggcacagagttggttggtaggcatagtaccagggtcagctccttatgcatcagtcacataccaggcaaagttatgggggaggaaaacctaaaaggtttgccaaggaagccagtctatagagaaaggagtgaagtagattttcactttctttccagaaaaagagataaaagaaagatgatatggacagggacaaacagacaaaaaggctcggcctctgcctctgcctaaggaccttctaatattaccatgagacgtgcctgttcttcctgctgattaggttgtgatataggcctgaatccttataacaaacactattttatttaagctagcttaaattggttttggtaacttgtacataaatcattctagagtaacatacactccttacagaaataatctcctgctttaccctaaaggaatttactattatggaaaattcacatggaagccaggaagggagatttttg

SEQ ID NO: 34303 - DNA, 1029 bp, Homo sapiens
ggtaagagttgatgtagctaattctttgtgcaccttcttaaatattgtacttttctcccctttctggtttattttttaagtaatatgtataaatgagggaagtaactaagttgctctccctactgatccacagggtcatgatttctttagggtacatttctagtattttaattgttggatcaaaaagtatgcaaaattttaagtcatttgcattttagaaaggttatgtaagtttactcttttaccaataactgaacacctttgtggacaatggatattttcatttcagattttgtcaacttcataggtgaaaaacgaatctcatttttttaacttatatttttaaattgctagtgaagttgaacgtcttttttatttacaaattggtcatttggatgtttcttattttgtaaattgcctgtttgttttttcctgttttttaccattgatgtgtttatgtgttcctattgatttgtaagagttctctaggggaggggacttggatttaagaatattaacaatttgggtgtcataaatattagttactccccccagttgttttgtttttattttatttgtgatattttaaaatattattcaaggttacaaaagatgtaatagttaaaaatgaaaagtataatcatgctgttttcttattttctacctaacagcattagaaaatatacaattctttatatttttgttttagcaatagaaaatttctatgcacttcttgatagaaaagatgtgaatttgacttaccctttcccatttgcctcttatcctattaatatttgatattttaaaaattctggttatttatccttatgacttgaagtaactcacctaattctattttgtactccattatcattcagcggcatctcttgactgtctactttataaaatgagaatattagcacctttatcccttcttaccccctcctccgcacccgcagactgagcccagagcatttccaggagtttcttcttcctccataatctacacaggacaggctttcatctcca

SEQ ID NO: 34304 - DNA, 1216 bp, Homo sapiens
gccccatgacttcagtgcttcagagttccatgtgtgtttccttccgtgtgtctaacataggacattaaagagcatgatcatttcttcaaaaataggttccttcaagctgagtacaagatccaaattttaaaaataccttttgtggaaaatactaaaacttggaaccacaaccttgtttctctcttttaacgtaattgctcacttcatgaaaaaaaaatcccctttggacaaatggatgtaattgtatatgtaatgcactgggaagtatgagttactattgattaacttgtattaaatatctgagaaaaaggtatgtattttatttgtaattttaagttgacgagatgataaatagaaaaccccttatttggagttccctgatgtattcttagtggtcaagacccttaaaacaaaaaatgtgatttctcgttttacattctcctcctttctagtttttttttccttcttatgcagaacagagattttattgtagaattaaaactgataaacctgatccctcagctctgtgctattttgtttaccccatgaggagttgctccccataaacctgagagtttgttagaaggtaccttgttcagaagattatcaggtttaagcaattgccattcaagagagtaaagaagaactagtctggaagctggcaagaaaaaaaaagttgttatttctaagtcaatgtttgtagaacaattgcctggttaggcaatgagacagtagtgtttaatacaattgagctgtggtgtataatatgagtagtcatacactcttttgtaagagtcttggattgatatttttgttatactttgcaatcaaataaaggaggctgtttgcacatatcctgaaaacgatttgataactatatagtgattatttctcggtaatttttgaaggtctactaaccaaaaaattctaataaaattcactcttatgaaattaaagattaagtcacaaaaatacaactgtttagataaatattcaagcactgacaggcatatagcacctcagttctgtttgtttgctggccattatgtttttaccagcttttgttttaaaagtctcatctttctccttgattaaattaaatgaacatcctttcctgttactccaaaggattccttataatttttttatagcacctttgattttagactgagggcttttagatagacttaaatagattcttctactgtatgtttct

SEQ ID NO: 34305 - DNA, 1070 bp, Homo sapiens
gtgttttattgacagttgtttgaaggaaattatgcacaggtacctaaaaagagcaactcaggcaagtttcccagccacttagatttcctgtttctttaagttaagcattgctattcacattgtgttgactgtagaaggattgatagtgtccagtacaaataataatagtaaaatagaatttctgcttagagtttgtggtaaatatcaaaatatcttagtgataagcacatgtattcttttaaattttgtcagttgcccagtgcttccattcattcatcacttgtttattttattcaaccagcatttattgaccccctgctggttctgggtttcctctcatactgtgctagatgcctggtatgcaaagataaatgagtcatggtctctcccctcaagcagtcaccaactactaaattcttggtcattttagttgttttcttttttcttaaaaaaattttttttttcaacaggtttttgggtacaagtggtgtttgtttacatgaataagttctttagtggtgatttccaagattttggtgcacctatcatctgagcaatgtcactgtagccaatgtgtagtcttttatccctctcctccctcccagtctttcccgagtccccaaagtccattatatcattcttatgcttttgtgtcctcttagcttagctctcacttatgagtgagagcatatgatgtttggctttccattcctgagttacttcacttacttaccctccagttgcatccaggttgctgcaaatgccattatttcattcctttttatgtctgagtagtgttccatggtgtgtgtgtgtgtgtgtatacatacacatacataccacggtttctttatccactcgttgattgatgggcatttgggctggttccatgtttttgcaattgcgaattgtgctgctataaatatgtgtgcaggtatctttttctataatgacttcttttcctctgggtacatacccaggtgtgggattgctggatcaaatggtagttctacttttagttctttaaggaatctccacactgttttccacagtggttgtactagtttaca

SEQ ID NO: 34306 - DNA, 1035 bp, Homo sapiens
caatcaatgctgagctgaatttttcaaatagagtagagctattaatcatattaggtcagagatgtaattctttggtgagagactaataaatgaaataaaattataggtctttttgagactaattgaaattatggaacaaccgatagaataaaactacattctaaaattgtagtttccagattcagacttagaacattccttaattaacttagcatttgatttatagagaactttaatatttcaatagtattatctatcaaatagttaatgaactattttaactttctttgagaaagttaaaaggcagatatctccagttttaacattcggctctgactcaaattttggttaagttttgctgtcacatctagactttattacataaacaaagatttaaattaattacagttacttcaatgggatatataattcagatttattcaactttccccattctttaattactactggtcagagattgttcttgtgagagatacactattttagcatgactcagaaaccttagtaacaaagtgaacattttaaaagcatacaaaatacaagcccgaattcgattcagaaggcataaaattaagctattggatgctgtagtttctcagtgctggtgtgactctctgcccctgcctcatgatagaactaggaaccataacagttcactgagtcatgctaggccatggtatcagcgcgtgcttggcagaccctcagtaaacctttgtgtgagtgggggcatttgttgcacagtgatgatctcaacattactttaataatctataccacatatttatgcttggtattggtttgttttaaaatgcaatttttaatttaattttattattattattttttgagatggagtctcgctctgacccccaggctggagtgcaatgacgtgatgtcggctcactgcaacctctacctcttgggttctaggattctcctgcctcagtctcctgagtagctaggattacaggtgtccaccaccatgtccgactaattgttgtatttttagtagag

SEQ ID NO: 34307 - DNA, 1022 bp, Homo sapiens
atggatgctcatgtgccttctctgtggctcactgctgtcgtctcctctgctgctcttgcagccagtgcttagtgactccacggtcataggacctgacgcctctaatgtcctcaccaaaaggaaatacagtcatccccatgcagccactcttaacaactgtcagctgtgaagttctcacctacatcttctctcatggtatctcaacatggggagcataactttctcatttttgggggctcattaggacactaagtgaggaggagcatcaggggatggctgagactgaggtgttctctaaaactgtattcgaacgtttctgtcccagagtttatacacattatttaaggttatagtagagactgcaagctgaatggtccaatgacgatgtgacctttaagaagcctctggcttccttcgtgaattctaaccgtaccgttactgtgtttgaggatcactggcagccgagctctgagtggggaactgagataagaaaggtgttgtcatgataacacctggacagctgcatcccacagactatgggagtgccaggaaactggctacctcacagcagagtagagaaaatggaaataaacacaaatataagcttttcagtgagctgtgggtcagagaaggccacaagtggtctggcagatcatggtgcagctctttgtttcatgagctacgtgcagcagtagtttttatgagctctttttgtagctttccagccctaggattcagccatggtaaggtggaaagtttctggtactagccctgctgttctgctaacaatggtccactttcctccaaacccattgattatttagacatgaaataaatctatgcatctcaactctctgcctcagaaaatgaaatctgtcccaggaaaagttcagatgcagtaacctgctaggaactagggatgcttgtcttaaaaccctacacacatggcaaacactgttttatttagattgagctgattgggaggggtggacctgatagggatatgggcatgatgagctaaa

SEQ ID NO: 34308 - DNA, 1224 bp, Homo sapiens
ttttctgcagttagaggagtgaggaagatcaagtaaaagtacagaaacacattttcataactgttcccaagaaatagcaacaaagggttgagagaaccgctaagaatgtggcaagtactatctgtgaccccacacacacgcacacgcatgcacacgcacacgtgagctttttcatgggtgatagggaaaataacaggcaagaaaatcttataaataaggtaaaattaccaaaagaaagttgcctttaggaccaaagcgaaaaggagaaaactctattaagctcagtgatatagttctttgtccctgacatttgtctgtaagcctagggggaagtctcctctctcctgcccttacgtaaacaggcttttcggcttttatgggacattcatttactctatttcccattagatattaaagtcccctagtgcacaaacaaatcaacaacaaaaagagataacgtagttaggcatgctgaactagtcttgggttcttaaatgctttttcattttctgtaaatgtttcagaactacatgtactgtgcctctaatagattacatagatgggaatgattattccattgaaccacagcaaggtggggatgaagatggttttgccagaggggcctgggactggagtttactatggaaacgtattcctctaagccacaaggaaaaggccaaaagaaaacataaaactgaaccttatcggtaaagactattactttattttcttatgttgaatgtttatctaagttcttttttttttcttccccatgaactcgtataaatgtgtgggtccatacatacgcttccatttgatctttgctgccatcaacacaatacagaaccatttgcactgtgccgcttatagatgtcataaatggcaacacatatgaaattataccccaagggggtggtgatgaagatgggtatgcccgaggagcatgggattggagtatgctctggaaacgggtgcctctgacccctcaagagaagagactgagaaagacaaaaactgaaccgtatcggtaatcactaaatcacttacatatttttcttttctccagttgctgctaacctattaacctcttgccaagctaaagattcgttattaaaactgtagatgttgtctcagattctgaaagaacatctttccttacactgtttcagagctttcaatctgctccatttgctccattgtaattgcttttaccctaaatgtgat

SEQ ID NO: 34309 - DNA, 1031 bp, Homo sapiens
ccagaggtagatggaagttttttatgcttaatgtaaatcctaagtagtgcattctgaagcctttataaaaagatatgaacaatcttttaagtgtttaaaacatttgagaaatctgaaaatgaaagcaaaattaaatatagccagttgacatgcatttacacagtttgaattgttacattttagattgacaatttttgcagctctgttgtcacataacttactctttttttgacctcagtttatattatttatccccaaaagattaaattctttaataatttatgttggattatataaattttttaaattttttttgattttggaagtaaattttattgtgctgaagttaaaatgtttgttattatacatatcaatgataaattttcaacaaattgtatgaactcatttatacatgttaattttttctaggttgatttataccaattacaagtaaatacacttaggagatacaaaagacacttcaagctaccaaccagaccaggacttaataaagcacaacttgttgaggtatatatgagttttaaactatttgaactatctgcacaaccgagaggttattaagtgctaatggaagttttaatgtagtgtatgtaacagtacattttaattagaaagaacaaagttaaaaaatctgttgtggaagaatctagttgtgtagaaatgtttgtctgccacttaggaaattcctttttgtaatgactgcttagtagattgtgtacagcaccttctgatactggctttcaaaatgtgttgattgttttttgagacagaatctcactctgtcacccaggctggagtgcagtggcatgatcttggctcattgaaacctctacctaccaggttcaagcaattctccagcctcagcctcccaagtacctgggacttcaggtgtgcaccaccacaccaggctaatttttgtataatatttttagtagagatagggtttcaccatgttggccagacttgtttcaaactcctgacttcaagtgatctgcccacctcagcctacc

SEQ ID NO: 34310 - DNA, 1032 bp, Homo sapiens
gactattcaaagcagtatagggcattgagttcagatgagggcaagtcagaaagatgatcaaaggatgtttcctagaaaagaagctgagctgtatcctgaagggtaaatgaaagttaaaagagaaataagatggttcatcacccaaacatgtgtgatacatgtaaaggaggctaaaaacaccttctacacacaaaattttattgtgtcacttattttagttaacagtaggttcagtctcaaacatttactttgtctttttcctgtggcaaagtctccgtcacggctctaatccaggcgatcctactgtagtctcagctgtgaaatatttagaatccatgtgctaaatatatatcgcattaacacttcctggtgccaaagtctctctgtaatcccaccccctctgtcctgattctaactgtgaacatggaacacctgtagacctcttatttttctctaattttgggtctgggactacttttgctcataaaaagtataaaggatcactgtattaggatcagaactaacttcatttattcagtcaagtcattcattaattccataaactttgttgagtattaactatgtgtaaaccactgtgctagatgtgaggcaattaagaagatgaatacaatataagtcttgtcctcaaaaagtctgtagtctaggctgggtgcagtggctcacacctgtgatcccaatgctttggaaggctgaagcaggaggatcacttgagcccaaccaggagttcaaggctgcagtgagctatgatcatgccactgcactccagcctgagcaatacagcaagaccctgtctctcaatttaaaaaataaagtctgcggtctaataagggaaagcaaaacaagtaatatacatgatagaccgtaaaatccatagcaaaggagacgatgttgaccttgtttatggctctatcccacacaaagttcaacttttggctcacaataattactcaagaaatagttactgaattgaataaaaaggtttaaacattatcgggcaggaagaaatatttc

SEQ ID NO: 34311 - DNA, 1058 bp, Homo sapiens
tgatgaattatttcaatttttgtatgcttcaaagagtagtttgtttttgaaaaatatttttgctgtgtaaaagatggcacatgtatacatgtgtacctaacctgcacattgtgcacatgtaccctaaaacttaaagtataataataataaaataaaataaaattatcatttgattttttttcagtactttatatttctctactgtcatctgcattacattgtttctgatgaaaatctaatgccatcctaatgtttgtccctccctaccccactcaggacaactgatgttcctttgtatgtaatgtttttttcttatggctacttttaagatgtttttctctctatcatcataattttaagcagtttgatcatgttgtgacttggtttctttttatttatttatttttgtgtgtgtgtgcttacagttcattgagcatctcggatctgtggacttttgtacttcattaaattgaaaatattttggccattatcttttcaaatattaccttgacctttttttttctttaagaactccaattacatgcatattagacaagtcgaatttgtcacttagctcactgatgactctgttaaatcttttttagacattgtgttttatttgggataatttccattgtctttaaattaactaatattttcttctgcagtgaataatctggcattaatctcatggcaaaaatctcatatttttcttcttgaacattctaattttttatttctagatgtttagatttgtgttatgtttttatttttcataattctgcttaacatgttcaattttacttcttattgtttgaacatatgaaatatagttataataattgtataaacatccattttcattaattctataatctatataatttctgtgtcaattttgattgcttactttttctcattattgttcatattttcctgcttttttgcatgtctaataatttttaattaaatgccagtcattgtgaattttgccttgtgttctgggtattcttgtatttcaacaaatcttctcaaattttgttgtttgaagcacttaa

SEQ ID NO: 34312 - DNA, 1026 bp, Homo sapiens
gtaaagggtgaagaacagtctttttttttcccagcgaaatgttctcaaagaaagggcctcagaacaaagaataggtaaaatttggagtttttgttaagatctttaaaagatctaaagtggtactttataaaaccttacagacagacaaaagtacctctaaggatcctaaggcatgcctttcaaataccataccttccacaaataatacagctgctaagagtcttaaagtcttagctcaaagagattgtgcttatatgtaatagagtgacccccaatatgatttattttaaaaaaccctataaatattttaaaataattattctaaaggaaacaccagaagcttgacctaaaggaggcatttagactccacctatgaaggacaggaagaagaaatctcaggtacacatcagcccactttgtatagaaaagaaagaataattcacaaggaagagccaggaaccatggagaacaattcccagagattagaactgaggccccgtcaaagaactggcaagatatgtcctgttggattgcagattgcctcatgcacagtacattctcccccacttttagaatgggcctgtttattaatagttatacccatctcaccattgtatgctgagtgtgtagaggagggcagatgacttgtctttttagttcactggcctttagattgagaataataatatgcaacttgctgtacctgaggaacttcacctgaacagcctggagtgtacaatctgattagatgacaaggtctcctacaagcttgagtatagtgggatgagaattcgtgggttttgggtggggttgagtgaattttgtatgtgagagggatgtgattttttgtggctagaaaacagactgtgtcagattgtatattccaaagctgactgcaaaagtatctcctgcctcatgtgcccttctagaacattgcaacaatcttcctaagatatagagtctaattttccttcccctgaatccaggcaaattattgactcccttataaccaatatattatgctgg

SEQ ID NO: 34313 - DNA, 1032 bp, Homo sapiens
gaagtattttaatctcttctgatttaaacaatattctttgggtgaactattcagtccaattagactaatttccatctattcagtccaagtagaaaaatatctgtctgttcacagttccttatctgagctttgtcttgttgtcagagtctgtcttaacctttcatctttgtcttaccactaatttaacagggtccatgtgggaataatcccaaagtgaccagaaagggagagaagacagggatgaaggtgaggtgggcaaaacatgtgcctacaagaccaggtgcaggccagagaaaagagcagaaaactcttgatactcaattggctccttcactgtagatgatgtgcgatttgagttcatttaatttgccacatgagatattcctagagcttctagatggccaccacctcaccatctcacctctgtggattctgtggtggatgatcctataggggcacagtggtgtactgtccagtgggaggatccattctacaccccacagactatgctggtgaggtaactttactctacagtattgcatttttggggagttgggtgctgtcaggccagtttattccttctactactttctatagccttctctaggcccacaagagacctaggaattaccaccataccaaacaaggcacctcaggaaaccaagggtgagctgtactctctcccatcttgctatgccacatgctacctctatgaagtctggcagtgctgggtaaggttggcttagcaaaagaaacaagaagcagagactagtttcttatatacagtgtcagtcctcaatatccagtgagattctcttggcgatcccctttccacgaggaacctattgaagagatgggagaggccgtgcatataatcattttgtcttagtctgttttgtgttgttacagcagaatctaacagactgggtaatttataaacaatagaagcatatttgcttcatggttctggatgttgggaaatccaagactgaggagctggtatcttgtgagggccttcttgctacatcataa

SEQ ID NO: 34314 - DNA, 1073 bp, Homo sapiens
actcaaggtattgttatgtattacttttcttctatgaagtgtccatggacagttgtggtagatgtttttatgtaagttattgagtttcacgttactggctgactagacttttatagttcagaaacttacctccttccagcaaaggttcttaatcgtttatatacctatttatgactcttctttgggaaaaatctcctttgataatctaatgaaagtcccactccatgcaagaaaattagtcatttagaaataaattccatgctattacttttggggcagtttttaaaaaatgaatcattttgtttaaagtctcagttcgttcaaatcttttggttcacgtatgtgtttttctgttgtgtacattcttcagagtcatattcctgtttcataggccccatgtatgtcagcttttagtaggtatcaccagtaagttttccaaaataattgtaccatttactctttctgtaaaaagcatagatattttgaatttcttgcctttttttctgtgttcaccttttcttcttggaagtagacagctggctaaccagcaggagtttgggaccgatgacagtgcaaaacatcttgactgacaatggtggtggcttattaaagtgaagaatcagcatcaagagggggaatcggtgtattccttctatttctaggccattgggatataggtcgttatgggaccccaggtagtaacccagctcattctgaaatagagctgagaaatgacaaggattaagtgttgcttttcaggtagagtgctattttggacccttggcacagattttggttctttattatgataagtaccaagaaggaaaagaactgggtctattagagaaaattaatgagggggattaattagtttgggatctaagacttatttgaggtggtgacatttaagcaggatgccgaggggtattagccagatggagaatgggagagggaaggagttgctctgtatctcttcaagcttgaagaaatggcatgtgcaaaggtgttgaacagcttgagatatcaccaaacatccttatccaggtccaggaactttatcccagataccattt

SEQ ID NO: 34315 - DNA, 1046 bp, Homo sapiens
ggatttcttatagacaacatgtagttagatcttatttttgatccactttaacaatctctggctcattttacattctcacaagcttaatattttttatatccttctattcttgttttaggttttaatttttttttctaatctcattgagaattgaaagcttcattttgaaattttttctctatattatctctatttccaccaaatttttcttctctgcttattttgtttaaggtatttatatatacttttcatactgaagcttccctctaatagttattgacctttgggcatatattcagttttaaacatgagtctctaagaaaaaaaggtgcctggttagggcttatcaataagtgagtttgctgcaggtttattgggcaagacctgcccttttcaatggggattttcctcaaatgtcagaaatgtgatacttttttctctaggtccatccaccttctctagcatagaacctgatagtctgctgtcacagaggatgtaagtctaacagcttcttgaggctgagatataggaagaaactttattagtgtgtgtgtgtgtgtgtgtgtgtgtgtgtgtgttttcattaatacttctttctgccttcgaacacttccttctgtattgttcgccttgcctgatgttaccaaatttagtgcctccttgattcaatttctttggagtgtaaagctcttttctctttccagggaaggtgagaggtagttgccttgctgagcaagttatgtgtgtagggataggaggcgggagggaaaataaattctagggttagctgcttcttatgtagactctcaaataatcattcttatttcagccccctggacttacccctttgtctttcagaagcatcaagtgtacctgatttgtgaacctatcttgcttcagttggtttcctcctaaatattaggcagatgggattggctggtctgtgctctgctaggttggttatcccttattcatttgcttttcattttccaaaattttgttgatacttgttttgttatgtgaaatctcctgtagttctttttgtc

SEQ ID NO: 34316 - DNA, 1046 bp, Homo sapiens
caacccccatagagcaggcagtgtcctcccctataagctgtgagtacatatgactaataagctgttatcagtttcatctgcgttgtgctgggttttgtgttgggccttcccataaccctaggtgggaattcctccctcaccaacatggtgaatggggggtgattaaaacagtgtgtaatggtctctcatcgtagttttagcttacatttgtccaaaatgttgagcataaagtatttatttgccattagtatatcttctttggtgaagagtctattcaaagatattcccaattgtatttaggttgtttgtcttcctgttgggttgtaaagggcctctattgaacagttttgcaaagattttcccccactctgtggtttctcgttcatttcattaacagtgttttttaaggagcagaagttttaaatttttataacatccatttataaatttattcatcactgagagaggggtgtagccatgtacagtcactcatgcctgtaattccagcactttgggaggctgaggtaggagaatcatttgaggccagaagttcaagaccagcctggtcaatatagccagatcctgtctctacaaaaatttttttaaattagccaagcatagtggtatgcacctgtagtcctagctactcgagaggctgaggtgggaagataacttgagctgaggaggttgtggcttcagtgagctatgaatatatcactgcactccagcctgggtgacagagcaagaccctgtctctaaaaataagaaaaagagaggtgttgaagtctccaactagaactgtagatgaagactaaaaaacttttattttttctttcagttctatcatgtatttttaaacctgtttttaaatgcataaacatttaggactgctatttcttcatgataaagagacttatttcttattatgagttggccctctttatctctggtaatattctctcctgatatctatgttgtctgacagctattccagatttctcttaggaagtgttactacagtatttatttcccatctttttactttt

SEQ ID NO: 34317 - DNA, 1098 bp, Homo sapiens
ttctttgtcttttttgatctttgttggtttgaagtctgttttatcagagactaggattgcaacccctcctttttttttgctttccatttgcttggtaaatattcctccatccctttcttttaagcctatgtgtgtctttgcatgtggcatgggtctcctgaatacagcacaccaatgggtcttgactctttatccaatttgccagtctgtgtcttttaactggggcatttagcccttttacatttaaggttcatattgttatgtgtgaatttgatcctgttattttgatgctagcttgttattttgctcattagttgatgcagtttctccatagtgttgtttttctttatattttggtatgtgttttggagtggctggtaccagtttttcctttccatatttagtgcttccttcaggagctcttataaggcaggcctggtggtaacaaaaatccctcagcatttgcttgtctgtaaagggttttatttctccttcacttatgaagcttagttgggctgaatatgaaattctgggttgaaaattcttttctttaaaaatgttgaatattggcccccactctcttctggcttgtagggtttctccagagagatccgctattagtctgatgggcttccctttgtgggtaacctgacctttctctatggctgcccttaacatttgttccttcatttcaaccttggtgaatctgatgattatgtgtcttggggttcctcttcttgaggagtatcttagttgtgttctctgtatttccggaaattggatgttggcctgtcttactaggttggggaagttctcctggataatatcctgaagtgtgttttccaacttggttccattctcctcatcactttcaggtacaccaatcaatcgtaggtttggtcttttcatatagtccaatatttcttggaggctttgttccttcctttcattctttttttctctaatcttgtcttcatgctttattttattaagttgatcttcaatccctgataccctttcttccacttgattgattcggctattgatacttgtgtatgcttcatgaagttcacgtgctgtgtttttcagctccatcag

SEQ ID NO: 34318 - DNA, 1073 bp, Homo sapiens
caaattgtttgttgaatatggtgactggttattaatcttgaagataggaaataagatgttccttgattagtgttggtcctgaaagaacttattgtcttattaagaagaaaagactcaagaaaagtaatccaaaacagaatatagtcaagtttcaactgtatgtattatagatgttcagagaattgtgttgtgttgatttttgttagcatagaaggcattgtaaaatgtgtgtgactaggagccaattagaactgagtgtgtgtgtgtgtgtgtgtgtgtgtgtgtgtttgagacagtctcgctctgtcgcccaggctggagtgcaatggcgcgatcttgactcactgcaacctccgcctcctggttcaagtgattcttctgcctcagcctcccgagtagctgggactacaggtgcccaccaccacgcccaggtaatttttgtattttcagtagagatggggtttcaccaggttggccaggctggtctcaaactcctgatctcacgtgatccacctgcctcggcctcccaaagagtgtttttacaggctccattccttattcctggagtcatcttagggaaattttctgacattttattgccttagaactctcatctgtaaagtagagagaaagatgcctcacttgcttgctgaggactaatgagatacaattttgagaattcatttttttcatcccaatgattttcaccaaccatgatcatgctaaatttgtctcactcaaaaccaggcataatgtaatgctgttaagaacatattattctaatattcggtccagaattcctctctgtgaaccgtttctgtttagaatctgtgttcataaatgctgggagtgtgtcagctggtgacttcagaggaaaggggaaccactacacatgaggtaaaaggaggaatgtgttgttttgctactgagaaggactggggaggggagtggaataaaaggtgggagcagagaagagacaggccagcaaaatcaaaaagcaggtgctgcagagaaagagccaggagagaaacttctggtggtgagtgataaaaatggacttgggggacaggaca

SEQ ID NO: 34319 - DNA, 1103 bp, Homo sapiens
ctctgccaggtttctggaaataccttggaatatattatatatgtgcacacatgtgagcatgtctgtgtatgtgcaaaagacaaagacagttccatttcaggcatagtaggatgacagtgaaggtactgagcataaaaacaattacctgatgggagctttattagcctcactgtcttagtccattttgtgttgctgtaactgaataccacagaatattctgctataacagaataccacaagctgagtaatctataaaccataaaaggtttatagtttatagtaatctaaactataaactagtttagattagtttaaggctaatgtaaagaggctgggatgcccaggagcatggcacaggcatctggtgaggaactttgtgctgctgaaagcaggagaggacaagagcatgaaagcaaggggagacctagctggcttttataacaaagccactctcacaataaataacccactcctacactgtctatattaatccattcataagagtagagcctacatgacctaactgcctctgattagaccctatctcctaacaatgttgcattggggataaagtttataacacaagaattttgtgggaggcattcaaactatagcactcactgatccgtgggttgaatggatactccttcatgctttcctagtcaagaggtcatgagagaattagcaaagctaagtagtgataggggatgggaagatgggggaattgaggaataattagaaactaaatgactctctacttttaccatttgattgtgttcagagagagagacctctgaaagaacagaatgtttttggctactgtataaattcttcccatatttgcttagcgtaaaataataggcaaagactctttatcctctcaaaattttaaaataaattattcacttctttaatacttaacataatagtgacgccaccctgtatctgtgggttctgcatcagtggattgaaccaactatgaatgataaatgttaggggaaaaaaattccacaaaatttcaagaagcaaaacctgactttgcagtgtgacaagtactatgttgaacccatgtgaataatgtgatgtgtaggctttggattagg

SEQ ID NO: 34320 - DNA, 1144 bp, Homo sapiens
ttcaataactacatgtaatgtggatgtagctcatccttatttttaaaattatttcttcatacacagggattcttaactttgaatatttgggcctccaagggttttatatttcatcagagagtttgggaatctctgagaaatttatgaataatttttagtgtgtgtgtatatacgcctatatctgtcaaagagtatcttagtactcagattttcagagtttcatgatacgaaaaaggttaaggaccactgctttatgtatccttcatctcctacaatgaggagaattacagaaaaaggttttacttacaactcttaatgacaatgtttgtcctttaagcagaacataactgagcctattctgttgattattgcagtatgcacctccactgtaggttaccttggctagcaatataggaattggaccagccagtgcagtcaccttgcactagagctcatattagttgaatactcttcatcctacaaaagtatttgtctgaaacataaaacataaataaaacttatgactgtaaaaactattgtttcaaatcataacacagaagatctaatctgacttatagcattctttcactctctacattgagaatttgcatcaagaaagtaaaaatgttagaaaatggaaattctgtcattttctgttatgtgattactggtgcatcatgactttgaggtaagtggggatgatatttaaaagataaatgagggttgacaaggatggaagtagagtaggatatagataattacataatttcctctgtatcttagtgtagataccagacgaaaagaaaaaaaatgcaaataaattttgaaacatatccccaataatttaagaaccccaaaaggagagcagtttaaaaatgttagaaatatgatgagaacatttttagtgtgtataatcatttatcattaagtagtttcttcatatttttattcctagatagcagatgacagctgctcctttgttctgatggagaaaacctcttctatcactgtcttacaaaaggcacttatttaaatccttggccatctactactcacttagcagtagttttattttcacaaatttttttatttcttaaaacagaaagcattgtttatgtttttatggagaaactgtatttttcct

SEQ ID NO: 34321 - DNA, 1044 bp, Homo sapiens
tgtgtacaataatttacacagtatactctagtcaatttatgttaactttatttaaaacacaatttatttggccgggcacggtggctcacacctgtaatctcagcactttggcaggccaaggcaggtggatcacctgaggtcaggagttcatgaccagcctggccagcatggtaaaaccctgtctccactaaaaatacaaaaattagccaggcatggtggcgggcacctgtaatcccagttacttgggaagctgaggcaggagaatcccttgaacctgggaggcagaggttccagtgagccaagatcgcaccactgcactccagcctgggcaacaaagagcgaaactctgtctcaaaaaacaaaccaacaaaaaccacaattgatttgatgaaaattagttttaagtaaatgtttgtaaatagatattggttgaatttttggatatattatgttgatttaacttttaaaatgttgtttaaaagtgtgaagctatgaaaagcctgataatgtgactacagatatttcagttggactagaattctgactttgaaacttattaaattaatgcatactggaagtactttgatactcaagttgtttcacaagatttataatatagatggttttgtttgactaaagaataatctcatataactagaatacttgtggcttttattatctttaaacttgttgcatttaaaatatttttaaaaccttcttaacaaaacttcttaaaactggaaaaaatatatattatgtatctatgtatcatatttatcacatgaccacttttgattccttaaaaagacattacaggcttaaattccattttattaaaaaaaaaaaattgcctgtaatcccagcacttcaggaggccgagatgggcagatcttgaggtcggtagatggagaccatcctggccaacatggtgaaaccctgtctctactaaaaatacaaaaattagctgggtgtggtggtgtgtacctgtagtcccagctacccaggaagctaaggcaggagaatcgcttgaatccaggaggcgga

SEQ ID NO: 34322 - DNA, 1040 bp, Homo sapiens
cgcctggccaatgagggagcaacacaacagcagagccggcgccgccgcccgcctgggctggcgcctcccgcgcgtccggtgccgctcgtggtccgcatgcgaggccctccaggcgctgccgccgcgctctgggtcgggcttccgtggggtttcctggcggctctggaggccacaggacggggttgtctttgtgtcattcatcacccgagtttgccctgtttgacattccctttacagttgttgcctttgcaccttcagaaggcagtaaacagttggagctgctttgaagttggccagagatgttgggcactgagagaattaagcatcttagccttctgatacagcgagatttttgttttgttgggtttctttatttctttttcttttgccaaccacttgaagaagtctgcgaaaacgccaaaaaatgcagttcgaaatgacagtgccatttcgctattgcctattttgtccttgattttattctctggcacttttgtctttaatcgtcgtatttttccatctcttgttctcatacccttctactctatttccgtcttacacaagttctttaaccttagtttatttctttgtcagaatcgccaagaagccagttatcaaatagcgagccttctccccccaccttttttttttttttttaaattactgtactgatgtttgttagatattgttcgaatagacctggggtggacatcagcactgccattgtcagccctgtgagggttagaagagcttggtgcatattaaacactgaacagatgttagctgttgttgtcttgagcaagttttcttaccattctgggccttaatttctttttgtttaagatggaagtaatacctaatttttaggttgtgagaattatttgaaatgtgaaaaatattgtcagtgggtctgagccgtagtaaacagtaaatagcagctggttacagtagtatccccttaatggggtaggtatacgttccaagacccccagtggatggctgaaaccacggatagcaccaaaccctatatatacttggtt

SEQ ID NO: 34323 - DNA, 1045 bp, Homo sapiens
acaagccagtggaggtagctgtgttatgaaaacatttgatcttttgggagcctttttgttgttgttgttgtttgtttgtttgttttctgtttgttctatttagctctctagcattggggtctccagaatggagacttgctatatgaacagacgttaatgttcatattcagcccttaagtcagatagatgggcacatgccttctacaatatgcagatattctggaggaaaggaggaattctgtaggtcaagaagttcaccatgctacctagtatttattcatttgctttcagcatgttgtaaaatattgcagtatatgcaatacataagtggattatattataaaattttagccaatcctttcaaaatggaaaagtggcttaaaaagatttctgcaaagaaatcacagattgaagataatgctaataatccatgcatatgtaaacagtaggaaaatggtggagctcatacttgtattcctcttctgagctgctgtgtcacactgaaggattaaaaaaacacaaagacaacctagatagatctgataacttggctgagacactgtcaatgatattaattaacaatagtaagatcagaaagatattgctgaactatcaactaggaaatggagtgggtagccggtagtattgccaccactcagctgtttcctttttttttttacttttttttttttttttaagacagagtctcgtgcttgtagcccgggctggagtacagtagcgccgtcaatctcagctcactgcaagctttgcctcctagattcaagcagttctcctgcctcagcctcctgagtagctgggattacaggcgcctgccaccattcccagctaatttttgtatttttagtagagacggtttcaccatgttggctaggctggtctcgaactcctaacctcaggtcatccgcatgcctcgtcctcccaaagtgctaggattacaggcataagccaccgcgcccggccgttgtttactctttaagctaaaatattctctctccacagctgcaattagagagctgcatggtga

SEQ ID NO: 34324 - DNA, 1071 bp, Homo sapiens
ctgtcccatttccagatacatatgaaataacgaagagttattaaattattctgaatttgaaacaacatatttttatacttaatgaattgtatctcattaatctcttcccttacatcttcatgtattgttggtttgttttttggttttgggtttttttttttttttttttggtataagaactaacatcaaaaggcctgtttaaagggaaaggttaatgggctacttaatattatgaacaaaacaaaaaaacaaggctgccacagtggaatattatcttacaagaataagaactacataaaacagatttgtaaaaaatacatatttgaagtattccctgtatttccattattctttatggaatataaagtaagcatgaaaggtagttaaaactttcaggtgcctgtagagtcataataactgtattttatgccttgcattcacgcaaattcacattggatgtgatttaaaagtagacattctctttttcctcttttaggatatgtttgattactggaaaattaatatggttatttgttagaagtctggtttataaaaaagccaaaagtgatggaatttattccatttgtcttaggaaggcccataatacttgtttttcttacatgtgactagcaactttctccacttaaagactaaatacctctttatatgatgtaaattattctaattcattttaaaatcttttaggtcagcaaaatgtgtgtcttcagtgctttctctaaaaacgttcctttatagctttgtacttttttttttagcgttgccattgaaagttaaaatgtttgcatggtttaccctctgagttatgtttcttctagtgagcatgcctgctgtcactaagtgaattatttactactttttgtaggtctatattttaataattattgggataataataattgtggtatgctttccatttacaaaccactcatatactttagtgtatgtcatcctcaataatctaatgaggtaagtagtataagtgttagctctttgcagataagaaactgaaacccagaagtttattgaattgcttcattgttacctagccag

SEQ ID NO: 34325 - DNA, 1060 bp, Homo sapiens
agggaacaaggaacagatggtttgtatttaagatctgactcagatttacaaaccttacaatgaaggcttactatggaagtaactcttttggttgtctatcatatataccctgggtgacctttgttgaacctctttttgtcacatagggtttatgtgaatactaaattagttaatatgtgtaaggaacttaaaataatatttagtatctagtaacctctcaataaactttggataaagcattaataattgtagatgtgttattgtgtgttattaatatcatgtctgatatactaatctttatttcttccttatatttacgacattttttctgttgttttacccttgtatttaagtgactattcaaatggtatcagatttgaacattgactttcttttttaagcaacttgaaaatgtcattctattgtattccctcatcaaatattgtaccaagaaatctaagcataataatagtttatagccatcttatgtcccttatgtatctgactgtatttttaggggtgctacaaattctaatgtatttgttactcccccaaatcttatgatatagaaattattataatctatattatgtcaacaagaaaactgagctatgaagaagttaagtatcttgtttaatgtttcagagctagtttttgactgagcctaaactcaggggattaggcactgccctctccttcccctttatgaatataaacatgatacttttccttgttagatggttagccattcttgttggaaaattttagaacattttctttgttttttattatattgaattttaccattgtttgtccatagggaattattcataacttctttagcacagttgcggcccttttaatcagtgtgtgtgtgtgtgtgtgtgtatgtgtgtgtaatttcgaagaaattattagtcaaataatctatacaaagtatctctcttgttatagttctctagaatttcttgcatacagatattgacatttttacctttataataatagcttatagccatattgtgcctactctgtgtctggctatatttttagggatgtt

SEQ ID NO: 34326 - DNA, 1027 bp, Homo sapiens
acttagccttatctcatcccaagcctttgaatctgagaaaatgccaagagatgctagactgttccatgaataaaagatacttcatctgacaagaaaagaggagcaggggtgtatttttttgggcttattgttggtaccatattatttctttgagaagttattttacttttgagttgaaaaactgattgtcatgtcttctatctttataaggatacaaagtcatgagagaaaaatatataataatcttaccactggtttctgccctttaaaagtgtctatcctgactaacatttgtttgcttataatccaaaaaaaaaatgatagtacaggaaaaaagcttgataaatgatatactttctgccactcaaaaatggtttgattttgtttcaggattcatttcggaatgaaaggcttcatcatgattaatccacttgagtataaatataaaaatggagcttctcctgttttggaagtgcagctcaccaaagatttgatttgtttctttgactcatcagtagaactcaggtaaaaaaaattaaataaaagtacttacgctgcaatactgcagagcttggtttgggatgtcacacgtgtaactaaagaaacaaataaataaagagtttgtaattgatgaaacctcattttaaagaagccttcagataatataatttgtaaggtctttgttgtttgcatatgtaactcttataccctgattaacataaagtgcttatagcaaagctcattttaaaagacactttgtgaaattataaccagacttatgattaatgtgttttatattcctttctatagaaactcaatggaaagccaacagagaataagaatgatgaaagaattagatgtatgttcacctgaatttagtttcttgagagcagaaagtgaagttaaaaaacagaaaggccggatgctaggtgatgtgctaatggatcagaacgtattgcctggagtagggaacatcatcaaaaatgaagctctctttgacagtggtctccacccagctgttaaagta

SEQ ID NO: 34327 - DNA, 1050 bp, Homo sapiens
gtcgttgaagggtcagctgtacatatagatattcacacacaggcaacaagcatgaggcatcagagggtttcttttgggattaccattgacggcacatgtgccaaataataattctgcaagggtaacactgagatttatgttaggctgtgtcagaaaaaaattcttcagtaaggtctgtgtctgagctcttccatgtgttaataagtactttgatattaatgcatgtatagaaatgcatatcttttctaaagctcgatagtgaccttggtggtcatctactcctgtgcctattttcccttcccttctttctgttttatattgttcttggtaatttttttttttgagtccagcaagacttctcaaggtgtctgatagacaatgctgagactttgaagatgtctaatacagaataaatattcaataaatgcttgaatttacaattaaaatgtataaataggaatcatattttgtcagtaatattatcagttcaaaatataactactgttaatggtactaaatagatccgtaagaaatagagctctagaagatattcatatacgattgactcttgaacaacacaggaattggggtgctaacccctcccattgaaaatctatatacaatttttgactcttcaaaaacgtaactactaatagcctactgttgatcagaagccttactgataacatagttcacacatattctgtatgttttatgtgttacatatgtattattacaataaagtaagcttgagaaaagaaattgttattaagaatatggtaagagccaggtgtgatggtctgcgcctgtaatcccagctacctgggaggctgaggcggaaggatggctgagcccaggagtttgaagctgcagtgagctatgatgatgctgctgcactccagcctgggcaatagagtgagaccctgtctctaaaaaaacagaagaatatcataaggattatatttactactcattaagtggaagtcggtcatcataaagttattgctcctcatcatcattacattgaatagattgaggaggaagaggagg

SEQ ID NO: 34328 - DNA, 1060 bp, Homo sapiens
aaattagcacattaaggacttttagttgattgtagcatagttaacatggaaaacgaagagactgaaaatgcatgtaaagaagctggtgcagagtaatgggcaagcgatggttaccagcctggggtcaagacactggacgtggtaccctagtaaaactttttaaaagtcaacaaggactgtggcagatttgataggtaggatgatgcaaaaggtttcaggaccaaataataaaaattttcacattgtgggtctgggaaaattgggatgcagcagtgaagatgcagtatgtgttagatatgtgaaagaaccctggaatatccaggaagacatgtcttaggggctgcgatccaggatgagagaggctgtcggcacagtgctgttgattgaagcattccaacttctcagttcagtaagaatgagaaaggaaatgagccaaggtctgagcttcagcaaatacctataactacaaagtgggcaggaaagaaaaagcaaaggaaacaaaaccataggattggacataggaagagactcagggcaccactcggctgtgggaaacccgggaggtgggaagtgcggtcatgtctgtagagctgggggcaggggagggagctggtgtgcagaggaagtcccagcttaagtcttcataaatatgtccagaactgcgtgctttttctttgtgtccctgcgtttcattttctgcatcactcttcttgttctccaatacttttctctacagcactctatatcttcttccactcagccgcttcaccccgtgttactatcatagacatctgaaatacatttagataattttatatatatatatataatacacacttaatggtttttaaattttttatgaacattcataatttttttttatgaacaagaactttcatagttttttatgaacaggaacttttttataatataggtatacatttatttgaccaagtaactagatactgcgttgaacacagtagctggcagatagaagatcttcaatatatatttgtctactaaataaatgattaatgttctgtattggttttctatgaat

SEQ ID NO: 34329 - DNA, 1051 bp, Homo sapiens
aaagttaaggcaacagcaaggctctctattggacctttctgcctctcctccctccgtgcattcccagtgatggcgaatactaccagattcagctatcatctcagaccatttctggtaaagatctttaggttatgtgtcaaactatagttcttgggccaggtatggtggctcacatctgtaatcccagtactttaaaaggctgagagggaggttcacgaggtcaagagattgagaccagcctggccaatgtgggaaaccccatctctacgaaaaatacaaaaattagctgggtgtggtggcgtgcacctgtagtagtcccagctacttgggagactgaggcaggataattgcttcaacgcgggaggtggaggttgcagtgagccgagatcgcgccaatgcacttcaccctaggtaacagagcgagactccgtctcaaaaaaaaaaaaaaagaaaaagaaaaaacctatctatacatacatgtataagacatgaggcgatgataagtggtgattagtgttctcaagaacatgagccacagtagcggatagtgacggagacggctcatttttgatagggtagcagataagtccgtggggaggactttgttgaaaagatttgatgacttgtagcaatctgagggtgggggaaatatttcaaagaaggtagcccagaaaagcataaagcctctgagttgttgaaggaagagaaagaaggcatgtatgactgaaccaagcagagggaatgagagacagaggcagcccctctgcttgggagggaccaaggagcatgcagagtcggcttggccaaggcaagtttctgagtagactggggagcctttggagggttttgaacgggcgtgaaataactgacttaatgtttgaaaagattaatcactctggcgactgttgccaatacttttgagctgggaagccactgggagagtttgagcaggagggcagcatgaagtgacttgggttttctgaggatgatttgggctgctgtgtggaatagagacggtcatggaaccagagtgaagcggcagcatcggggg

SEQ ID NO: 34330 - DNA, 1091 bp, Homo sapiens
atattcctttcctcttctcgcttccggtgctgccagcgttctttcatgtgtggctacatcactgcaacctctgcctttgtggtctccttgccttctctttggtgtgtatcaaatctccccctccctctctcttataaagacacttgtgattgggttaagggaccatcagctaatccaaaataatctctctacgccaagatccttaattacatctgcaaaccctccttctttataaagtaacatttatagattcctggaattgtgccctatgtctttgggaggccattattcatcctactacaaaacattaagtttgggattcttcttacacatccaagtggagattgggaagaatttattaatgagtgattaagaaatagagcagtaaagaaaggaaagaatgtttccaaagcctccatatgtaacaataaaattctccttatgatcagggaaacttttaggacagaagaaaatgaaaatagggaaaagttggagcacatggaaaatctaaaagtcatttaaattgtgtttgtttaattatagataaatgcatcatgctgcctttcaaagtaagttagtagaggacagagattaggtcaaataaacaaattctgtagaagatctgatattccatagggataataaatactgagtggcattaaaagtcaagggaagtaaagataaaagaatcctaatgagatgtatcttactttcagattttcttattctatttattattttaccagacactcctgaattttaaaactagtgtaattatatgtaaggaacaaaatgtcacaggagacaaggttacctttgaaagtcaaagaactcatgttctgaaatgtaagatacatagcctttacctgcaagagctttgttcagtattaatgtttgggatcatgaagggaatccgtgatactgccatggttgcttaactgtgtgacatgctctatatccagacctatagctagctgtgcattagagagtaggactatgtcacagccgtataaaggcattttgtgtaaaaatacatggtcaatgaaggacttcagatggagaatcatgatttatatttgtggccaaaaatc

SEQ ID NO: 34331 - DNA, 1051 bp, Homo sapiens
ttgttccaggacccccaggataccaaaatctgcagatgctcaagtccctgatatgaaatggcatagtccttgcatataacctatgcacaccttttcatatatttaactcatctctgcattacttcttataatactgaattcaatataaaggctgtgtaaataattgttatactgtatattttgtgtaatttttttattgtttcattattttttgtttccaaatattttcgatccaaggttggttgaattcatggattgggaacctacggctatggagggatgtactttggttgggacctagagtaatctcaggtggaattctgagattcactggcttttcctcttattagctgtgcctttactgatgggtagatgccttctctcagcggtggggtgagggaccatttggtgtaaactcctagagcaacctgtaggaatccttaagcttatttcataacaaattctgagacagtctctgctcaatagatgtgtttactccaagtttcctattccagctctaaatttaccatcagttaatcctgatgatttatccttgactggtttttttaatgtcttgttcataatcatttatgataactggtttaacttttgttcatatactcacatttgaagtaagctaagggggctaaacttttaactgactggataaatccaccacgttttcactttaaccctaattagtgcctcatgatagaagttcattaaggagttaattaagaatgtttgagttgggaggctgtcctggaacagaaaatcatttccaaacagtcttttctgttccgtggcttaagtggaaagtagaagtgatcatcttaaaatattgtggcatttgttgtacctagatgaaatatcttggcatatttttatttccttaatgctttgtagaaaatctcagacattttaactaatgaattagggatttaaaaaaacattaatgtaaccttaaatttaaatgatttcttcataagccattagtaataggatcatatgattaatcacagtgcacagcattacttaggaatgctgcagc

SEQ ID NO: 34332 - DNA, 1031 bp, Homo sapiens
acaagaaatttaataaaataatagctattacattgttagagtatatcatatttataatcataagtctagaagtgttgcacttagcttgtaaagttagaaagacactgagtgactagtaggtactagtagtacatatgtggctaataatccaaggtaagaatttgttcttcctaacttcagcgctacatcaaaacctttggtttatgcattggataaaggtttataagaaaagcaatttacatgcctgggatttacaataaccttatcaaatcctacttaaccacacttgacccaaaaaagtgatggcaccatagcaatttagctataggcgattcctcctgcctttccagtctgtggatgtatccctaaagatgaacctaagataggagataagaacctcaggtccgtttagtcagtctcacttccggtattcctcggtgtgagcatctcatcaggctgagtgtgattctaatgttcagagatacatattttttctagttactcttcatctggaatagaactgaaaaaagaaaatattgatatgtttcagtgctggcgcaaagattttctggtggactttttgaaagatcaaatatctgtcttcaatgtgataccttcttaaggaatttcccggggaaaactggatagtgattttagacctcaatctctaaacacagtgtaactctaccctacaaaattcacagatttcctcctcaagaagcttttatagatgtaatgggaaaatattattagcaatattcatggtattgctaaaaatataatagcctttttcatatctctcttgaggtcaaaattagtaagaataatataatagaatctgtctaattcagtctgcgtaagtatttgattctttcttttcctaaggaagtttaatattaaaatcatgacaaatctttgatcttacagggttttttttgttgttgtttgatttttttagagacagggtctccctatgttgcccaggctggtttcaaactcttgtgctcaagctatcctcccacctcagcctc

SEQ ID NO: 34333 - DNA, 1077 bp, Homo sapiens
atgtttcagagaggaaataacaatggcgataaccttaaagaaggacctgaactacaccctacagcaaggggattaaggatggaaggaacagtgcaaaagctgtttttgtttagggaacagagtccagaagttcaaaataaaagtatttggaagagatgctggggtgagtattatggttccaatgagacatcaaaaatttagaaataggaaacatgaaagaactcataaaagtccttcatacatgacgaattttgagagccaaagcctcagattaacctaggcatatattatcctatagatagaaatcaggtatcagaacaatgaatgttattaccaaaactaatctctttctctctctacttctttgcagcagagattgtggcttcaagtgcatggaaacactgactatatagtgtttctggaggagcagattgtagggtcacatggtttcaccccatgatggatccaagtagttccagagtcacattcattgaaatctattcgagaaggggtaaatcctgtactcaaaggagggcctggggaacagcagagaatggaagaaacctattgttctactttctatgtattatttgaattgtattgacttctctaataaaagagtaatgagggaggaaaaaagaagttaaaaagagatgaagagctgggtgcagtggctcatgcctgtaatcccagcatgctgggaggccgaagcaggcagatcacttgaggtcaggagtttgagatcagcctggccaacacggtaaaaccccatctctactaaaaatacaaaaactagtctggtgtggtggcgagcacctgtagtcccagctatgtgggaggctgaggtgggaggatcacttgagccagggaggtcgaggctgcagtgagccatgatcataccactgccctccagcctgggcaacagagcgagaccctgtctcaaaagaaaaaataagtgatgaagaaaaaagtgaagacaaaaaaaaaagatcctctgactgcgaatagaaagggaaggatgaagagaacacctaaagtatctatatttatgtgggcacttggcatctgtttttggta

SEQ ID NO: 34334 - DNA, 1024 bp, Homo sapiens
acaatattttccccacacccacaaattactcactaatttttatttttaccactagacatattatctctgatattttggttcataggaatacactgatacatttactcacttcattaaaatgttcctcattgtctatgtttttctttgtgtgtgtttatatttgtttatatataaggaaaggctatctcactatttgttctaacacaggagttccaaaacttggttatgtatcagaatcacatgaggagctttgaaaaatacagattccctaggatttacttcgaacttgcagatttgaatttcctgataaaggtcccaagaacctatatttgaataagcctccactgagaatctttggcaagtcagtcttctgataggcatttggaaaccaatactaaatatttctccatttgaaattgacccaagtcccacagacaggttgtgagtttttctttttgttttaataaacatagaaattgacccttctggtcttaaagcttgaaactcaccaggtccagacaatgagataccaggcccctcaaaaggtattgaagaactgaaactcaccagattatcacatccagacaatgagacatcaggccccttattcatcatgattgcctccttactcctcccttgttcctgttttcccacacatagttacatttcttccctgctataaaacccctaattttagtcagagagttggatttgagactgacctcccatctccttggctgtggcaccagatggaagccttcttcctcggcagtaactgctgtctcagtaattggctttctgtgtggcgagcagcaggacccagaccgaacccctggtgtttagttaacacattcgggactaattgtgtttaaatacttggggtaaatgaaataatacagatgacaaagctacatatatttatgaggagctctattttgatcatctatttggttttcagtctggtgtctaggacttcttcgagggctggaacttacttcagcttgttcacccatgaattccctag

SEQ ID NO: 34335 - DNA, 1049 bp, Homo sapiens
atatagtagactgatttttaatagttgtctattaaaaataaaataaagcataaaataaaaataataaaaactaagaataagttgttgatgtagtttttaggatttaattttgttatttagaagaagataaatatttataggtttaagttttggttgtatataaaattaacagcagcaagaataaataatcccatatttcagccaaaatggcaactagaaatgataaattggctttcttgtgtatatgtgtgtgtgtgtgtcttttaattttctatgtcaattaatatgtactatcagtagaatagaatattctgagaagataatggtatcttgttgaacatagatttaaaggttaagcagttattattgaaaaataaacataccaatttactttccatctctaagcctttttcttaaagtatatttacctaaatttaaacagcatctataatattgataaaaatttttaaaacataaatgtcaaattaagtgctcaataaatattaggatctgtctatctttgatctcttcttattatcaaataaaaatcagtacactgatatctttcttttaataacaaatagatgcaagatagtctaaggttaacaaccagaaaatatttgttttgtgatgggatgttcataatttctttttctcattgccttacagatttatttattttaatttcatgtaggatataacaattccttctgcaaaataaatgttttttttgataaaattaaatacactaaagtgccttcaattcttaagtatgttgcctaaagatttgagtttcaaaagtattaaatttatattttgcatgtgtcattatttatattgtaggatttttcccaaatacaggtcctcttgtgttatcattgtgaagttttttattcatacttttcacattaatacttttccatacaacttaattattttgctttttatattcagagcagagttgacaatattgcagttattgccaactttattttattttgatttaaaatatgttaaactcatataaagtattaacactcataatatgt

SEQ ID NO: 34336 - DNA, 1029 bp, Homo sapiens
acaaacaaaagaaaattttctttttgtttggttgcttttgttttgttttgttttgtttttgagacaagtctctgtcacccaggctggagtgcagtggcacggtttcagctcactgcaacctccgtttcctgggttcaagctattcttctgcctcagcctcctgagtagctgggattacaggtgtttaccaccatacccagctaatttttgtaattgtagtagagacagagtttcaccatgttggccaggctggtctcaaactcctgacctcaggtgatccacctgccttggcctcccaaaactgctgggattacaggcgtgagccaccgtgcctggccagtttggttgtttctctaaataaagtttacaggtacttaacacgtccctattgaattaacttatgaattagatttgtccttgtttgtgttttaaatccagttattttgcccctacctgaatctggttatcccggggtagattatcaaagataacctttcctctttcagtgccactctctctccaggtctgtaaaaaatgctctttctagaagtttttgcttttaaaataatttttttaattgtaggcttaaattagtagaataaaaaccttcaatttagactagaaaattagctgcaaaccttcagcagcaaatttcctatcaatcaaggtgtgataattctgatcgtctgtattctcttgtcagcaaacagtgaaaagcctttaatgtatatgatagaagtctcaggtaggaatggatcggtatgctatagagaggcttaggcacatatgtcatttgatgttaaactttagtccttttttctgttcttctttccctctttttcttttttttccagtatttttcccccctgaaaacatgacctttctcaactggagaaacctagagactgggggctagcataaattttaattaggctaaagtgattttaagtggttccctttgcatctactacctgttattgatgaccacatctcaagaaaaataaacaaaaaaagataacaggttagttt

SEQ ID NO: 34337 - DNA, 1047 bp, Homo sapiens
gtactccatagcattgaccagtaaaaggaggaaaaatgcttttgaaatcagtatgattttatttcatttaatcaaaggctaatcattacaaaagcaaatgatttgattgtttggttgttcagaaaataattgtaaatggtgtccatttcattaagcttttaaaaataaaggcaactacaataaatagttacagcctgtttatgtccactttcctaagttttaatacactacaaaattcagctgacttactgttcatataaccagcttaagagtgtaagtggtaacttggaagatgacatttggaaaaatagactgctctctcagccccatgaggctcactgagcatgaaacgaccactggcaccatggtggccttgtattatcaagtaactggagtgaagttgatataccagcagtggctggagtcaggttctgactcataaaatagaccttttcatgctctgctacgttctcgttcaggaaagctaccatatgtagagaactgtgtacataaaatttggaatatgatttcttgtagcttttggataactgttatgaaactcacacggcaaaaaatattcttagtatttcaacaaaattatttttattttattttgaaaaatgcaattttaaaaaaatctcagttgtttataaatatcatttcaatcagtcttttatatcaaaagtgatatgtttaatatacacttactgtgtacccacaaaaattaaaaatagcaaaatttaaaaatgctgttttaaacaaacattgatacttgtatgtagcatctaagatggctttagcaatatatattaatatacaatacctttatatggttatgataatagaataaatactgtttgttctaagtattatttattcattcatgcagtaaatatttattgagagtcaaacatgtaaagggtaccatgctattaattagtttggaatctaacttccaattggagtgagtagataaaagcaacttttgttacaaatgaagatttacatagatcattcttttagtcacaaaagtggaagggagaattt

SEQ ID NO: 34338 - DNA, 1045 bp, Homo sapiens
taaaattcagtatattaattaaccaatgcttatcaaatagatctacaagtaaagcaccgcattaaaagctttatgcaaggaagcaaaaataaggtaaagccctaatgtttaaggagcataaaatctagttgtagagataaaatatgcacggcaagatttgtatggcagtagaatcactgtgtaactaatattagcaaagttgaccagataaaagttacagcagttcaaaagtgaaacatgtcttataaactggactaccctgaaaaagtggaaggcttgactcacaggttcaagataggctttatattggcagggagggcatttcaacatggtgcattggtatgtgcaaaatagagtgatagcaatattggagtaaatagcacagggattcttctcaactgggcatcagagcctatggcttaatgaagaaatgaactccttttctgtgttagtcgttcttcaaatatggggcaatctctgtgcttctggtctttgcactggttctctagtccccctacctgtgtccctgtaattatttgctgactcactttgtttttttcgatgttgttgttgttgttgtttttgctgcaaatgacaagatttcattctctattatgtctaactaatatttaacagtgtgtatataccacattttaaaaatttatgtatccattgatgggcgcttaggtgaatctctgttgtcttttgtgccatccctttaggatctaccagtctgtcttcatttttacttatttgctggcagatgacaagaattgattccccagatcaaatttcagaaatctcccaacaagaaaatatcatgttaacggtttgatgtagtacctcacacacacacacgtatctatatgcacacaccacaaatatcattgttaacagtttgatgtagtaccatacacacatctatatgcacataccacttttttaaataataaaattcggttgttacttttaacaattttttttccacataataagcttcctcctggcatgtttattctttgcttgtgaatgaggcttctcaaac

SEQ ID NO: 34339 - DNA, 1046 bp, Homo sapiens
ttctaatagttcttttggcattgttaatagttttattttgtctgatgaaccttaccagtaaaagaaaatgttaaggaagatatttcaaactgctttgattggtgggataaaatatcctgatgcagtgggaagaagaactctttgagggaataaacagtttggaggagaatgtgctgttacttccagaaaaaaacctattttccctggaaaaaaataaaatccatagaaagtgcccttggaggcatggcaaatgaatgaagacttggttatgttaaagcagcttcattctgagatggaaaaagtgactctttcaatcttaattctctggttagagtctaatagaatttttggtcttgtctctgtgcctattctgaggcccttagagtccttaaaaggtgaatgaattaaaaaatatgaaggatgtttgtccattaaatgccataatgtctctattatttacctatttctttgtaacaataggaaacttgttgatggtagaagttgttcagcactcatacacacatcgttttctgcattactctaattgtttactttgcaatttaaatgctagcagggaacaccaaacattttgctaaattccccattgctgaaatgaagtttaatagccaaaaaattgctattgtatgtattgctattgtgtgtgtgtatatatatatatgtgtgtgtgcatgtgtgtgtatatacacatacatatacctatatttccaaatttgttgtgtaagtatatttcttcgactagcaaatttcagattacaggtactaatgagagtcagatcaaacaaatttaaaatgtattggcaaaattcatttaagcttttataataaaacttaattaaatcatgttttattaatttactatttgtagtaatttattagtgctaaaatgaggttcacttttgtataagaaaaataaataattttactaacatgatagaatagaaatacaaaacacatattcaaagaaaaaacgacagagctagattccatcccccccccaaaaaaaaaaaaaaacacatttgaaggca

SEQ ID NO: 34340 - DNA, 1842 bp, Homo sapiens
atcaccttagaattacaatcctgaatgggaatgcctagcttgacattagctttatttcagtgaaacagattctggcacaaaagaaaacagcaggttaaaaagacataaggaacacagctatgagggaagttttatgcttaaaggtaaagaggagtggtttgaatttctaaaagataaaagaataagccacttagatctttcagagtactgaaatagtcattttttacgtaaaagcaaaactcgcagcttcagagagttcagagaacttcttcctggagctactgatccagccacaccagggattgtcagctattgcagggcactctgtcagctgtcaggaaataaatctctctatcagacggaagcagtctgagttggagcaagtcctccacagcatgtcaccccgggagcgctcaacatgcttggcgaacaagggctccctgttgtactctgatttatgtatatctgtaaagttactcctgatagggtaaaaggaggagactgatcaagagtctgtcacactcgaaatgctttcatactgttgccaccccactcaacctgtcgtccatggaagcaaggaaacaaaagcactgcagaccgttctcagcagccctttcctttcctcggtgaccctttcacagaccgttaccagaaccaccactcacttcttgtgctagtagagaacagcaagtagttatatttgtgttttaaaggttgtcctgttaatagattgtcctttcacacatgccatgtaccttattatctgaaaatttactgaatgctcaccttgctgacaaatttcacacatgcctaagcatgcaactggatttccccacatgatcatttccatggttcatttcctcatagctcaggagtgatcagattttgtcttcattttattatgttttcaatccagtgaagtccaaattatatcgtatttttgctagtattaatgggtaaaattgtggatattactgtttggttggtgttgaaattttgtctatcatgtgtaatttactgaatgataaggatttgaagaaaatgaaaagccgggaatactgagttttataacatgatacttgcaagtaaatttaagatacacatcagggctttgttttgcaagaagaagtataaaaaacaccacagaaaggcattaactttcgactttaaattgcagaactcaaaggtatatatgtatacattttggagagttttgttgttgctgttaatagacaatatattgaagtgagtagcccagttacagaagagcattatttgattagggctttaaacaaagcaagaggggttgtaggatttcagaattactgaaaaagataatgatggctgacaatgttgaagaagacttgttttatgtaagagaattatgtagacctggtgtaattgtgaataattttatagctgatttttttgtttgcacccagagttaacaatatatttttaaacttactttgtaaacaagtgcttcatattgcagttatgtgtatagatagattagatagatagatagatgatagatgatcgatagatagacagatagattttccttaaccttctcaagagattatatgcctagagaacagaactgtgcattgtatcccattgtaagtaactaatcacttacaatattgctagaattgggtatctcttcagtaaacattgattgtaaaaataatcctagtaatccataggatttaccccattatttgttttaaactttatgcacatataatttatttttgtctttgtattaatatacctggtttctccctgccaccactgccttgcctgtgttttatttatcttttgtgttatagtactttt

SEQ ID NO: 34341 - DNA, 1051 bp, Homo sapiens
gaaaacattacaagagctatactatgcctaaatatcaacagcttgcaaatatatgctgacctccttcttagttgtggatttcctggattgtggtatacagattttgagttgtgaaaatctatgaaaaaaatctatttcccctcaaattacagatttcttaatatagtatggatattaactttagaaaatttaacacagaaaaatatcactgggttccagtaagctatagccatctatattacttcataaataaaaaatactaaaattaaatagcaaaccaggctaaatattggccaatcaagtcaggtcacttaaaaataatttcttgaatgaatcaaatagggagcaaagattggcaatctaggcctactggcaaacaacaatcattcccttccattaaccctcttaacaattacttgttcaaaagcctacgtagagtaacagctgtggaaaatatcaaaggatcaaatatagaagtcattagaaaggatatgagagattcaaaagggaggcaaaagagaacttacatgtattattggacgttgaagagaaaaaatagtgaacaaacaaaaaggaaaattgaagttataactgaagaaaaaagaaattgaaactgtaatcaactctttactttgaaatttttatgtacaattattatcaataaataattatcttttaaaattcttgaacagcaagaactgacaattatatgatcaagaatgaaataaaaagtcatgggccagaggcaagggtgatattaaaaatcagaatggacatactaaccaatcagaaaggaagtgggttatgcgccttcaatgctactgctgactgacatctagtaattgcactgagaggtagagatgttgtttcttcgaggcgggtttttatcaagttatttattccttctgcatcctcctctcacagtgagtgagattacaaaggttacattgggtaacttcggctactattattctctgtaacaatcttcagggctcacatgaaatgaatccactaaattctggctttgggaggtgggagtaagggggttata

SEQ ID NO: 34342 - DNA, 1653 bp, Homo sapiens
tttagaaacatcgtattctgtgaaatgccaagcattttcttgttgttttacagattacatagaactggacatatttatttgatagtaagatgcatacaatttttatttttcagacttgaatgaagtgatcatgtaaactagagaaaggagattaaaaataacctctggatattcctctcatgtgatctttattctggatgaagcattaggacagctaatagccgtgtgtcactgtaagtattgtgtaatgaacttagaatgtttatttttttgttgctgcataacctcgtatgttgtacactttcacagaatttaagaatagtagatgtagtgtagtagcagtaatgggcagaacaataaaaactaaaatactaagtggcagggatagcaacacagaaggggaaaattattctggttatagaatcccttaaattgagtaaatatttgatataaacaaaagtgaaggacaaaatgataattatttatgatatcaaagtgatctttgctagaatatacttgagagtgtgacagctttctgatgaggaagtaaactaattgtaaagctatgctgagaagaatcataatcttactatgaataagaaatgcgttacgagttacaggatttgaaaaataacagaatgagaagcttttacaagccaggctattttaattttggtgacggtttagaatctatagaagtaccaaaaattatagcaccaacttcaattaatagaatgttcaatctgtatctaatgaagttatcaagtactctttaatcatgcatctataattttatcatacaaaaccattgcattcataaagagaaaaacaatcttataaactggcctgaggacttcatctgatcatataaacgaagaaataggcttccaatttaacattctgcagcactctaatgcaattcaggggtaagtgctattacccttggtgaagaggttgaatttgatagccatttcactgttagactaacgatggcctgttatatctcttaggttacaatgtctttgatcctgtgaatggcaaggaaacatacaacctcagggggaaattcagacagagaaggtatttaatagaaaagcctccagacaactggagtttctttagattttgaaatcatatgtagacctcttagctgagactcaaccagaatccaccagtaaggcattcagcttggttatacctgtgctgtacagatggctacatatgttgtctgtcaccacaatacacgttcaaatatgaatatatgtacaaagattcaaatgtcaaatatgtcttatattttgacttatgaacttatttattatcttactaacttggacttgttaaccagagaaattacttacataatgaaagctcttttaaaaatatcctattaccttttcctcccacaactgaacacataatttggaaaaaagtctctgtgaaggaaacaattaaaattttgttttgcatttgtaaaactagagttattttatttcctagaatgtaacaataacttaccctttccacttcagattttgaaaattttatttgtagtaacattttacctacatccaaaacaggtggtggatctaatttatattttgaatggacaaataacgttttctgaaaaagttgtaagatgtgcttgcttta

SEQ ID NO: 34343 - DNA, 1034 bp, Homo sapiens
agaaaatttacataatttacaaacttagaaaaaaaatcttcatttaaataaacaacacaattaaggataaaaagtagctaagacttcctttgtaattcttactgagatctttcatgctatctaaagtctaaaggaggttaatggtcttattcataactaaggatatttacactgcacttttttttaatttggctctttttatagaaggcacacaattagagaggagacttagttggcagatctgcaaaacgtgtttcagttattagggcatgagttttagcttcatgccagcggtatttttctttcttttttttttaaaaacaattaaagtatgagcattggatgtatctagctaggggaaactgacaaatatcatgcagtagaaatggaaaagtaacaatgaaaagtttaagacacaaagatgagtctcagagtctatctgttctcaaagatgaatttcttgatttcctgtcctttatttcaacattattttagactctgaaattaggctcatagagtaaccactgaatacgctgtggtagaaagtgctatactaggttttggaagacccaaatcacttctcagcttcatccagttttctttgttgtaaaatcagaataatcatgcactacctaacctcacgtgctcacgagcacttctgacactgatcaccattcttttggaaaagtgtacattatcactgcttctcatcgaggaatacatgcagttggagaacatgtggtcttctccctaatatgtgcaccctcattcttggaagtcttcaattaaaactgatttaagtcaggcgcagtggctcacgcctgtaatcccagcactttgagaggcagaggtgggcggatcatttgaggtcaggagttcgagaccagcctggccaacatggcaaaaccctcactctactaaaaaatacaaaaattagctgggggtgatggtgcacgcctgtaatcccaactactcggaaggctgaggcaaaagaattgctcgaacccaggaggcagaggttgcagtgagccgag

SEQ ID NO: 34344 - DNA, 1242 bp, Homo sapiens
agtaaagtggcaagataaaaaatcaacatacaaaaattagtagtgtttttatatgccaatagtgaaacatctaaaaaagaaatcaagaaaataatctcacttataaaaactacaaaaaataaaatgcctaagaataaatttaaccaagaagatgaaagagctctgcaatgaaactataaaacactgatgaaagaaattgaagaagacaaaaataaatggaaagtcatcccattgtcatagattggaaaaattaatgttgttacaatgcccatactacccaaagttatgtacacattcaatgcaatccatatcaaaataccaatgacatactttactaaaatagaaaaaataattctaaaattcgtatggaaccataagggactctgaatagacaaagcaatcttaggcaaaaaaaaaaaaaagaaaaaaaaaaaactgaaggtgtcaccacatcaaaatatactacaaagttatagcaaccaaagcagcatgttactggcataaaagtagacacaagcaccaatggaacagatagagaatccagaaataaacgtaagtacttacagccaagtgatttttgacaaaaactccaagaacacacattggggaaaggacactccaacaaacgaagctgggattttttttgtttttgtttttaatgggagaggtatgaagcttaaaaagtgccaggaacgagagtgaggttgaagatatatggaagagagaataaaactggaggcacaattctcacagcaatcaaaagatgagattcaggcagacattggcttcagagccagctgcaccacttaatggctgtgtgacttgcaatgtcacttaatttctcagaacttcagtttctccatctctaaaatgtaacaatagtatcaatcttagagggttattatgagtattaggtattattataaaatgtacgtaaaaataaattacagtgagaactcattataatatttgctattatttttatttggtgtaaatcagttggcttcatcaataaagaggcctagaaataaacacataattgaagactggaataaagaggaaatgactgatatttctctaggcaattttgtaaatatgatactcagggagatgatgccttatcgtctcaatgactttagcagttatccattttcttaaaataaaacttagttaaaagtggaaaatcaagaccctttctggcctaaaattataaacaaacagctggtcagttccaaggtgttt

SEQ ID NO: 34345 - DNA, 1048 bp, Homo sapiens
tatgaggtagcaaatgaaaagccattcttatattctgttctacagcataagtaccgaatgaaaataattttgaaaaatatgaaacactaaataggtgtgtatagcagtaatactggtagtagtcacagcagccacagcagtaatagtaaatataaattttatactgtaagatatttgtgaaaaaaggtaaaaattaatgtcaaatcaaaaccatttgtaaagagaggtttgagatttaaatttttacttgtttataaactctttaaagccaaaaatagcattaaagaatgattaattatattacattgaaatagaacattaaaacataggtgtatttttctcctgaaatatatctacttctatgtgaagttgatatgaagtcaagaatgtgtatgtttaactagttttagaataacaatcaatgaaacagtaaaagcagtagacaattcatattacagaactgtaatctgaaattctcattgcaggtcctgtagtacatttacacacgttacctgtaggaaaattgagcggtgcagcaatgctaactgatttatacaaggtctcttgtcaggcagaatagaattattctcattctcctttcggacatgtaatattgtataatcatctcttttaatgacttaatctcaaggtatttatgaacaacatactcttatttcaatctaggcattatttttgtatagtcggttccatattattgccataactgtcattataaccaactcttaacttcatttaagtgaaataaaattggatgttatgattttagttactcaaaaagatacaatagaacatacaataaaggttgcaataattgtcacttaacaaggcttacaagcattatctgtgatttgtatgaattatgctaatagaatgccacaaggttaaagaagcttacgatggacattagagaataatagttacgttccaccttatttggcaggactgagtaaagaatgtgaattgtcaacattttgagaaacattagtgggacactgtaattcaaagagaaaagaataagggattgagt

SEQ ID NO: 34346 - DNA, 1031 bp, Homo sapiens
gcacatcctgcattcatttttattagttttaatatatggatagactgcagtaaatattattactagaaatctgtggcttgcttgctttctccaaaggatctggaaactaatagatttctcacatgcatttaaaagattgctgaacaagaattaacgttaacttttgtgtctgcttgtgggctaaacaacaattattgcacatttttatttctggaattcatcatttctcatcttttatttgttattatgcttaaaacctgacccctgttttaggacagaaactacctcttgggcgtcatcagtgatttcatataatctacctttaccccatgttcatgctgtgggatctttctacttggccagaatttctattagaaatctgatagttaacaggcattggcattctaaggaataaagaaagatgactgtccttcttgaagagtacatctgttattagtggtagggataatgttccttaattgtacttctgttgggttactaacaatgtctacatagattagagatctcagagtcaagatgtccaaaatcaaagacctcttttccaattatttttcttccttctttcctcattgtattgattaataccaccgttccttgcattcctgggcaaaagtacaatgagaatagagacatcctgttctgcagacggagaatggtgtcagaacaagatgaagttcctaagatacagacaccataatataatattgtaaaagtcacaaaatcctaagtagaaaaacagaacaaaaaagggtagacaggagaaagaaagttctaattgaagggcatggtgatacatatacatttatgaagaataacttttaaattccaaatatagtaaaaatcaaacacatccatacaacaatcatgtgggaagaatacttgtagaatgttgctattctatcctttttgcagatctcattgcagatgaaggaattattgtccaaagtgttttgttttcctgaatggttttcctgtcatttatgaggagactttaagctataatgctgagt

SEQ ID NO: 34347 - DNA, 1018 bp, Homo sapiens
tcacaatgcattctgtatgtcactgctatactcacctttcctaagaacgtctcagttacctccagtagccctaaataaagcaacctaaagtcctacctgcacactgtgacattaaggcccaccaagccctgactctagagtacttttctcaccttaactctcaatatttctcaaaaacacatagtgatttccttgtgtacaattatatctcacatggaaattcacctttgcttgtatttgcatggcattttcttgtctattcagtcagttttacatcagatcttctttctgtctaaaaacaatttgtacacatgggtctcaatccacatcctattcagctttttagacccatatacaagtgtctgtatgtagctcccttaatgcatttagacaggacttttttcttctctgctttacatttactatagcttaatagatgtttactagaatatgccttaagatctaggtatttttatgcatatctttctcccaatataattaagaactgtggcagtattgtcttggaaattataccatatatcaagtaaatatttcagaagggaaggcagaggaaaacctaaagtcaggcaattacatgaccacttaaacctgctttataaatgttgagaactgtctatggcacatagtgtattaggaagcatccagcacaggaggatgatgtaggctgggaggctagacccatctcacctttttcatgtctttctgcttgctttatattcactggaagctgattagattgtgcccatcagactaagagtggatctgccctccccagcccactgactcaaatgttaatctcttttggtcaacacccacacggacacactcagggttagtactttgtgtccctcaatccaatcaagttgacactcagtattaaccatcacagtgagcacttgataaattttagctattttcttatattgtaattaaaaccaatttagacacatcttcagaaacaatcagccctgtgattctatttccttttaagttcatt

SEQ ID NO: 34348 - DNA, 1319 bp, Homo sapiens
caaattcgctacatgaagatctctaggtggttgattgaactgatttgaagaagtttgaggtgtaagggagaaatatttaacattctgacaactctttccaataaatactcactatacatgtttctctatttgtagataagctttaggtaggtgatggggtaaaatttgaagaaccagctttgggtcaatccctcagcaagtcctgaataaattatcaagatatttatcaccaattgttcccatttctgtgcctcagttcaaaatgaaatgacaggggacatatcttttaatatcctatcacatatatttcatgtatacgctgtctacatggcaaatgtatcttctgtttgctttcttgttttttgtttgtttgtttgtttaatatcatctaatcctttatgaaggcatttcagcattgaactgaattgccttcctgtgcctcaggaaaaaatttaggcacctattggagctgaattatcttagactataaatctctgaatccttattgagcagaactataatcaggtgaagtacttaccgaaccattcagacacaaaaatatttatcttggttgataagaaatttaaaaacaaaattgatgatcataagtatgtagtgcagcagaatatattacaaaaaagaaaaggagaaagattttatataaggcttctctgagatgtagtagaagaactccctctttttttgtttgtataactgagatttgaaaaatgtccatagtgcaagctgataggtttcaactagttctcaattatgaaggaagtttttaaattctgaatttttgtaggactctaaacagagagaaactggagagccaagggacgagaagtcaaagttcaaaagtgtgaccaaaattaagaaatattacaggtatattaaaattaaacagattatcaaattctgagtgtagaaaaaaggttaggtctgtttgagtaaacacatgtttacttaaattattttatatataccaaatatttatagattgagtctaaattccaagaaagccactcttcagacaaatttgaagatgttgccatcatacaaaagattttacataatctttaaacaaaagcatatagtcatacataaaaaagctttcttttttttttaagatggagtttcgctcttgttacccaggctggagtgcaatggcgcaatctcggctcaccacaacctccacatcccgggttcaagcgattctcctgcctcagccttccaagtagctgggattacaggcatgcaccaccacacctggcttattttgtatttttagtagaaatggggtttctccatgttggtca

SEQ ID NO: 34349 - DNA, 1542 bp, Homo sapiens
ttttggcagtatggtcattttcacaatattgattctacccattccatttgtgtcatctgtgaaatatttcagcagtattttgtagttttccttggagaagtctttcacctccttgattaggtatattcctaagtattttattttaatttttttgcagctattgtaaagagttgagttcttgatttgattctcagcttggtcgctgttggtatatagaaaagctacggatttatgtacattaattttgtatccagaaactttgctgaattcttttatcatttctaggagctttctggaggagtctttagggttttctaggtaaacaatcatatcatcagcaaacagtgactgtttgacttcctctttactgatttgcttgccctttatttctttctcttgtctgattgctctggctaggacttccagtatgatgttgaagaggagtagtgagagtgggcatcctcatcttgttccagttctcagagggaatgctttcaacttttcctcattcagtattatgttggctgtgggtttgtcatagatgacttttattacattgaggtacgtcccttgtatgtcaattttgatgagagttttaatcataaaaagatactgttttttgttaaatgcttttactgcatctattgagatgatcatgtgatttttattgtggatgctgtttatgtggtgtatcacatttattgatttgcatatgttaaaccatccctgcatccctggtatgaaacccacttgatcatggtggattatcttttaggtatgttgttggatttggttagctagtattttgttaaggattttagcatttatgtttatcagtgatattggtctgtagctttcttttttggttatgtcctttcctggttttggtattagggtgccactggcttcatagaatgatttgtggggggttcccgctttctctatcttgtggaatagtgtgaagatgattggtgccaattcttctttcagtgtctggtagaattctgctgtgaatccgtctggtcctggatttttttttattggtaatttttaaattacttcaatctcactgcttgttacaggtctgtttagggtatctaattcttcctgatttaagctaggagggttgtatcttttttggaatttatccatctcttctaggtttttaaatttatgtgcataaaagtgttcacagtagccttgaatgatcttttgtatttttgtggtgtcagttgtaatatctcccattttgtttcttattcagcttatttggattttctgtcagtctctctttttttttggttaatcttgctcatggcctatcaatttatttatcttttcaaagaaccagttttttgtttcatttaccttttgtattttttgatgtcacttgaatttatttagttctgctttgatatggttagttcctttcttttgctgggtttgggtttggtttgttcttgtttctctagttccttgaggtatgaccttagattgtctgtctgtgccctttcagactttttgatgtagacatttaggtct

SEQ ID NO: 34350 - DNA, 1051 bp, Homo sapiens
tatatgataactagtttctcatgtttggagtacctataatttatatgtaataagtttttacataattttatgtatttattggtagtgcaagttttgggaaaactgatagattgaaaattccttgctaaatcgccctcagctgctttcactaactgcttgagttgctctttagtggttcatatcacaacagcagaaactcttgagtaggacccttccatagagccaggcaaggtcatttgtaagtgtaagtgctggaggtatctatgggtaatggatgcttaaagtgtgtacgaatgaacttaatgtgattacactaataatggaaaaaagcatattggtaaactattatttcagaaaatcaatttgtacttccatagtttaaaatcttttcattattcttactacattcaccattttcaatactactaaacttgtatttttctctaggaattttatctcaatttactcttgctgacattttaaaactcattaattttgagatcaatcacattttactcttcaaacctatgtattttacatacttttaatttatatatgctattttatattaaaattttaatgcaatttatgtaatataaaaagtagatttatacaatttaaatgtatatcacatttccttatccttataaaattataaatgacatcttacacactaggttaaaaattttgtgaagaaccaaagaaagtataccggttagaaacatttgggaaaatattttgcatattttttaggctaaaacggaatcatttaattatagatatttaaaagtgcaataaaatattagcttccatatttatataaattccagaaaaaatagttcctggaataaagatttaattaaagtattttacaaattttgaactttgtcatttagaatctccttaagaaaataatttgtctaaaaataatgagatcatttcatatacttgcttatttcacatacaagtaacatatttcctaataaccatgtttaaaaaaatagttggccatgtgtaattccagcactttcagaggcaaggtgggcagatg

SEQ ID NO: 34351 - DNA, 1055 bp, Homo sapiens
aataaagctaagttacttattattgaggaaaacctaaatgaaaaatagggaaataggatgaagtctattaaagagattatccatgaggagggagacctcatcttctgagacaagaataaaagatacaatggtggactcagaggtaaagtaattataagtcttggtgaatgtgtgtggtggatagggaggtatgactattctttctcaaagtaagtggtaatttaactattggggaaagggagatgcttgatattttgaggacattgataaagtctaagccaagccacctttttttttttgaataattactgaaccattccttttctttagcaagtaccattacttgaatataattgactctactaaaagtcttcatatatttataataatcattgttaaatcaaaattattttctaaaaatatctaggctaccataacataaataacatatcacaatattttcaaagacagttatcatttagcttattcatataataattatcccgttaacttttttattttctgaggtgataaatctacctattttcattaagattttatgcaagcataatttatactacatataacaagtttttttcaactcacaatgaccttttaaaattgttaataagagtatataaggggttttagaaaactccttggcttgtaggtgtgagagaaagtcacatttattattactagaagcagtgttctgttggcatattacaatgtggcagacaatccttcaacaattaattaccagtaaagtaattatagaatatcctttgatgtttataatgttttaattgaagtaaaaatgtgagaatatgcttcaggggaatataatattttaattatttatgggccaagatatctatatactttgactagagtgcatttctctattctgtggcatctctgttataatagaacatttgtagactaaaaaaatagggtgttttccccccacagcgtattacagtgaatgtagtctactttataatcctcagggttcttttaacttgacgtgaatcaaacaccttaaggaaacagaa

SEQ ID NO: 34352 - DNA, 1034 bp, Homo sapiens
tgagcaactataaacctttaagcaaacatcactttttgatgagctggagaaaaattaccatgtgctgataactctttggagaatgaagaattaatgaattgactttgttttacattctctttaaagtttcctaaatactatcttgtgttatattatttgtaaagcacctttatttttacaatacatgataaataattgttaaagaaaagatgcacttatatgtgaaaacctaagtttgcagtttttttaagaaggttttgaaaaaaaaaagcacaatggaaaaagtttaccatgctccttcttgaaaaagataaggatttgttaaaacctcaataaaaataaaatctacctgatcctttgctcaacttgttatacaatgttagcagtactgttatatagtccacaactaccatataaatagtagctcttttaaaaaataataatagtgaagtaaacttctagtgaatcaatttaccaaaaaagaaatgcttttgtgctgaataataaatcatagccattcatgatctcctgattaaccatttgtgtatggctctaatgacatagacaaatgacttgaagttacggtctgtagattttgtatcccaaagctacaacaatgttgagtatccttgaaacagattgaatacggataacaatgcaaagcaaaacaaataaggctgaatcctatgtgccattattataaaaccatcaatcagtggtcagatgcagtgtgttctcttagttaacaagaagttttctgtttttgcgatatgcattctctcaaaaaaggtcttcacctggggaggactaggagcgtatctattttaataaagagagcatccagatttgatatcaaaactactgacagatctctttgcttgaaatgctcgacatgggttggctattcaattatgaacgctgttaagaggaagtactccaagtggaattccctgccgtttggttgaaacagcagaagttctgataaaacattaataatatgcccttggctatctcaactactttgcccctagatg

SEQ ID NO: 34353 - DNA, 1004 bp, Homo sapiens
agttaacctctctattcttcattagctatatatacatacattagacacgcacatacatacagatattcatatatatgtatatattctctgatgttatcatcaaaggatatatatctgtatttcttatatatttatgtataaatgtatttgtacatttataaatttattttcatatttatatttataaataagatatatatctatatgcatgttttaatttacttcattaattattttaatccttgaaagtacactttctctttataaatacaggtatacatacatacacacacatatgtacacatacacatatatacacaaacatctagatttttgttttatcatatatatgtatatatgtacatatgtgtgtgcatatatgtatacctgtatttataaagagaaagtgtactttcaaggattaaaataattaatgaagtaaattaattaaacttggctgttaaagatactggagaatggaaagacgtaaacaggtacatggatatatgtgcatgtgtatatatgtgtgtatatgtatgtataactgtataaagagagagaaagcatactttgaaaaattaaaataattaatgaagtaaattaataaaataataaaattacttagtatatttcctggcatatagtaagtacatgataaatattaactggtatatgtcatacttttagacaagaccaactttgaagatagagattaacatatacagagatagagattaccatccatctaacatgtagatataaatttacatcaataatcaacctggccccacaaacccttgatcttgaaactcaaactctccatcttgaaacttccatcttacttggccattgaggaatagagtgagttccttcactgtagatgtggtaagaaactctttctttagccaagataattgaaatttatcataactaatttaggttatgagatgaatagaaaatgtacagactgtattcttacaacatacatataaacacccagacat

SEQ ID NO: 34354 - DNA, 1045 bp, Homo sapiens
tcagacaaacagtataacaacacactcaccactagcatataccccttttgcattgtttatgtttatgattttcccattgtggctgcattgctgctcccgtgaaatcatccgaactgccatggccaggatttagtcttaggtcttcacatacattttagttacttaatgttcttgaaaacctacaaacaaactggttaaacaagcaaagaaataacagacgtaaaaggagaacgtttgcttttagttaatgttttcaagatttatttattcatttaaatcaattattaattgagtgcgtactaagcacaggaatataacagggatataagaccccgcattgaagttgcattccagtgtgggaaacataacagaatgaataaaatgaaaattcaagacaggaaagggataagcaagataaagacgatgattaatatttgaagaaaataaaacatcagtaaggataattggaaaagacgctttctctaagaaggcagcatttttactgaaagaccagacttgaaaagatacaaccaaaatgataagaagtatcaaatcccaaaggcagagaagtcttaatgtgatcaaggagcagaaagggtagtgtagacagtggcttggctgcaaagaaaaaggtggaatatcttcatttggaaagacaggagaaggtcacattcttcaggaccattatagctcctaataaagagctgggattttactttacatgcaatgagaattaagtgaaggaactgaaagtggaatagcgtgaaattatttgaatcacatttttatattatcactttatgtgctgcctaggggatggatgaggaagacccagaggaaaattccagaggtgatgggttctggaagtaaaaattgatagggaagatgaagaaatgcatacatattcaagatctcgctaaagggtaagctttgggtgagaaacaaatgagaaagcaaagccatagatggttctatcattaatggtgatatagaaaaccttagaatccagtacatagaaggtggagttcaagagctccatttgagc

SEQ ID NO: 34355 - DNA, 1071 bp, Homo sapiens
gggaagaggagtaaatgaaggaggaagcttctcaaaaaagctagaaggaacttcagagtgtatgaaaaatttgattttttttttttttttttttgagatggagcctccctttgtcacccaggctggagtgcagtggcacgatctcgactcactgtagcctctgcctcccaggttcaagtgattctcctgccatagcctcacgagtagctgggattacaggcacgtgcgggctaattttttgtatttttagtagagacggggttttgccatgttggccaggctgatctcaaactcctgaccttaagtgatccacctgcctaggcctctcaaagtgctgagattacagacgtgagccactgcacctggccgaaaaatttgatttttaaagcagtaagatgaaattaacaaaatcagcaaaataattttgcttttaaagtatgcttcttatattaatagttttgctctagtatagaggaaagaaagcacaaagatgtagaaataaactactatgtggatttgaatttgaactcgaccctatatgttctgtgtgagtgaggcccttcacttacctgctttatagatgagtgataatgcttgtaaattaagtagcatgtaatagagactaaacaagttaaaggggttctccagttagcactgaatttgtagttgtcctaacagtagtatttcctgagtttcacactcctgagcacacattttcttgatgtagtgttttaagaaatattaatagaatcttccaaaaaatcctactaaatttcatagaatgatttatgtaacacgttctagtttctttgctagaaggaaatatttctattgctttattaacaggtgaaatcttaagttggtataatttgccatatttgtgaagtgacagtttataagatactgcaaggtaccatattttgtgtgcctaaaaatgcttaactatatcaattgacaactatgaaaactgagcaaaagccatagcattttgattaagcagttttttggtaaaaacactgttctgtgatgcaagaatatagatcaaccaaacgtggttctatttagagtttg

SEQ ID NO: 34356 - DNA, 1026 bp, Homo sapiens
ataattccttcactgttgatgtttttcggcggggggagaagagtattttctggaactcctattagacttccttagaactttttaatcattatcatattttttggtcctaaacaccttgatcacatcttcctttactaatctttcctccacttactctggctttctgctgttccaaaaatacatgatgtgtattcccaccaagtcttaaatgaaaaacatttctcaaaatatacccttggctcaatatctctctccttttgatactgacctaccttgacctattttttttttcttttgaggctttctgaccaatttcctcactttttttatactccacatgtacttttttcatttatttctgtttttgttacattatttcttgtcttgtataacacattatttcattgttaccctttattttaaacatacttatttcaaattcatttaaaactgatctgccacttcttacaaatcttgaatgatttcattttctaattgttgatttttttttgttgggggaggtgtctttaacattagcctttttatttgtttttaatttttggtttgcaggcttatgtttaattaaattctctctctgctcagccctgcaagtattagagtctaggattctttcatttgtctttaactaaatatacagggccccatttcataatcacggtcctatgttagcaggttggggctttagttactcctcttctggggctcagttgtagtagggcacattattctgcaggatgaatatgactcattggctctgcctccctttgctttcaaaccatgttgcattttgagtgtatttttatagaaaatttttttaattttttaatattattttaacccataatctgttgacttggtaacaccatggaggatggtatcaagcatgacatcatcacgttatcttggcctaaaatttatttgattaatattttcatttaatgccagccatgagtcagggtcactctcccaggcactgaactatacaaatttgcagatttcagagca

SEQ ID NO: 34357 - DNA, 1043 bp, Homo sapiens
cccaagatccagtcaccttctaccacgccccagttccaacattggggattacaatttgacaggagatttgggtggggacacagatccaaaccatatcaggaagaaaggagtaagcaagatgaatgcagagaaagtggaacagagcatgtaagaagagccagtgttatagaacaataggaggaagtaggcttaaaaaaactaaaatgtagagaaataggaaattaataattgttttacagatgccaaagaggcaaagtttaaaactaggagttgctggatatcaaaagctacaaaaaaggctgcagagaatgacacgaggaaattgcgtgactgtatcagtcattagggagttatcagttttatatgaaatctgtaattcttatcacaacataagatcataaagcagaaatggtaaaatcacaaacgtaacatctatagaattaccataagcctggagttcctatctttatatttaaatgtataattgagcttaatgatagatgaaatttgaacatgcaacctcagtgaatacagaatgttattgatctgattaaagtttaaaaacctgtcaccatgatgtagagatttccattaaatgtaagacccccagaaatgatgtagaaatgcaaatgatacagagcgcatgattcttgaacgatgttgtcttttttaaaaatatatttcttttaaaattcatcccctgaggtgctcactggtataattttttttttttttttttttttgagacggagtctggctgtctcccaggctggagtgcagtgacgcaatctcggctcactgcaagctccaactcccgggttcacgccattctcctgactcagcctcccgagtagctggcaggtgcccgccaccatgcccggataattttttgtatttttagtagagacggggtttcaccgtgttagccgggatggtctcaatcttctgatctcgtgatccacccgcctcggtctcccaaagtgctgggattacaggcgtgagccaccgcgccgggcctaccttttttaaatttttatttattt

SEQ ID NO: 34358 - DNA, 1024 bp, Homo sapiens
tcagtgtagctgatttgtctgagagaaatttaagtgagagtcaagtgtaataattgtagaaatacaatttcacaggaaacaatgaaaagctttggtttgcttttgtatcctcccaggctaacaagacatactcaggatttttttaagtggataataacctacaaagtttgcccatttttcttaatgatatctttcctttcgtatgattaaaaagatatggattccgtgcctgtttgcaagtgagaacaagatcatttaaattaacctcaataattagaaatattttggtaaaaatcctcctcaaattatcactatagtaataacaacttcaaaatgtattgcttcacataaatttctacaaaaaaaaaaatcctggattttagtgtatggccagaaattacaaatatctttgaaaaagtacttatttgaactgagtttatttggtttttttagaggcaattcattctgtcaacacttattgaatcataatacatataaagaaatatataatcctgtgcacttttctagaagtagaaaccaataaaaacttattaaattacatttattttattgtaattatgtcatttaggtcaaaacttacaccttctaggccaaagctgaatttaaatatatgaacatagaattattttatttattcagactgaaaatctttggtaagcagtaaagtaggccctcagatgtgaagaagaaaaggcttctatgcccatggagcttctgtactattaggagttagcagcaatttccaaatagggtggtaggtaagagatggggacaagcactttcaatatctgtaaattgttaatttttaaatgaaaagtaattagttagctgcagctgtgtattttttataattaactgcatctatgtattttgtaagaaagttctcaaccattggagtattatgaggagcaaaaaaacacaggaaagatccttgcttacgtttaagtataggtcatttgccaaaatatgcatgtgcatgagtgaagtagcataatgctagctg

SEQ ID NO: 34359 - DNA, 1093 bp, Homo sapiens
tagatgcattagttccagacattaattaaggtttgtgtcataattttcatcaaaagtattttatgcacatgtcttcaatctgttccatttttctacttatattcttcattgtatagtcttcatgcatgatcaattgtgtttctaagacacatggcaagatttgtagcgttacgtaggctatttgatttattaatatttagaccagtgagaccaccgctcagttctaacagcttgcctcggtttgtgtgaaaagtcatgctctaaactcaaattaactctgtagtttaatctgccacaaaatcacctcctgtgaggtatcaaataaatgttttacaccatgctgtgtgtgtgttttaaatacatcctcatgaatctgttcaatttactatgttatctatttagtagaacactttctgaagtttttattccatttttcaaagtttcatctgggtgtaatccattgtcattggtatgaataagcagcctagactcagggatctgagtaagttaatagagatcatgaataggacacgagcctgcgatatgttagagatgactctagaatgtgggaaccggcacgccggaaggaaagaagatgtatgtagaagtactcctagcactaaacccaatgtttcagcttagccttgtagcattattagcacaatggaatctttaatattagcaagctccaacaaaatattttagagaaatactcaaccataagaaaagattcattgtaacccagggaaatcgtcactgtgacccccccccccccccaatatctcttttactgaagtcccacaggaatcatcttctagatcccttacagtcactgcaggaggtctgggtcttcctgtcctgaggcctgtgttggctctggtgtcactctctgacacacacccttctttgcttggaggctttctcttgtgtcttgctcgtgttgtacatggatctgctgccttttttgctcactcgagtcttccaggtcttccagactcctgtcttctccctccacagcactactctgtattccatacacctcacttccagaaggtgaaggaagaaaatccctcacacacttttgcctgcccat

SEQ ID NO: 34360 - DNA, 1049 bp, Homo sapiens
gtcactttttggaccagctatgtctcagcactttttttttttttctggagacaggctcttgatatgtttcccaggctggtctcaaactcctgggctcaagtgggcctcctgcctcagctcccgccccagcctcctgtatctcagcttcaatatacataaatcctcaaataactgtgagcttattgactctcctgtcagaaaattgaattgctttttagatgttggtttatttcaaatatctttgtagatgtagtggtttcatttctaaagattaattgaaaactagtcacaagtttgatttgcatactttaatacatgtctgcccctattgattatctactgctttggtcagataagtcataagtcatttgttttctattcccaccaacactgtttgacctcagatctttgttttataatctctttgtgtcctattctctcatatctgcttcttaaattccttaatccctcctacagataattcttacagaactacataaatgaagcctaaaacctttgcctgctttacaaagacgtctagtacttatgctgaatttatttccctgctcttttaaactgcttctaatgccttgaacacttgagcgttcccctggaatttttttcttcactgtctgacctttgaaaccctatgtatccatgtaagttgagatcaaattccatcttctccttgtatcccttctctgatcactgtgaagtgttcatattctgtttatctctaagagaagtcaagagtgatccctgcaggctgacatcccagagagagagatggtgttccgcggagaccaaggttctgttttacaacactacggtggggtcccagtccccgatcacctgattatgaagctaaacgtccccatgatccagagggtccctccctggagtttaacatctgactcaaaggtccatatatgtcccactaaattctgtttttaaggctttcagtgggctggctggtcatttgcttttgtttgcccaacaacttcatattgccaaatattataggtttgcagactcgagatatccagggt

SEQ ID NO: 34361 - DNA, 1032 bp, Homo sapiens
tggtaatggctagagacatttttgctgtcagtgggagatgtactgctggcctgtagtgaggagaaaccagagatgctgctaagtgaacaggacaggactacaataattatctgctccaaatatcaattctgctgctgctgagaaacagccaatcatgtagctaatggggctgtttagaaggagaagtctgcggtggaattcccttgtaggaggccattgctatggttcaagtgaaaaaaaaattaaaaccagaactaagggactgaaagtatttaggagagacaatggaaaggtactcgagaatactcaagtttgtggcttattcagtacagattctgagatagaaagaaaactcaagcatgactgaactcttcaaacttgggtaactcagagtggttggggagctaatcaagtcaaggaagttacataagcttaatttataagacgctgagtttgcaatttctatgggttcttcagatggagatagatggcaggcaattagacatatagaccttggactctggaaaacagtttgttgattcagtcaaatattaaacatttactgtgagttttgatccaggcatgtggaatcatacaacagtaaataagacataccaggcgccctccttgaactccccacagttcttagtcaggaaaatagataaatgaagttataggtctatgggtagtatttgtcatttttcctaataaattagtaacactatttaaaataatattaacatgggatgatagtggtgtcgtgaaacaaaaactcaatctcatacatttttcatggaagcattgcctagtataacatcttcaaattgtaatttatcaatatgtttgaggtcctcatcttttaaccaagtcattcaagttctaggaagtaatcagagatggattaaaactttcatttaagaccagctgcaatgtcttatacctgtaatcccagtgctttgggaggttgaggcaggaggagcctgggcaacatggcaacaccccatctctatataatttgtttttaaattagct

SEQ ID NO: 34362 - DNA, 1044 bp, Homo sapiens
gtcttattctgtcacagcttcccacccctggcctaatctgcatttcattaactctccaaggactagaatcacctttgaaagatatgaatccaatcctgttgctctcctgcttcaatttcttttctggcttcctgctaaacttaacatcatgtgcagcccatcttccctgtctttaatgccttgcatgtatccctaaccaacttctctaacattgtgttcctacactctccctccaaccttctggccacattagcctgcagatacattttcggatatgcataggatggtcttttctgcctccaggcttttaaatttgcctttccatgtgcctagactgctttttccttggttttttacatgactgcttcctttccatactttgggtttttctctcaatattatctccttagaaagccttagaaattaccttcttaaccaatacatttaaaagcattttttttattccagtgctgtttatttttttctgtcattgattgaaaattatgaattttatgattatttattagtttatttgtttaatgcctttcttgacctctagaatgtcatttccattagggaaggaacattgtttcatacaaaattgtatgtgtgtggtacctacaacaatatataaccctatcagatataaggttgctctttttccaataaaccataacaatggatgtaaaataactgaataggacatattagaacatcaggagttatatactgaatttgataatattatctttagttgaccatatggtacagatttctcttggcttctgtcaaataaatgaggatatgaattctaattctataacttacaaacctgtatcagattggaagtgattcaaagtattagaataacctggagtactctcatacaattaattcatattacaaataattgtatttgtattttgatgatgaaacagcaattattgatcttgaacacggcactgattttaacagagttttattcaaaacctgaagagagcttggctcctctctctgtgatttaacatcaaacagtttgcattg

SEQ ID NO: 34363 - DNA, 1055 bp, Homo sapiens
ttaaacaattgattgtcctataaaagatattgtgattatttggcataaatataacatttgtcccaatacatgtaggacaaatcagaaatggagatatcatccaagttaaatgacctcagatattattttcattactctaaatttatgatatttgggtacagtaattaaatgcttatttccagtgtataccttactggccagctctctgcttattgggttgtctcccaggccattccatcacagaccaaatatcaagaatatcaagtcttctttgttatcttaatcacttgttctttcaagtttggataaggtatatcaggatcaaaattccattttgcctcttttggtttttcaaagattgtcagaattccgaaagtgaccatgttttaaaattatacttcatctatgtattgtatctttattgaatgtaaaaaaaaattcctgaaacagaaattttttaccatgtcattattgacattagacatcattgtcatcatcaacattattaaatacattttctagaacaggttttgggggaatcagtatggtcaaagtggtgaaaaaggggaataaaatgaggtagaactcataaaggatttattttatttaagaaggtcggcataaacataaaacaggaaataagcatgcaaatgagtctacatccaccgtcaaatgaggtgctagtgagtagtaatgtgaatccagaggaggaacattcactgaacaacacaatgcttagtgaagggctttagaaggacgagactcagcatgggctcttgggcctctcaccaaattcaacctgagagatgccaaaacaaagaaaataaagttgaggggccgagcttggtggctcacgcctgtaatcccaacactttgcgaggccgaggtggacggatcacttgaggtcaagagtttaagaccagccgggccaacatggtgaaaccctgtctttactaaaaatataaaaattagctgggagtggtggcccgtggttccagctacttgggaggctgaagcaggagaatcgcttgaacccaggaggcgaaggtggcagt

SEQ ID NO: 34364 - DNA, 1058 bp, Homo sapiens
aatggttcctttctttaactgtctgggaattgtcctaataagaaggaggtgccatccattcctagttggaactttgactcgtactgcagtttatacgtggttttattgcctgcttctgattttgctctacaatgtgtcttgaacatccttgcttgttgttcggtatcatttttatcacattctaacagcttcaggctacacgtgtaccacagttgaacattcatcttgttttctagttttccctcttagtgataatgtcataaggagaacctctgtacatatgtacaacctctattagtcccttcagataagttcccagaggtgaactaatggaagtatttccaagtggtattttattattcatgctgcagatttattatcaaagaaacactctaccattctttagctgtgctatctccgtgttccctcaagcagttctgcagtcactttgaaagtcctactgcttgaaaatgtgagacactggatctccaggctcaaggatttcctccatttatgttccaggctttgtttacgtgtttggattgcctacttctgattttgctctgcaatatgtcttgaacatccttgcatgttgctcagtatgaatttaacacattctagcagcttcacgctacacaggatccatcataagatcatcaacctacttttctttcttttttaatttttttttttttaagatggagttttgctttgtcacccaggctggagtgcagtggcatgatctcagttcactgcaacctcctcctcctgagttcaagagattctccagcctcagcctcccgagtagctgggattacaggcacgcaccaccaccaccatgcccggcaatttttttttttttttttcagacagaggctcagtctgttgcccaggctggagtgcagtggcgtgatcttggctcactgcaactgccacttcccaggttcaagtgattctcctgcctcagcctcccagtagctgggattataggcatgcaccaccacacctggctaattcttttatttttagtagaaatggggttttgctatgttggccag

SEQ ID NO: 34365 - DNA, 1024 bp, Homo sapiens
taaataagtataaattctggttaactatcttaagttaaatagctaaaacacacaggagagagttctcattatcttagtcttctaaattttgagccagtggctttaagaaatagtagggggaaagtggttaaaacgaaaacatgtatccctgaagtcagtctttgagacagagtgttgaaagctggcaagcaattttttcagaacattctctgtgttgtcattatgttttcttgtggagaatgtgttttccacacctctcagcagaatcactgtaattcaatgaacaggtaagttgaattatggatgttgaagccacatcttgctaaagggaaccacagtcctaacaactccttgaacaaaatgctagggctgctcaatagaatagaattcccatgttacccatttttttatgactctccactgtactgggatgtaggcaggaatcacgtctctagatcacttgaaagtaatgagggacagcttgagaaatattaaatttttatcactttcaattctctgctactacttttaacaattaatttgtatttgtgtgtaatactgattcctctttatgcccttaatgtttttattaaaacataatgtgctcataaacacagagactaaatctttttgcttttactaatttaatttttaacaaatgttgtgcataaataggaacttcttaaaccctcgtgattgttattaaacttgtcagcattaattgaatgtactctttcttcctttgaacttgaaaacacattcaaactgtctttcatgaggcttaacgcagtctgcttggtattacagttatttgggaatagcctttcctacagtataacaccaactatctaagttctgcaccaactacctggctcgtttttgtcaaatacacagtcagtactgattgaatgataagtaattgttgccaaacagaattcactaccaacctaaaccatggacttacacattctgtaatacctccttaaactaactctagctctgcagcatagataaacattcctag

SEQ ID NO: 34366 - DNA, 1003 bp, Homo sapiens
ttgatataatacgtacatttctcaaagttctatcaaacatcatttgtttagaaggctcacttatgtgactactggtttccttctgtattaatagaataaaattttcctacttgaaattacttcatgtaaacctagaaaggaaagaacattgttcttgaaaaattggacaaagtgacagtagtttggcatttttaatgatgtgtatgagacaataaaaactttaagttgatattttctattttattctcttaatcatttgctttttaattcattcattcaacaactatttatgtaatgcctgccatatgccaggtattgttttgggcaatgaagataccacaaaacacaggaaaaacagccgtgtttttgtggaactttcattctagtgagtaacacagacaatgaataagtgtaagcctataaataagaaataaaacatactgagtgcttagtaatacaaagaaaaagaaagttggttaaagggataggaaatgttgggaatacattttggagtcaggaaagtcctctctgataaatgttataaagtatgtgaaagggattgctcttaacgaatctgaaagaaagatcttgagaaggaggaaagccttttggagaaactaaaagacctgctgatttcagaaactaaggcacaaggtgaggtcaggaagctacccagggatcaggacatacagcaccttctaggtcatggtaaagttttgaatttttttttttttcttattgggatgagaagtcattggaagataaaaggcatgggagtgatatagcatgactttagaagaagagttttgctgttgcctattgaataaggagactggttagagacatgggttttgaaacagtgacatgagggagaatatatttctttaattcagggagaagttcacaatgtctactgatgtggtggtggtagatgtggcaatggttaggagaggtcagaaggccaaaatgctttttgagggattcaatattgagggtagaaaaa

SEQ ID NO: 34367 - DNA, 1103 bp, Homo sapiens
ttcttcaatgggaagagaacaagtagagtgtcagctcacagaagccgtcctagaagaatttcatgcttcagctgttagagtaggaagaactttaaaaactttaactttgttaaacacaaggttattgctgactattgaaagtcttcaaaacatcaaaatgcaaagggttaatgggtaagtgagagactttacttaagataaagaaacatactttatcttgctctcaatggtaaaactcaggcgcgttagaatggtggttccatgtatatggttggtatgaagatgagaaattacagggttcaatgataggttgattttcaccgtattcatttggtgggggaaactgtttcacctcatcgattttttagtgctaaacaagtcatgttctcctgttcattagggattgcttcattgcttttcaattcgttttttcatcagtttgccacttctatgtgttagggctgtgcttcatagtgagtgcaattcccaactattgatggatgtgacatgcccactctaaaatatgaaagagtacaaaatgcagcatcatcatgggaaacacagatgcaaattcattggagtagactgaatggttgtttagtttcactgtatttatcaaagttcttgaagaatcgttcttacgtcaagataggaaataacaataaatattaaggaaataaagatctatacttcacgcatttatttgtatacaatagaagaataagtacacatcccttagctgactcttaacaagttttattgggcatgtatattctactttattgcataaccataaaatagctcaaggaaaagtaaatgagctaattctgcactatttactaagggaaacttctcatcaaatttattgggagttttgcctgagaaaatactaaataatcaggtattttttttcccctagactattcacatagcagtacagaaagtagtttttcaatgtttaagtgctactgtatttctgcatgaaaagtcacctctttcacaactgctatgtaacttatgatgtgaattatggcttcaacttactgctattaactccacttgaaggatcagagtgttgtgatcagctagctttttttattgtt

SEQ ID NO: 34368 - DNA, 1189 bp, Homo sapiens
aaagaaaaccagattggccacgagtgattattattcatgttaggtgatgggtgcacagagttcagggttcattactattctttctacctttataaatgtttgaagtctttgataatttaaaaatctctttaaagagaagtgcatagtatgtttctttttgattcaactttttatgtaacagaatcctttttgaaacaaagccccagctcatcctcccaaccctttcagatgaacactttctactttatagtggaggggccatgcacagcgttaggaattgctgtcacttcacttgatgaaggtccaaaagccagtctagtaaaacccctgggaatactgttgagtgatttctaacatgttagaagcctggaaatgttggctacacctcaagctcatttatctgtaaagctttacttctgtgatttatcattgtcatttacttccttttacatttgctcctagaaaaatgatgttggtggtgataatgtactaatggttccatgtaatctagaaactttgacttaatagtcacaacagctctatgaggcaggtgctatcatgatatccattttgcagatgaagaaactgtagtgtggagaagtgcctggggttggccacacagcccacatgtaacagagctggggtttgaatccgtgcggtcacatagtattcaaccaagtgaccctccaaggtactttctcaataatagagggtcaggcaaaggaaaatggctcacacttgtaatcacagcactttgggaggctgaggcaggaggatcgcttgagttttgagaccagtctgggcaacatagagacccgtgtgtgtgtgtgtgtgtgtgtgtgtgtgtgtttgtctataagccaggcactgtggcccacctgtagtcccagctactcaggaggctgagacgggaggatcacttgagcccaggagatggagtctgtagtgacctatgttcgtgccactgcactccagcctgggtgacggagagacagtctgtctctaaaataaataataataataataggttaactttccaaactatgtttatgttaccaaattcctctttaaacaacaaaggagagtcaacacctcacacttttgctttccctcctccggagcttctgtcttttttaagtggctaccccaccacgggccctccctgagactctgactttcctgcagtgtg

SEQ ID NO: 34369 - DNA, 1091 bp, Homo sapiens
tatggctattggcctaatgcagagggcagagggagggggagttgctgcctctatcatcctgtcaaaggtatgtgagttctggagacaattgtgaagcatcagtagaaatgttgaccttgctcaagggctatcctgccaagggcaagtggctccaataaaaagagggtgtagaggaagcaggaacagccaaataggagcagtgagggaagaagtcttattttttttttttaacagctttaagtagctgcaggtgctgacttaccatccatcctgtagaatcaggatccaggcgcctggaaatactgattaagtcctgcatggggaggcaccatggggaattattaatgaagactttcctgcccacagtgctgtgctgatttaacgcaattcaaatgacacacacaagcccagcctcaacacacctgtgtctattagattaataaaaacaattcaaaaggatgagtagctatatgaaaatataactaagtatagagagtggcaatgatatgaaacacacgatgatactagagtgaatttgaacgactggaaccagtaaagacagagtaagcgtctccatggagcaggagaagcaggtgaaagatggtgatggaggaggcgaaggaagatttagcatgaaaaagtaggatattcaggaaaaaaaacatactattttcagtacacagtactgtcctgcaaagtaggtttgttttactgaagcaaaaactgagataacaaataagtattacaatttaagaaattcaagagaacactacaaactgtaaaagatcctgtcctctgaattcacatctcatgtattatctatttgtttcctacatcccaagaactgccttttgtcattactgttacttaactttttgtcaccttaattaaatcaaaagcttttgaaaagtacaaactgcctgctacgttttgcctgatcttaaagcaccaagcactgggctgggtacccagcaggcattcagtaattatttgtgaatttcaggattagtcacaacatcatgcaaagacggtcacttttgcttctttacttagctatattggaggcagttgcagtaatgtattcaggcagg

SEQ ID NO: 34370 - DNA, 1113 bp, Homo sapiens
aaataacatagtaatgatggtaatagccaatgtttattagtagttaccaggtacctggcattctactgatgcttttcacgcatcattcaactgtgcctagcctcgtatttaaggttgcatatttatctgctaaatctggccacgctcctcttattaacaataagaaaagtgaagttaaagatctctcccaaagtcatagagctgttaagaagtagttggaatttggaaccaacatcttttgtacttcagagcctatcttttaaatgctacactataatttagcaggctctaatgaaacaatgcaaaagttcaatttgcagaaagacttaatgacaaaaatgatgggcagaatttgtctcattgacaatgacagttgaatactttaagaatgaagaaaaatgtagtttagttttctttgaatttagatttgacatatttattgtttctttgtagaaggatgagtttcgcttcaacttgatttgaatagacactgaataagcacagctgctttattttaactttgacacagacaggaatgcatggaaagtttcatatgggaatgagtagaaactcgtttgagagaaactgagcaataggactagagttctactattatggaaaaaaataacattcttaccataagccacactagattgaacactatatataaaaatatatatatgtatatatatttttatatatatttatttatatatttatttatatatatatttatttatatatatatttatttatatacatatttatatatatatattaggctcctgcccttgcacagaaactaggagatagggatgcaatcttccttaaatacatttcaaaaagatgattccctggtagctgagaaaggtattcctggatcttaaacctggaataaggctcacctagctagaaaggatttccatatattttaacaagacagaaaacaaatttacaattacatgttttcctaagtgaatgttctacaaaaagatgaaggcaggggttaggaggtagtctcttctcttattttcaacaggatgacttatttttaatatatatttgcacttattttaatatatgtttgctcttatccttaccaaatatggaaag

SEQ ID NO: 34371 - DNA, 1075 bp, Homo sapiens
tggaaatatgatgtgcaatatgaatatttgtatatacaggaggtcattatgatggtcaggtttgaggaagttttaaggagaagaggactcctgaaaggagaaagaaagagtgaccaaaaaactttaccactagacctaggactcagagtgaaaatgttgatgtaacagaaacatgattatgatttattccatatttcagaattgttggatgacaagtttatcatatggcaaagaataagtatacccttgattttgatatttaaataaaaggcatctgataataccatctccagagaataaagttttataaatttaaaatccacccctgcctcccagactgtagtcgctgagttttactccaaatattttcttaaaaataaaagtaagtgaacttgttttcttctcccggttttgctgagaacacaaagatttcaatttactttgatgccaattattccaggcaataaaagacacaattttttcatggtaaaatgtcttccaggaagctacagaactgtgtataataaaaatacttaggtgaagagaatatctgttgaattgatgtgcttttgaatatttctttttaaattttatgagctgtctcctgttctatccttttcttgatctcagagaaatgaagagggctttaaaagtggaaaatatacatctttctctgtatgttgcttttaacaaactatgtgatagtatatgtcacccaggatttgaaaaatgaagtgactacatcctctctggcagaagaatatcttttaagcttagtaatgtagagcatagtattggatataatatatactacctttcactttcccttagactatcaaataaacttacagctagtagagaggaccacattagatcatctacttttcaggtaagctggtgtattctaaagctttttgtatggtatgcttattctcttcataataaggcataacacgtatctcttgacatgtttgcaatcccagtgaataaatgagcaaatatatttatgattctcatgatgaaagacatctggtggtattatcatagtcttaatatatataggctactactatta

SEQ ID NO: 34372 - DNA, 1024 bp, Homo sapiens
ctctgacgctctgtgctgtactgcccctcctatccccaaacccatatggtcaccaagtcaaatccatggcactcagacagcctttgttgaggagccctcccacacaaacacccacatcatcctgcctggactttgcaacccactctgggccacagtagctcttttcttctaattctaatgcagctttaggaagggaagaggaagaagaatagtataatttttgagattcattcattttgtgtttgtttggagactgaggtcaatgtttaatttcttgaagatggatatctagttgtttctgaatcaacggataatgattttgagattcattcgtgttgttgcatgtatcaatagtccatcccttttatttactgtgcagtaccccattgtatggttacatcatgatttatttgttttcctattgatagacacttaggttgttttcagtttttagctattatggataaagctactctggacattcatgggcacattttttaatggacataggttttcatttcgttgtataaatatctaggaatagaatttcattgtaagaagctaccaaatcaattatcaaaatggttttaccattgtacactctatccaccaatgtacaagggttccatttgctccataacctttccaccattttgggttttcaatctcagccatcctagtgggaaagtagtaacttgtgcttttaatttacatttccctagtgacaaatgaggtaagacatttttccattttattgtaaaagttctttagattttctctatacaaatcatttatcagatagagagaaagaaaatattttatcctacttattaattatatattcatgttcttaaataatctattgataagcataagttttcatgttgctagaatctagtttattaattgcttttattcaatgttaagtgctttctgatttctgtataagaaatatttgattaccccaatattttaaagatactcttttttcaggaagctttacaattttggctcttgtgtttat

SEQ ID NO: 34373 - DNA, 1068 bp, Homo sapiens
tttatcaggaagtaagaggtgtcttaattttcctggaccatggggatcatgtaggaaagtcctgaataatgatattggatcaagttggtgcaaaagtaactgcagtttttgtcattaaaaatgatgacaagaactgcagttacttttgcaccaacctaataattgtcatttgaggaccttttatggaggcccataaatggtctaggaaaataaacagtataggaccattaaagattgccaaatacgaaggtaataagtttgtatcaacaattttggtgtggttatccagaggcagttcaaaataatttttttatatactttaagttctagggtacgtgtacacaatgtaaaggtttgatacataggtatacttgtgccatgttggtttgctgcacccattaactcgtcatttacattaggtatttctcctaatgctatccctccccccctccccccaccccatgacaggccccagtgtgtgatgttccctgccctgtgtccaagtgttctcattgttcaattcccacctatgagtgagaacatgccgtgtttgattttctgtccttgcaatagtttgctcagaataatggtttccagcttcatccatgtccctacaaagaacatgaactcatcctttttatggctgcatagtattccatggtgtatatgtgccacattttctgaatccagtctattattgatggacatttgggttggttccaagtctttgctattgtgaatagtggcacaataaacatatgtgtgcatgtgtctttatagtagcatgatttataatcctttgagtatatacccagtaatgggatggctgggtcaaatggtatttctagttctaaatccttgaggaattgccacactgtcttccacaatggttgaactagtttacactcccaccaacagtgtaaaagcgttcctatttctccacatgctctccagcacctgttgtttcctgactttttaatgatcaccattctaactggcatgagacggtatctcattgtggttttgatttgcatttctctgatggccagtgatgattagcattttttc

SEQ ID NO: 34374 - DNA, 1033 bp, Homo sapiens
tgactggatggattttacccaatatgactggttttaaaatgatttcagtctttctcacatcttcttacaaatatggtgagggcatatatgtttttgcaaaacctcatgcataaggaaaaatagcgaatggcacagcttaaggcagatatgcaggatatataacggacaaaggacactctagaaggaaaaactgttctcctactcacatcacttctgacaccaaatggagcaattttccagcaattaaagtgtgggacaccaactggtgtccagagttagcaggaaactgccctaccgccaggtgaagggctcagtcgcacaagactgcctacactttagacatcagttgtgagtctggagtgctcgtggtacctacacttctgtttatcttggctgtaaatgtgagattcctacaatccctccccagtttcatgagtttgctcaaagggatcagagaacttggggaaacacttaggttgaccagtttagtacaaaggattaaaaggatacagatgaacagcccgatgaagaggcacataaaatgaagtatggggaaagggtgcagagcttccataccctttctgggcctgccaccctcccggaacacccctcccacagtaccctgaagcacaagcaaacggacctgttggtggcaatggaagcaagtttgtcctctcccattctaagtgcgccatagcccattagggtcattgttctctcagatcctgaggcatattttcattcccagagcctggcaaggccctacagtaccaaagcagggagaaaataaaacacttttctatatactttgcctgaaaaattcttccttagagaattccattgaacaaaggaaggaaatcctccttccactgtgtggaaagtgcttcctggctcagatcttttcgtcagacacctccccgtggccatttctttagatactcattcagaaactacagattgaaataatgccaaacaaacaggcacagaagtggttagtgcttgcttcactccaaaatgtgaatttggtcataga

SEQ ID NO: 34375 - DNA, 1033 bp, Homo sapiens
ctccagcatttggagatacagcagagaaaaatgactttactgataatatcaccaagaagcagtcagtgagaatttttgaggattttaaaagtcctgcttagttgatgaagtatctttccaaatatctttctttttaatatcaatttatttatgttggtctttttcctggtgcttgttgcccacatgtctagcagttttggttgtgttctcgtacttaagacagaagaaccagatagcgggtgtaggtttcctctaattctctaaaaacaggtctgttgtatacttgagggcaagatggggcacataaagctgtgaaataataataatatattttgggattcagaataattctcttttattccagttatgcttctctgattatgagactgtttaaatatttaggttgcactttcacaaatcatatgaagttgaaatatctacatagcttcagagcatggagtgatacggaaataacttaattttgtctattgtctataagcattctgatcaaaataactaatttagaaaaagccacaaatagagaaaaacagtaaacaaaacatcatagttgcagctgatttcatttgctgatatttttacactattactaataaagatgcaatttaaatgactaggattttgctttgattctgaaagtaaggtaaaaaacacaaatgggaaaaaagcaagtagagagaattgacttactgctgtcgacttgctctattttcttatcaatagattgtcattttatgggaaaattcatatgtatttaaagcagcagagtgatggaatgtacaacagaggttttcaaaacagtcaatttgaatgtattccatgagtgctattcttaatagaaacatacattacaatgttgatcttgctcagtgttgttattttggcatcttaaaatttctgttttgtcaaagcctgctatttcatttaaaaaaacaaaaaaacaaaaaaacaaacaaatctttttgcaagactaacctcaaaataaagccatgtccttaggtaccaaaattacaaa

SEQ ID NO: 34376 - DNA, 1040 bp, Homo sapiens
agagagacatacaattgataggtacgggcagaatatatactaaggcatccttaatcttcagctcacgaatccgtaattcattatctgatggaaatacatctacgctattgatttccataagatgaagacttttggtttctctaatcacgtccattagtttcctctagacagattaataattgttcacaattgctaatggcaattgtaggcatttaattttgcctctacccttgtgaagttgctacttggcagcatatttgtgcagtagtagataaagaataatcctaaggcaataaaacagtctctatttgttatagtactttgtttacaaaagcatcgttataagcacttcagagtacaaaactgtccacgtactttttttaaaattagaaatttattttagactttaagacaatttcattacctaagggaccaaaaactgatttttaaaactgatgttacccaaagaagatgagcttctttattttcttttgactggtaaatctgaacaatgcaaatctaagcaatgaatcttttcaagagaattgcagttatttttaagtccatatgtagaatgtttatacatttatacaatagattttatgttttattgtctcatttcttatgatttagagtggtttttgagtctgatatgtgttaattctttaagaacatcttaaaatgttgctctacgattattttaaattaagtagatgtaccctcagttctattcaatggcattcagttgctgaagaattgatcaattattttagagaagtttctactgtggcacagacctcagatttctatggaagatgtaaaagtcctcaatgttcagagtaaaagtattgattgcaaaatgactttcaactccaaacaagctttgatttaaatgataatatcttccaattgctaaaactagatacaacatttgatgtacctaagcataaatcattcttccatcctataaatattgccgaaaattaaggaacttattaggtaatataatcataataagaattaacgtatatcaacatacc

SEQ ID NO: 34377 - DNA, 1066 bp, Homo sapiens
tgattttgcaattatgaattgtgcttccacagacatgtgtgtgcaagtatctttttcaaataatgacttcttttcctctgggtagatacccagtagtgggattgatggatcaaatggtagttctacttttagttctttaaagaacctccacactgttttccatagtggctgtgctagtttacatccccaccagcagtgaggaatggttctctgtttgccgcatccacaccaacatctgctgttttttgatttttttattatggccattcttgcaggagtatggtggtattgcattgtggtttcgattcacatttccctgattgttagtgatattgagcattttttcacatgtttattagccacttgtatatcttcttttgagaattgttcatgcccttagcacactttttgatggggttgtttgttttctttcttgctgaattgtttgagttcgttgtagattgtggatattagtcctttgtcaaatgtatatatggtggagattttcccccactctgtgggttgtctgtttactctgctgactgttcttttgccgtgcaaaagctctttagtttcattaggtcccagctatttatctttgtttttattgtgtttacctttgggttcttggtcatgaaatccttgcctaagccaatgtctagaagaatttttgtagtttcaggtcttaggtttaaggccttgatccagcttgagtttatttttttgtataaggtgagagatgaggatccagtttcattcccctacatgtggctagccaattatcccagcaccatttgttgaaaagggtgccctttccccactttatgtttttgtttgcattgttgaagatcagttggctgtaagtatttgggtttatttctgggttctctattctgttccattggcctatgtgcctatttttatacctgtaccatgctgttttggtgattatggtcttaaagtatagtgtgatgcctccagatttgttatttttgcttagtcttgctttggatatgcaggctcttttttggttccatatgaattttagaattgttttttctaaact

SEQ ID NO: 34378 - DNA, 1080 bp, Homo sapiens
acacgtttgtcaggattattgcttctcttggtatacaacatgtggctacaattattgaagtgtttatcattatagaaagtatgatgtagatatctcactgaataaattcatactactagcaaggcaataacaaactttcttaacaattcatagaaactggaggcatgtgagtcctgggtcctaagaaggccctaaactggcagatattaggttgattctgctccgaatcatttgtcattctttgttttgacagccaacaaatccataagcctatctcaatataggtagtaaattgataattaaactctttattagatttctttgtctagattccaacgagaaggaccgtaagggaatggactgtcttcttctcccgctaaaatgcaatttctggaggttctctatcttacccctaagcagagttcctagatcataaaaggcatttggtaaatgtttaaattgcacatcatgataaaatattttgctgaagtcgttctttaaaatcatttgacatgatatactaaccaatgaattggttactgttgtcatggtgcaccaattgagtcctgagaacaacattattttaaataataagttgattgcctcagcttcaaaaaattttcggtccataggctgttcatcagtaggttcaataaatatatcatctctgggaaacttagtaagcaaatgaattaaaatgtttgaaatatttgaaatgatagcttagtatgaggaattatttcttaaattgtgtaagatagaagcatttcttttctaacagtttgactgaatttagatgactatgagtaaaattttagatttattacatcttacgttatcttccttggcagagagtacatttagaagagaaactggccaaccaaaggcaacagtttattgttttccaaatgtccacaggatgtgtagatcttggaagaaacagttattgccagcagtattagaagtacatagacttgcctttcttatgtaaatatctgtaagaattagtgcatgctatttttatttttttgttaattgaacaagctttcatgttttttattataaatgaatacaaagatt

SEQ ID NO: 34379 - DNA, 1053 bp, Homo sapiens
tctcagctactccagaggctaaggcaggagaatcgcttgaattcggggaggcaaaggttgcagtgagtggagattgcaccactgcactccagcctgggcgacagagcgagactccatctcaaacaaaaaagaaaaagaaaaaaagaaatagatgacagtttaacactcctttcaactctcttatatgaatttttctgattatttatgtcctgttaatatcatgactcagttcatttaattattaaagaccttacaaacgattccatttctttttaaagatttttatttttctcaaactcccactaagctatttatttccaatttgtgtgtgataaattggaaattgtgcgctgaactgttaaactgatgagcaaacaattaaatgcagataagaagctttaaatttaatacttagaaaatataatattcagattattaaagggatgttatggtagattcatttatctaactacaactgtgacggtttatgaaatcaccaaaacactattgaggataatattgagtagattaatctgtaattttgtgaagtaaacattgatttagaaactgttttctttatttaatattaaagctaaattttacatttaaaatagatatagaagaaaatttgattctaaagctttggtttggttggttaaactgccatatttcttagatattagttaatggatacatttgattttcaagatttaaaaatgacaaggtggtcatctttttaaaaaaattttcatcaaatacacattgtgaaaatgctaactaggtaataaaaacctcattgaatgctaaatattcaacattattttaggtatataattgaaagaggtattttcttcagttctttagcaaaaacgccaaaatgcctaggtttaccctctgcagattttaatctaaatcagagatcagaataaatcagaagtgaaactcaccacatgtgcgtatgtatttgtgtgcatgtgtgttggggagtaggatagaggtttatgtgcagttgtcagagtagattgcagatgtgtagtctggtaaagtatgttt

SEQ ID NO: 34380 - DNA, 1032 bp, Homo sapiens
gcaaggaactcagaccccttgagggggcagggctggcttggcagtcagctccacactctgtagcccatgggtcctgaattcatcctcacaccatgttaggatagaaaatatgttgctagatatgacagttctaaggtttcaaaagaaatgcaattatgattattatactgtttaataaagaaagaagataagttcggacattaaaaagtttttgaaatgattaaaattataatattttgtcatttaaacttgtatattaagtataatcatttttcctaaatttgaaacacaaatatcaccatgacattcaatttatgaagaaaaggatattttataaattatataagaaagctactttatgaactgaaagaaggaaaggttttgtacaagcatattccctttatctccaccaatataaagattgaattataaaaattcttgatagacagaaatcttatgactagattgagctctacgatgcagtatctttgtattataacactagagaatctgtacaaaaagcattgtctgctccagacatttaattataaaatatgatcttcattctgaattcagctcctatggtaaagcatgatctctaaatgaaatattttgtatttcatggaccactaagcaaatcctgaattctaaaatattaattttagcaattttattttcctgaaacaaatagtggtcactttcttctctttgtttttgaagtaaaaatgattagatcgttcaagttatgtttagaatatggagtatgcgtatggaataaaaatacaatgcaaatgtaaatgttgacttccaattgaattttcttttcttttcttttctttttttttgagatggagtctcactctgtcacccaggctggagtgcagtggtgcgatctctgctcactgcaacctctgcctgtcaggttcaaggattctcctgccacagcctcctgagtagctgggactgcaagcatgtgccaccatgcctggctaatttgtttgtatttttagtaaagatggggtttcaccatgt

SEQ ID NO: 34381 - DNA, 1047 bp, Homo sapiens
caggtgtggtgacgcgcaactgtaatcccagctacttgggaggctgaggtaggagaatcacttgaacctggaaggaaaaggccgcagtgagttgagatcgcgccattgcactccagcctgcgtgacagggcgaaactctgtctcgaaacaaacaaacaaaccaaaaaaaaaaggactatagagtctgtagtcattgtggaaaatagaaagtattgttttgttttcaaataattaataataatcattattagcaccagatgaaacacaggagactatggatggttcacatggagtttcatgctcatatatgtaagagatgatacaggaggggaggtatcatctgagacagccaataatatctatgaaaacacaaaatgggaaagtacatataacaacttttaaatgttaaaagttaattattctttatagttgaaatactataggaatataaaatacaaaatataaaatagttatttagtagttatataaaatacaaaacatgtattaaaccagttctgcataatgttctgtggaagagtccttgtagacaataaaggcaatatgttaatttccatcttgtcatgcctatatccttgtacaaacttattgaattatacaaaggagatgttatctccatttacagtttgaaagtctgatataccaaaagattgtcatatatctcaaatttgtgtgctaatatttatggagcccagtgaacacggaatgattctgtcagtgggctcttttggtctggttggtgataattcattgtccctaattctcagaactaggcatgaccatctgcccaataacaaaaaaggaacgaaaagattgtggggggaaatatttgggattctggccactgcacaaggataatttatcaaaaaggtaaaacagagtatttgctagggaaatacaaagtggatttaaattcattggtagcttggcttagaacacactttattgttgggagtggaaaaataactaaagatgactttttgttttttatatcaatcactccttataaacaaaaattaaacttttagt

SEQ ID NO: 34382 - DNA, 1046 bp, Homo sapiens
gaatttatggttcactacaatttcacataaggtgattaatgtaaataatttctattaaattcataactctgtcattctagtatcataacaaaactaaaatttatgaaggaagtagcaagtttctattttaagtacctttggcaccctttgattagatatcatgtatatttaaagggtttaatgtaacaaatgagcttgtttcttgcttataaatttagctaatctaggttggatttataaccatagtactgttaggagataacatacatctaaactattgatatactttgctctattaatactccattgtagagtgtacagttggtttttgagcaagcagagagttggagtgctgatgaccctgcagtcaaaaatccctgtgcagcttctgactcccccaaaccttgactactaatagcctactcttgaccagaagccttactgataacatagtcaattaacacatatgatatatgttataggcattatatactgtattcttacaataaagcaagctagagaaaagacagtgttattaagacactcataaggaagagaaaatatattgatattcattaagtggaagtggattatcacaaaagtcttcgtcctcatcatcttcatgttgagtaggctgaggaggagcgatgggggaattggtcttgttgtctcaggggtggtagatgtattggaaaatccatatataagtggacccacacagttcaaacctgtgttattcaggggtcacttgtgttagttatctactgctgcataataaattgcccaaagatgtaacatctcaaacaatgaacttaaagtttctgtggcttacggtttttggagcagctcaggcggttagttctggcttaggagctctttcgtaaagttatggtcaaagttttgactggggctgtttcctctgaaggcttgggaaggctgaaggatctcgttctaaaatgtcaggttcggaaggctgctggcaaggccttcccttcctcctcaagggggcctctccatcgtgctgcttaagcgtcctcactacgagg

SEQ ID NO: 34383 - DNA, 1066 bp, Homo sapiens
tttacacgaccatattttattcagtggttcttgtggatattttgctattttaaaatgttctctagtggaaatctgagtacacgtatctttatatatttagaataataattaagtagatttctacaagtggagttacctggtcaaataatatgcacgttttcaaggtgatgtgggtgagtagtgtcagattgttctccaagtagtgtgactcttctcattgaagttcacacttacggtggatgtgagtgctactttcccaatatctttgacaacactagatattaaaagatattttataacagatctgggctataggacacttggcctactgttgttattatctgaatcatagactttgaaattttcttgtttccgtttatgtacatagaattgttgctcaatgcattttaattaaaaaataattctcgaacataattgtatttctgagaatatattattaatgacatattcaggtataaggtggaagttttccaaacatagaagaaatttttatgtattaaagaaatacaatggacaaggagaaaatttaaatattgaggaacagtatagcttttaaaatccaaacacagaatgatacaaaaactctgaaagagagtgtaggagtgctaagtggagtcggtgaaaggaaaacacagaggaaagctttttcagagagacatattcaatatattctaaatagtgtttccctgtaggaaatcacattaaaatttatatgactttggaaagcagaaaatgggattaactctccctccctccttttcatagatcttggatgctgggaccacagagataattaaattagctctccttggtttatttatttttaatgcaaaaaaatgcacatgaaacaagcattaattaccttgaatttgtactatgatccttttttctacaaacttagagaacctctagttactcatgtttatttcccagcaattcacatggcataattatcagtggaatatatgttagaaaggtgttgccccctgtaaggtgctcacacagaaccaaaccctggcctcctgagagccagttgtctcttcac

SEQ ID NO: 34384 - DNA, 1055 bp, Homo sapiens
taggtctgcccagtttgctaaaacagccccttcgtaaaaaatatatcatgttacttgatttacccgaacccaagtgcctaggcataacttatttcagcagtgcctgccgtttaatagaatacaagataaatttttgcatttcttcaaactgttgtatttcctacttttagcctgatggttgggttagatctagtttttaaagtggggagaagagtatggccgggagttacagcaggtgctttaaggagatggcaaacatttcaggatcagtgtggtattagaaatagctctgcagtaggaaagctgcagaagtcttgcaatcttgctgtaatcagaaggcagtgcgagtgctgagatcattttattacagaaagaatgagatgtgggaaggaagagaaaatacatatctatgttcttaatcttagtatattgacttatattttgtttctctatttttctcataagaatcttttttttttcctaaaagacattgttgcagaatactttatctcaaaaccatcactgcatcattataaatgtattgtttaggaggatttcaaggtcttccagatatgaatgaaaaatcatttattagcagataaagttactaattgaatgagaggtaaccacggtcgcaattgcacattgttttaacagttgtcccgagaagacacttccagactgataggcctcaaagaaaaatatgtgttgtattctacaaatattaataatctagacacaagtgttagagatgaaacttagggaaaaacaatacaattcatggcttcagtgtttttaatatctaatgggggaaatagtactcataggatttatatagtatttttttttattttggctatacaatttgcacactgtgagtcatgcaagctcaataccgtgtgttcagaatgagaaacttgtcttgtttcatttttgtatgttcccagtgcaaggtaagtttcttatacatttaagtgcacataaaatatttattgagctgaaataaaaactatattttgctactcaaaagtaaccaaatgatcatcatcacaaag

SEQ ID NO: 34385 - DNA, 1030 bp, Homo sapiens
cacatgtagaccatggatatttacaatattatgtaccaataacagaaaaagtatagagaactagaaggtgaagacaactcttgaacccaggtcttcagactaggaagtcttctttcttataaagggcttactaaccattacttttccaggcttcatttgctgtcgtggttttacgttgtgcaaatgcgtaagatgctacgggataattctattttataataattttttttttgccggtagataatttaaatagaatctgaactaggcaaaaatgtgaaatagatgaaaaaaattatctgcttctccctactgacccagtcctctcaaactccctttctcccattatcatcccagggaaaacttcctctataggaagccatctaaaattcattgatattaatttttaaaagagcagtaatgaccactaaaagtattaacttctgacccctgtcccttccaccgggacttttgcattccaagtaattaggtagagggatgctgttttaattgtcaacaagagcctatgagttttttttgtttgtttatttttgtttcttaatttaagctgagaagtcaattgttttctaacatttctgcaaggaagcacacattacatacatgctgcatttttatagtagtggttgttccaatttctccatggaataaaagaatttcctaccttatcaggtgcaaaggacaaaataatatacattctttcaaactttctgattctgtgaagtagtggctcagcacgtaattgctgatgggacgcgcactctcttcttctgaccacacacctggatttgcatctgcccaaatgtttcactgattcattaaaaaaatatatattgagcctctgctgtgacctagttccatgcacttggaattctattgtgaagaaaacagtcaatctctctgtccttagacaacttatattttgtgcattttctaggaatcaaacgcccaagaataagcctctaacttcacctttcctaaacacacaaattacattcagatgtatgtgggcctt

SEQ ID NO: 34386 - DNA, 1077 bp, Homo sapiens
attttagaaaatattttgagtgaataatgtactagaaatttttacatttaaaaaatcacaagactacatttataattgcaagtctacattctctaacttctctgaataaatacaaaatttaattaagaactatccatagaatggtagacatttggaatagaaaattaccctatatagttcacctctttcactggagtaatttatttgcagattgaacactcagtagagaaatttttccacatctaagggacagcatcaaccaggaagtcttcctctagaggaagtctctaaaagtattggagttcctagattacttaattggtcatgaaacaaaacactgcaagagaaagtaaatcaaacctaatagggagagtttattctaagttagtattttatattagaaaaacctgattttaaaatagtgaaagtggtatttcaaaatgatttatatttattaataatttcttaatatttaataacatatgaaaaggtagatgacaaatggactctgtaggcactgaaacttggtgatataccaactccttcagtgagcggcttagtgtgaaagacacaaagggcaatgtaaacagagacatcaatatgtttccctcaagtttaaaattagaatttattttggaagttcaagtcaacttcattattctctctccttcttggtagtcatttttttttgtttggggctctctcgattaaaccctgtcacttcaggggaagttcaagagaatagtgcattattgatgttacagaaacagttgttactgatcaatatgttttgaaccacatacagagtatatctttaaggacataattcatcaaaaacaggcttactggagctcctcatactattttcattgatttttttcctctctaggaagacatggtagatagtctatatgtgacacaagagttatattcaaaataaagaagtcaggtagtcaattacaaagaaaaaaatcaaatataagcattctaaaagaggaatacaattgaatttaaattcttattctcacattttagtatcctgttcagattatataatcagatgacctgtaattatta

SEQ ID NO: 34387 - DNA, 1023 bp, Homo sapiens
tttttatgatttgaatctttggtaacttatgtaagaaatctttctctattccataaaaatttcctcctatattgtcttctagaatttacataattttggttttcatatttagatttttgattcatttcaggttactttttgtaaatgatctgaggtaacagtcatttttttatatatggatatccaatatttcccacattacatgttaaaaagtatacactttcctcactggattatctgggatcaggaattgaccacataagatgggtcctatttgtagactctattccgtgccattgatctttatgtctgtcttcatgccaacatcacatcaccatagttttatagtaaattttgaattaggtaccacagatactcccactttgcttttcctttgaaaattactttgactattttagctcctttgcattgctatataagttttagaatcttctttttaacctcaaaaacctgttgaaatttttattggcatatcattaaaatataaatcaatctgggaaaattgacacatcaacgatattgagtctcctgatcatggtatctctcttcactgattttcacttcacttacctctcttcacttttcttcattcaacaatgttttgcagtttttggtgtaaagatcttgtatgtattttagtcagtttatccttacatatttcatgacattcgttgctactttaaatggtattgtagtataaattccattattatattgtcacaaatacatagaaatacaattgacatttgcaaattgacacggtattctgcaatgtaataaaatttacttattagttctgtgaactattttgtaaattccatgggaaaagtgaatagacaactttgcaatgtgtgaataaaggcagttttaattctaatttccaaacgtgctagggttaaaatatgagtagaaatggagaaaatagacgacctgccttattactgatcttagggagaaagcattccatctttcaccattaacatgactttatctgtaggttta

SEQ ID NO: 34388 - DNA, 1052 bp, Homo sapiens
ttcttgatcatgtgtatatcttcttttgagaaatgtccatttaaactcttgacccaatttttcattaggctaattgtgttttaattttttggttgcaagagttcttaaaatatgctaggtgcaagttcccttatcacatatatgatttgttagtatttcctttcattctgtgggttttcttttcattttcttaattattttcttagaagcatatttttttttcaattttaaaaatagtccaagtagccaggcgcagtggctcatgcctgtaatcccaggactttgggaggccaaggctgttggatcacctgaggtcaggagtttgagaccagcctggccaatatggtgaagccccgtctctacaaaaaatacaaaaattagctgggcatggtggctcatgcctgtaatctcagctacttgggaggctgaggcaggagaatgacttgaacccaggaggcagaggttgcagtgagccgagatggtgccattgcactctccagcctgggcaacaagagtgaaatcacatctcaaaaaaaagaaaaaaagtccaatttatctattttttgtcactgatgactttggtgtcatatctaaaaaactgtcatctaacccgaggtgaagcatattatctcttatgttttcttttaagagttttatagttttaacctttaaatttgtgactataattcactttgagtcaattttcttatgatgtgaaggagttcaacctcattcttcaaagatatgatttttgaaagaaaaaaaattgtacccatccttttttaaaacttagtttccataatcatgttcttgagttgggtaaacatgtagatgtgttcagagaaaaagacaactgaaaaaaaaaaaaacttggtagaaatacatatttattttttcattaagatatatatttttttctcttgcatggaatagactgactaacacattcttcatacagttatcaaccaaacatttgatgcctgggattgctcagaaacaaagagtgcttttacttagaaattacctttgtgttgattattcttgaacttctc

SEQ ID NO: 34389 - DNA, 1062 bp, Homo sapiens
ttggcattagtgattttgaattatgtttcttttaagagactgtttttcactgaaacttttgatgaaacaaaatccactttttttttgagacagagtttcactcttgttgcccaggctggagtgcagtggtgtgatctcggctcactgcaacctacgcctcttaggttcaagcgattctcccgtctcatcctcctgagtagctgggattacaggcatgtgtcaccatgcccggctaatttttgtatttttagtagagagggggtttcatcatattggtcaggttggtctcaaactcttgaccccaggagatctgcctgcccctgcctcccaaagtgctgggattacaggtgtgagccaccgcacccggccttatggaaaaaaaaaaaaaatgttgcagcttttctcaggcagatagccctgaccgggggatcgggggtgggggaggctggacacagggaacaaacaaaaaatatgctctttcaagtcactgtgtattttgtggctatggatgaaaagactgcaaatctggagaggttagtcaccctggatcatcagtcagatgttcatacaattgagatgcttacactataaatttcagtcacttccattttgtaaatcaaatgtttattgtttattactgaaaaatatcagtagaaaggaaatataaaattgtcatccctctggtttacttagtataatccactttgcgctcaaaggtatcatattcacatgtttatatcctctgtccccatttgtatttacttttatcgataatacgaggcaactactctgctcagaatgcagttttcttctttctgcagaggttagaactgaatcattttgggtgtcttcctagaaactgcttggtgtttcttttaagttcatacaattccagcagggcctgctccctattcagtcattggggatagatttatattttcagagaaaaacctaaatatgcaaggctagcctgacaacatggttacagggaacccctgccccacctgtcagtacccctaatctcttgttgtggcttttacctgggggcccagccgctaatga

SEQ ID NO: 34390 - DNA, 1112 bp, Homo sapiens
catttttgtgtatagatgttgtctgggtgatggaagggtagagattaaactgaatttcttgcagggtcagtttacatagtgagttctgaaagggctgggtggaagatttacattttcaagcaaaatcattgaaattacggtgagtaaaacatatgataaggatattaacacatacctaataggtcacccatactcacgtgggagttttagtacttcttagtaattccatttacttgacacaaatggttttggctgattgctctaacctatcaccataccttgagcaaaacaactgatgtcattcaataaggagttaggatccattaaagagaagcccattataacagcttatacaatctacaatgcaaatgagaacactgtttcaacataagatgaaaaaggcattctgaaagaggctaaagtattttctaaattttaaaaaagagctagtcttgacgcctaagatttcttaaatatttttcaaagtgtcaactcagaattgtggaatctgtcttttgtcttcccactgtaaggattcaaacttctcataatgcacagaaagatctccagtcagcatccccccccacccaatacaacgttgtgttaaacttcatccaattgtccagctaattcttgtgcttctccaattttactggatatgatgtttttattggggttcatggaagcatggctaatgacatcagcaagctttgtaatttctcactgccagttttctacacaacttacacttttgtcactcaaactgcaccaaattgctccaacaattaatcttaaagcgcaggagtagggggacttttaaatggaccccttcttgggattttgtgttaaaaacaggaaagttcccatgagtgaaggggataagttagcttttccagcctctgcctctccccaagtctcactcttctctgccacctccccccccccaaaaaggaatgaattacatttctcttcttgtcctttaaatgaatagcatagtttgggtgaaattatcaggcaattgcatgccttttatgcagataatgctatttgatgaaagcggtgttttgatctgctaaggataatacagatccagggttggattcattggtgag

SEQ ID NO: 34391 - DNA, 1045 bp, Homo sapiens
ttagtcatacagtgtgcatgaatgcatttgcaaaacaagtgtcaggttttaagatacatcaattcttggttttctggtttaaggtaatttcaataaaactaatacagtcttgcatttcattcaagtatgatgttaggaacttcggtcaaccatcagtatagccatgaccgaagtccattttctcattctgaaagttttctataaaatctgagccttcaaatctagttctagttcagctccactatgcagttgtttgatgtcttgtgacaaatgagagatctgaaggagaggactgagtgcttgttctatgagatgccatcagttaattcttctcacattatctgatgaaagtagcttttagacactgtattgtacttcagatgggaatcttaacatatcaagtttggtaaattttatattgagctatcagcaaaggacaatgtgagttactgaaacaaatcatgaatgtatcacgtatttcatgtaaatgtgatgtaagacgtgtggattggttgtgtaattaccacttcaactttaaaaagcctctataattcacttttaaaattttaaatgttgaggaaagtgaagtataaatagttcatactcttggaaaaatgttactaatgtaagcctcgtagggattattttttattatttttatcttttgaaaaacaatgataccttctaatgtaatttttatcacttaattttaagtctggaacataatcacttgatttaggagtagatataaattattaatgcacattatgctttttttctttttttttttccttaaaagaaagatctcaaaggctttcaggatgaggttctggttcttttactattaagaataattggtataaatggctaattttggtgggagagtgttacatagtctttaggccctcgttattacttttaaaagaatagcccatcggggataggaagctttgtggataagctgccactctttgatgaaggattatacattctcccctaaatctgtgatcccagaatctgttacacaatagttttatcaagtagc

SEQ ID NO: 34392 - DNA, 1059 bp, Homo sapiens
tacatcaatgtcaagtgtcctcactagagaatagctcctctccacaaaaggtttgtggcctctggacttcggtcatcacctaggactgctcaggttctaaaagtctatggttctattgtttgaagatctcctgtgattcatgttaaatagatagtaccaacacagacttgtcagcatttagatgaggacgaaagatgtggctggagactatagatctctggaaaaagacaagactttgaccaggagaggtaagggcgttccaggagagggaaacacaatggacaactgaggcatcaacggtagcaagcccaacttcacgaacaggtaacagcaacaccagcaggtagcacagatcaatgaatttggccagattatttgcatattaaattttcacatctaccaagatatgcgtcctctcatatttcttaaaatatgtagttctctttgtcctttttttccccatttttgaaagaaacattggtacagagaagtatttctttactgttagaaaaacaacagagcaagtttgatgataaacaatgttgacatagcctcagagtcagagacacatggggagtggtgaggactgtgaactaaagggcacacgctttctccaaaaggaggtgccacgtcgcgcctctagactagtcattgccatgtgagggtgaaacctagtgttgccagattgtgagatttctcaagaaatgccagaagatggattgtgtgaaatctctagattttcaaatgtgagctcattggggtaataaaaaacacacaacatacaaaactcacaaatcaaacaaaacaagtctgcagcctgggtttggcagttgggctaccagtttgcaacctgtgatgtagctgcggagatctgcatggatttgggagactgtgaatgagcagtaggtctccagcagaggctgcctcatggagaaatccaggaagggctggagagagagcttgggtccagattgtgggtaatcttgaatgccatcctcttctacccattttggaggagaaaatgttttcagtttacagtacacttcttcctgctttaaa

SEQ ID NO: 34393 - DNA, 1002 bp, Homo sapiens
tagtttaaaatgaattttcatggcttaataactgatttttataaaccgtgcttaggtttactacgaatatatagaaaatatttaaattttctgtatctttgattttttttttcttctttattgtaccttattaggaaagggtctgttttgacttcaaaagaggtcttatgttatgatcattttcatttggcaaggagaaagaagtgatttgatataaaatattcatgagctgacataattaaaaatattaaccgagacatctaaattggcttttgtagtacaccattataaatatttagctctctgtgaaatgtctgtcgtgttgtacatgggttttccataggatatcatttcagtttttataaatttgaatttgtatttactaacacatgttaatctggcattaacactggatgtgtatttaagaagggtatactgcagacctagtaagtgcacagtcaggactgtgtggggagggaaagactgcaaacagttgtcagtcttcaaagtgagataagacacgtccattaaagtttgcaatacaaaacagtatctaattcggtaccaaaggagatatttcatgaaagatgaagttggtttgctgctttaggctctttctgagtagctaccatgtatcctttgtttagtactcaaccttagaaatttgacttcattcgttccctggctgtgataagattttgtgaaccaaatgcacaagatactatttaagaaatcagtcttctaaattgtgttggagaataaccctatactcaaaatgtttttattgattattttggccactggcaatcaaggcatctgaaaaaccgagaaactataatcataaagttactggctgaatttaaaattatttattcatactttcagaaagttaccaatcgagtcctactatatgcaaagaccatgttaaaaataatgagaaacagaatatcttggtggatatgtttctgccacccagaaacatttaccagggtggtaaagatc

SEQ ID NO: 34394 - DNA, 1502 bp, Homo sapiens
aaacatgagcagttgacttgactttgtgaccacatgaatatggctacgtgaatggacaggaagaatcccatgaagattactagattttatcctggattctgagaataaatgttaaaaacaaaaagctatttattcccaatctcactgtcttaatgaacttttatgtttctgtcaaatgggagtggagaatgacaagtaatcttaaaatatttatggagtcaacaaatgtttatgatgtgccacacacataagggttcagcacctaagaggcagcacttggacacctacagctcggaagtgatcaagacagaccttggctcccaccttcatgcatctaagatgacaatgcaatgtcagagtgaacattcagtaggacttgaagatttgtgacaagagttcagggaaaacacatcagaatttttggtgatgtgcatttagtaggaagttgtggttaaaccttgagaataaatttgtccctggaaagagataaaagaacaaggacttaaggactaaaatttgagtaaagctttcaattaggaaccaataaaaagatgaggaatgggagtggaagccatggttatggagtttggaaaagtatcaaggtcaggtgcacggatataatcctatgtggccaggaagtttcaaaataggaagaccgacagcctataccgaaggctgtgaagaatgaagtttggaggagagcctttatacttgattaggaggaaatgggtatcatctgcccgtgaacttgacactggggttggaaatgagtcctgagatatgggaaatagagaaaaatcacatatacagcttgttacgtaaatccagcagcgaaaggaaggtgacaacttcacacatggagtatctccaggaggtttaaagataatgtggataaatgttgagaccaatttttcttgtatgtaagttctctatagctatgtctggagtatggatgatttttatgtaatatattataaatcttgacttttggattgcttctttggtggtacaaaatagaaaaaaatgctattttgtattaatatgctttagtcactttcttgtaagccataaaacatttaaaaagcagactttatgcaaattgataactaaaaaattgttttacacagaaattaagattaatttacttaaacactgtgctctacatttatctttatcttgatgtttatcttgatgaccaaattatgtcatcgcgggaaatttctctttatccattaactaaatacatttggatactaagggtagtgtctctaagagtaagaattatttcttaaattaatatattcatgaaaattcaaacaaacatagatcatctattagaaatgtaatttatatacagcattaactcggaactgattctttgtttttcctcattcttctgggattcttgaaacacaaatctaaatgtatgtggctgcaaaaaaaaaaaaaaagctctggatagctgcctacttttgtaggcactctttttgtgtttttttttt

SEQ ID NO: 34395 - DNA, 1038 bp, Homo sapiens
gcaagttctgggtggcaggaggtaagcctggccctggacaccaggcgcctcaccttccccatcttgttttcaccgtcattgccctctctggctggaaagtctcatttgagcttaagccctcgggtgtagtaatgtaactagggctgattgtggagaggacctgtgccctggttctgctgaagattctagaagctcctttaaccttatactgtgactttaagaaaagttgtgatcattaaagtttttctttttcttctttgtaacattttctacacatttgaaaggaacataccctgatgtttttaaaacagtcataccttgtcagtttcacatctccgtaccaaaacccaaaacctaaagagcatggcttcttttgactagaattcctgcactggtccttcttgtttcctttctctcgtcctcaaatgtgatgcatcatttccggtcatcttctcggatgccaaggagctcaggacctgactccttgaagttgtctttctccttctctgccattgttcacgtttcccatcctcggagttgctgttgcatttcatgtcagcatgttacagtttcacaatttaaactccttctaaaagttctctggttctactgatgacattatttgttaatctatttcctatacaaataataagctgtgtttctattatttttgttgtctacaagctttttaaccagttacactgcagcgggcgttcagtgtttaacattggttagcctgattttcctaagtgaattgtttgcatctacactcaaagcttggggttaatacccttgctatttagtatcttctatagcagtaggttgaaaactatgccacgataaccctgcctagccatggagggatgtgagatagggaatagccagttgtgtttgggggctccactcccaatttaacaaaagaagttcaggggttttttttcctctctaggagttcatttcaccatcagaggatattattcagaggataaaaaaagtttccaaaccactgctttaattacttaataaatactcaaaaaa

SEQ ID NO: 34396 - DNA, 1117 bp, Homo sapiens
gaggcggtcggatcacctgaggtcaggagtttgagaccaggctcgccaacatggtgaacctgcgtctctactaaaaatacataacttagctggatgtggtggcacgtgcttgtaatcccagctactcaggaggctgacacaggagaatcgcttgaacctgggaggcggagcttgcagtgagccaagatcacaccactgtactccagcctgggcgacagagtgagactccatctcaaaaaaaataaataaaaaataaataaaatttaaaaaaataaaagaattggtgggaaggcctagaataggcttctgaccctgggccgtttactctgggcaacaatatcttccctacacattctgcagattagaggttcatttgcacgaataaactctccttccaaagggaattcctgtagagatggcttcgtttatcagccatttacaccttaggttgtattactttaatcaagtaatcagattacttttactgagggcagggaccttttgattgattgggaataaggtgcagcactttgtgaactcaaggcggtgagaaagaggtgtgcctcagtcggttgtcagagcgacactcacatcaggattggctttgggattcagccaacccttccaggtattggggtgaactgtgcagcttgctgcggatagcccgctactttggtgagaagaggaaggacaaatatcataacacctaaattacaaatggccctgggatgtggagcagttggaatgaagctgacaggaaaagtcagcggcaatggaaataggtgcaggcgaccatttcctgacgagcaggtgtcaggtagtgcggagtggatgcggactgttttcagctcctggctcaggcctgggctgcagagagactgaagacccgatgatgaaggacagagcagagggaagcaaaggaatgacaaatatcatttgagacaggtgtaaaaccatggtctgagacattttgtaaagacacaagtggaaatgaggaaggagctagatggaaaagaggattgggaggccttcccatagaagaagacaaagtcaaattataactgaaaaaagttcttaacacatgaaagaagaagtaggcccttgcctacttctgcct

SEQ ID NO: 34397 - DNA, 1049 bp, Homo sapiens
tgccttcgccctacccgcttacctaacccctatgatttgttgagaatctgctagctttctttatggagatgtcaattcctcatgcgtgtcatagacatggagtcattcattcaataaatatttactgagaacctttcgtgttttgtgcttgcttcatgtcagttacttgtgctaaaaaataaggtggtttctattcttttcttcctcccctggaagtcattccagagtttttgtcccttcccaataactcaatttcagattatttgctcaaggagtaaaaaattagcagaagttactgagtattcatctgggggacttcattctagccagagaatttggcatatcagcctaaattctctagacttcaaaattcccgttctttctttctctctctttttaatttgtaaaattcctatctactattattatctctaagtccctgcatgtttgctaatgtcacgcactcaacataagcatgagatgctcggaaatttgtttgctaaatcatctggcaaatggtcttgttgatgtctgctgagctgctcagagcctacagttgttaagtacttattacaggaacccagcagggcaaattaagaaagctacatgtatgcttgttattttaggactattatgctatgcttctgagggggctgcatattggactttctgacctgaaaggacttgctgttctttagtcagaggttgctgcgtggaatctgaatctttgacccggcaacaataaaagtgattatcttcaagggggagaatgtcctctagttgcttttcatagttcagcctgctggaaaatgtaaaacacttatttaggcagctctaggttcacttggtatgtcatattttataactaagctgggagctttttctacttacacattaagttatttacttcatttttaaatgtaagtgctttatctaaacaggactccaaagcttaagctcttagcacagggtgagcatgcttcccagcccatgcaaaaagatatgtggcggggcagagctgttattaaaattatagctgatgctccccc

SEQ ID NO: 34398 - DNA, 1048 bp, Homo sapiens
taaagtatgtgtattcattgtggttggtagtaatacagcatttttatctgcagatctcaaagcatgtgtgaataaatatgcattatttccctattttaagtagccagagactcactgaacgttaattagatataagcagacagagaaatttcatgtccgctgcttgcttgatgctactaaaaaaaaaaaaaaaaaaaaatcttcccagagactgaggtgaagaacacagtgtacctgatctctaaataactactgttcaggggcatggctccagccccaagcgaagccccatgaagcgcaaaatgtccctgcacacgtcttccaccaggctcctcacacctaggctcgcagagcattctagcaagtcttaggtcagaagagacctcagggaccatgcttctgagtcctttcctattacctctagctactcagcacgtgcactaggatggggacgtgacgtttcctccatcctccacagcacttccttctgaaccctggcgaacctcttgattaggagaatatttgttggaatacgtactgtgttgtaaactcttttctaggtgcttgcaatagagcagtgaccaaaacagacagtcactgctgtcacagcgctggcgttccaggaaggaaagatggtctgtgccgagcatccctctatttattcacagctttaacctccccatctgcacccttcctacgcaaagcagggtgtcctaccttcttcagcaaaggctttcccatcccacctatccccatcagatggggaaatatttctgagctttattttctggagtttgtattcttttaatttttaaattttgtgttatgaaaacaatagctatattaaatacagtttctcaaactatatatatatatatatatatatatatatatatatatatatatatcccccttctacctcctgttctccgataattacagcacacgaagaggcaggtttccccagcaacggagtgggtgcagccctgcctcataattctcctgaccaacaagtgtctctcctgggccagacctgagggtctctaac

SEQ ID NO: 34399 - DNA, 1049 bp, Homo sapiens
agaagtgcacaggagaggggtctccaggcttccagatcacccagaagccgctccagggacctgaagccagagatgttcccaccttccgtgctcagccaaacaggagccggagagccccaaacagcggtgagggaatgacagaaattcccggatgcctcccactaatttctcacaggagaaagtaagacttccaggcatctatcctggatagacgtccacacatgatcccacactggcactgttctgcatggtggcggctcctggcctgccaggcaaaccaccctgtgtgcattaggggttaatttgacttgggaacctgaccgacgtatgctacaatttcagtgggaaatgtgcattccaaattcctacaagactgcctcaaaacaaatttctgaaatgcaacctgttcgtaagttgtggcttgcctgcatttaatacttttttggcagcaccatacacttacaaaactgtatgctgcttatggaagaggacattctggaaaccacttaaaattcacagaagtttggattctttctctagcatatatttcatttattttcttgctgtatatttgacacgtggtcactgttacagcttatcgtcaagcagatatgccagcactatcttcccaactttgggtaaattcttttaccaaaggacaatgtcctaggtgacaagatatttccagttttttcccattgaacaaaaaaaggaatcactttagaagggactgttctctttcacttcagaggaaactgcagatatgcaacatctggtagaaatccctcggattctcttggatgtaggcataggcttttgctccaactatctgggatggttttctcttggttaagtcactctttacgcctttcggcttttccagctttccaggcgtctgatttttgttattactgtgtttcaacttggggagttgtgacacgagtggttgattcctttatcggccttagtagccataggagcagagctggtttaggggtttagggtgtctgacaaatgcagaaacctccaagttcaccgtgaaagcctgg

SEQ ID NO: 34400 - DNA, 1025 bp, Homo sapiens
ttgtaaacatttttaaacacgtaatggatgagatcattaactgttttaggaagaaagctgatcagcaatggaagaaaagaggttcttattgtaaggtaactaacctaggacccgctgtctcgttcactcccctagcattgtattgccaaagaagttaaaatcaacacttacagaggattatggtatattatgcttttcagtagagattccaagactccagaatggcttgtgtttcatgcaagcatctttagcaactacctgatggccagcagtccagctagatctgagtcagagatcattgtggcaccgtgtggtgactcctggagatggcagtgtgtgtgtccctgggatgaccaacagcagccagagagattttttcctgggaggtcacacagcctgccagaattgggcttatgtgtatggggagaggatgggttcagagaattagagtgatcaagactagttctttcacagtcagtcctaaaaatttgcatccttcattgttaacatttttttttcctgaatgagaagactgaagtactgaaaagttatattctaaaaatgttggatatattcaacccttcactacaccacgtcttaactctcacatccccttaaatccttcatgcattctttctttgctgttctttgtacatcgttctgttattcaacttgctccattcaaagccctgcattcctgtttctgcaatcccattaagggcgtattgcacactctgggactctgccaagggccctgcccactcttcactgtctcttggatgtacgtataggttccaaccgttgcaaaatgatgatgttcttcacttctaggctttctcgaggttattctgataattctaaattatttcgaccctaaagttataagaataaaatgtgcaggataattgtctttttcccctttggacatagctataaagaagaatagatgaaatttgaatcgattatgggctccatctcagcctgtcttcattgtggggctagttccacataaggtgtgagtggca

SEQ ID NO: 34401 - DNA, 1071 bp, Homo sapiens
tggagacttcttttggccgctcgactttagtgaggcccctgctttaggctctcagtttcccccacggggtcttgctcccagaggttttccttttttgttttcaaggtgggccacataaattttttgattgcactctttgaaaaatgtgtattttattcaatatttctgtgtgttctacattttgggaggcagagacactgcttccaaccagtccatcatagtcactggaagttataatcactgagatttatatattcttgaataaggaggaaagaggaacattgacagtttatctcttactcacatagaatggaattcttttcaaccaaaattttagaatagataatttctatttttatggaaaatctattcttactaagtatgaacctgactcatggcataaaaatagaccttttcttctcctcttcctgttgcacatcagaagcctcatttcagtaaccagatcagcctctgagttggcgcggtacggaaaattgagtcccatccagacagacacctctgtgctgattacatctgtgccacaaacctggcgggtcaattggacttgccacttctctgggcatcatctacaaaaagggatctcttcaaaccttgttaagccaactttggaaatcttatgtaaaacagataagagtggagaggatctcttgaatgagagtgaaggttttgcctctttgccaagtagcctctaagttaccagcagcaaatcccctaaggagcctcgagaagcagagtttgtaaaccactagactagatacttctttcatgtctaaaatgacgtggttctgggagaacacagtagtaggcagcactactgattgtcagctgctcatctgtcgggtaatttctcctacaaactcctcctgttcccctttaataaagtaaaaaactcattgagtaagaggttgactccagtctccttcacatctttaagttgtaaagctatcatttttttctttaatagggattatccagccacactgggacatatggtcatcctatctttaatgattaagtgtgacagccttggtagaatttcctgcaatttag

SEQ ID NO: 34402 - DNA, 1441 bp, Homo sapiens
gggggagctacttcccagggctttgctgggcgtccccacagcacagtctcctgatacaggagatccatcgtggcttgaactgttcacgcagtaccccatcacaactattctggttggcagctggcctcacacctcttgcttctgggatcccctaaactgcagggcatgtttcttgctgggtattgccaagggtatgggcaagatagcttgagtccagctactttgcattacaacctggtgattcatgaagacagctgtgtctttgccacaaggaacagtggccatgcaggcagctccctgtttctgcctttctcttaaacctgccattctacaattttcttttcccttctcagataagcccagcatagatcagcaaattggcaggggcccacctaactgttcaaccagagattggaatgccgttctctacttcttgccagcatgcctgtctctatcagagcataccccttctttggttttcacttgagagggagaaagttctcaccacaaactgcatctccacaacgctgacggacccctcaacccccacatctcttccctctaccctccccagccctttctgtagatgcagaaggttgtgggtggtgactgttgggagcaggcctagctcttgacaagctttagagactgtttggtctcaattgttgacacttctcagaatgtggggctctcaatccttctttgtcctcagctttggtcccttgtggtaaattccaggtaatacgaaaaaaccccactctttttgccaactgaccaccaccccctctcaccaggactattaccgaagactctgaaatggtctctgtacttgcagtcttgccccctcctttctccctagcgtgtggtccactctacacttagcagccagagaagtcttttggaaacacatcagattacacaacagtccagacggaaactcttcagtgactgcccactgctgttaaaataaaatgcagaccaggcacggtggctgacatctgtaatcccagtgttttgggaggccaagggaggaggattgctgaggccaggagttcaagaccagcctgagtaacatagcgagaccccgtctctacaaaaaagtttaaaaattaactgggtgccgtggtgcatgactgtagttccagctactgaggaggctgaagtgggaggatcacttgggttcaggagttcaagactccagtgagccatgaccacaccactgcactccagcttgggtgacagagcgagactccgtctctaataaataaactaaaataaagtaaattcccaaatcgcccagtgtgatctggcccctgcctggttctctgtctccatcacactccactttcactcattccttaagcttcagcctcacaggctttttgttggtggctgtaatacaccgagcttttgctatttcagagaatgtgcatctgcagtt

SEQ ID NO: 34403 - DNA, 1060 bp, Homo sapiens
ttaaattacctgctgaggtcaggtgattgaaaagtgactgatggcggaggatgccaaggacggggggagggagggaagggttaggaaaatccaggccccagtgtgctattaggatgtgccttccattacagcacgagcagggtgattatttcccattttgatatgaacagaagaaaagacctgctgtattcaagtagatctttttttttttttttccttttgagatggagtcccactctgtcgcccaggctggagtgcagtggcgcaatcttggcttaatgcggcctctgcctcctgggttcaagcgattctcgtgcctcagcctctagagtagctgggattacaggtgttcacagccacgcctggctaatttctgtatttttagtagagacgaggtttcaccatgttggcaaggctggtcttgaattcctgacctcaagtgcacaaggcctctgcctcccaaagtgcttggattacaggcgtgagccaccacgcccagctcaagtagataattatttatgagaatcgttttcttcatgaaagaagcaagggaagaagaaggaaaggaaacagaaagaaaggaaggaagggaaggagggagggagggagggaacctctgctgaacatgacaattggtctctcaggccatacagttgaaaaggggacagaaattaccttgacttgttcttttctgtatgttgaattatgggatctgatgtcccacattttcacatgaagatgttgggtacatgttaccaggtcacaggtctgacagtcgagttaaacacctggaggattttgccactgactggagtggacacctggtgacggcttgtgcctacctttggccttagggatgggaggtagggatccactccagtgaagctgagatcagtgttctgcagccttgcacttgctatgtctccacaccaaatgagacttgatattttaccttttcagctgtagaattctctagctcgtttggcatatttgctgtccatagcttccagagcttccatactgcaagcatggtggttggaaggctgaggcttctccacaa

SEQ ID NO: 34404 - DNA, 1050 bp, Homo sapiens
tctttttggcagcacagacgatgcctacacaggttaaaaatagcgcactgaactgttctcctcctaggcagccttgatccagcgcagactgttgttgacaacccggcggtagcatttgtagaagccctgaaacggaggttcatagggggccaaagagtgttattcctcactccttccaagccaaggactgcagaatccaaaggggcggaggaaagagaaagggcgccaggcggccagggaggccttgttggagagcagaagtgaatggagaagcgctcgcgcagtgtgtgatggtgccgcaggtcacttgatgtgtatgaatccgaactttgtagaaacgtaaatgggatggactgctagttacagctaatgctgccaccctactgcgtgctggtcagtgcgctaggcaggtgtgtgaggcagctcccctggtgaggtgggtcccggtagcgtagtcttttcacagattgagacggatgaggtttggagaggctggagaccccatggctcctgagaactaagctggaacttgagcccaggcttgcctggttctggcctggcttctaatctctgtgcagttgccacagtggaaaacaggcaactcagtaaaatatcaccctttgatttattgcagtcaattttttaagtctattatcattattattaattaattaatttagtgacaagctcggtctgttgccaaagcctgactgcagcggggcagtcatagctcactgcagcctacagctcctgggctcaaaaaatcctcctgcctcagcctcctgagtagctgggatcacaagtgcacaccaccaccatgccagggtaattttaaagacattttttttaatagagacagggtctcgcttgttcctcagactggtctcaaactcctggcctcaagcaatcctcttacttgggcctccctaagtgctgaaataacaggcctgagccaccacgcccagcccattttagtcaattttgaattcgaatgttcatggtgtggatagtgaggtgtgagcaaactgtaggcatatttaggaaataaaa

SEQ ID NO: 34405 - DNA, 1025 bp, Homo sapiens
aggggtccttggagtatgaatgtgggtaactgcgagtccctgaaaactttttttttaaatatatttttaaaattattatttttttattattattatactttaagttttagggtacatgtgcacaatgtgcaggttagctacatatgtatacatgtgccatgctggtgtgctgcacccactaactcgtcatctagcattaggtatatctcccaatgctctccctcctccctccccccaccccacaacagtccccagagtgtgatgttccccttcctgtgtccatgtgttctcattgttcaattctcacctatgagtgagaatatgcggtgtttggttttttgttcttgcaatagtttactgagaataatgatttccaatttcatccatgtccctacaaagcacatgaactcatcattttttatgactgcatagtattccatggtgtatatgtgccatattttcttaatccagtctatcgttgttggacatttgggttggttccaagtctttgctattgtgaacagtgcctcaataaacatacgtgtgcatgtgtctttatagcagcatgatttatagtcctttgggtatatacccagtaatgggatggctgggtcaaatggtatttctagttctagatccctgaggaatcgccacactgacttccacaatggttgaactagtttacagtcccaccaacaatgtaaaagtgttcctatttctccacatcctctccagcacctgttgtttcctgactttttaatgattgccattctaactggtgtgagatgacatctcactgtggttttgatttgcatttctctgatggccagtgatggtggcattttttcatgtgttttttggctgcataaatgtcttcttttgagaagtgtctgttcatgtccttcgcccactttttgatggggttgtttgtttttttcttgtgaatttgtttgagttcattgtagattctggatattagccctttgtcagatgagtaggttgcgaaacttttctcccattttgtg

SEQ ID NO: 34406 - DNA, 1031 bp, Homo sapiens
ccaagagcttctgcgcagttgaattcatttcctactttttagtttaagatgtaatcctgctatattaaaagtttctggccaggtgtagtggctcatgcctgtaatcccagcactttgggaggctgaggcaggccgatcacctgaggtcaggagctcgagaccagcttggtcaacatggtgaaattccatctctattaaaaaacaaaaaattagctgggcgtggtggcaggtgcctgtagtttcagctactcgggaggctgaggcaggggaattgctcgaacccgggaggcggttgcagggagccaagatcacgccactgcactccagcccacgtgacagagtgaaactctgtctcaaaaaaagaaagaaggaaagaaagaaaagtttcataggcacagtggtaagggcatttgatgagaagataagagatctggtttcttattctggttctatcattaatttgttgttttaccttaggcagttcacctggtgtcactgggtttgagtttcttcaaattctgccttcttattaaataattttaatgtgcattgttttatctttgattaagactacaaagctaattttgcaaagttttttcttgaggatttctctcaagggaggaaagtcatgttgggtcaggataggtctaacaaagtgaagatgcaaagcataaaaatccaggaaaccacctgaagtggtaagaaaagttagatttaagatttattttttgcatccatcaaacataacccaagtttccgttgggtcttgtgtgtctgttgtaagtatcatgtctatgacaaatagaacttaaactaatacagcataccctatcgcctacagagctattcttttattttgttttgactggtagtggtattcaggaagaaattttttgatgaataccttaccatacctagcaagcaggtcctatatttaatagattaatacaaaaataactgacattacctgaatattttaatcaacctttttaaaagataagtcggttttaacaaaaaagagacaataacat

SEQ ID NO: 34407 - DNA, 1062 bp, Homo sapiens
attatgtatgtttacaaacaaagagtataaacaaagaaatgcatttgttatacttagtgcccccaaaatcatttgtactaaagtagcccttgaacaagctggaaaataagtggaataaatgtggtactttggttcctttccattgactttcaaaaacaccaccgatattgaaatatttgtgtttcctttgctgtagtgccagcaacataatagatgagaagagagtagctattcactgttctccagaaatacaacttagcctcttcctgcaacttgagcctccacactgcagccttcccttgtctctgcgatttcctgcttgctccctcctctaattactcttctttttttcagactcctttcatgagtctcctctttttttgtccccctttattccctcttgcccacattccacatttcttttcaacctccctccgtatttggctacagtgtttaaaacgagtattaagtctggaagctgaataagccccatctcctaaaaaacagttttacagattttctactgacagagttagcagtctggcctcagtgctggggaactgaaaagacccatcagcagcctgaaaaagaagagcttcttcatcagtgcagtaaactgctctgcggcttcagcctcatttttacgtagatgacggtgtcccccagcattgttgtaagtacaaacacatcatcaggcatcctggaaagaaaaatccttctgcttgtccagattaaactccgaattcatccaaacattaaatgacaagaatgttgagttgagaatgtagaattgtaccagcagggaatcttaagaggtaaatctgggaaaaggaagttttattgtgcgtcttttttttttttttttttttgagacggcgtctcgctctgtcactcacactggagtgcagaggcacgatctccactcactgcaacctctgcctcccagattcaagcgattctcctgtctcagcctcctgtgtagctgggattataggcacccacaaccaagcccggataatttttgtatttttagtagagacaggatttcgccaagctggccag

SEQ ID NO: 34408 - DNA, 1025 bp, Homo sapiens
gattgcagtaccagtttcgagtttgctaacaaggtgccctgatctacaagatcgttagccatggaatgacagtaaaatgtggttgcagaaggttttgagacattcctgaattgtctgtgtgctgtgctgatgtggcactactgacactctcctaccgcagtgccttggtttctgcggttccttcagcccgaggcacactgccgtccccatctctccacccttcagcaccttgtcagtttatagatcatctcaaaagtgactttttttccacaaggctcttattgatcctcttcaaaatggatattgcttctgccttctcagactcatttatgatacttacatgtcccacttgatatgatgattactgttaacttttgcccaatctggagcaaaatggcatgatgtccacggcagggttatcctggatgtccctgtgtagcccaacacaatcgtgcacatgggagatgcttgttcatttaatagaatagctgttaattctgcgcaccaatccctcttctcatgtttcttgtccttatcctaattgcatataattatttaatgatgttctcagccatttgtaagctatttttagcatggaaaacaaattacctttacagacttttatattagagtaatattaaaaataatagctgccttcgtaagctgttcttcagtttacagaacattttcatacatattatttgatccgcctgtgtagattatgcccatccgtgcccatgactgagaagagggcaagagtctccctttacagattaggaagctgaggcccagataaattaactaatttatccagagttgcatctctggtaaatttcagaagttaaaatcaaacccagatgtcctcaggattctagtacgacttgttccacttatatataatttttcatcaaagttactgagcgctcattgtgaggcttgaatagacacagttaaataaaaccatgactggccctggctctaaggaggccagcgtcctgcaaacacaggcacacggctgttagaaa

SEQ ID NO: 34409 - DNA, 1248 bp, Homo sapiens
actgataataccaaattgaatggctattttatctataatgttcttttatctcaaatggggaaaagggcacattttcatataaggctgtgggatgtgaacagtgaagggtcgttcttcctctaagcggctctccattgctgcagccacctgctctaccgtacggagctgaggtaattaataagaggtattaacacgtctggtatcaccggggagagggaaaaccgaaatctgttgaatcgctttaactgtgaaacagcaaatgttgatttactcaccatctttcactttaccacccagcttgccatcatttctgcaagatgtaataaaaagtaagctcacaccccagtgtaactttaatgggtttaattacatgtaacttgaaatatgtgtttggctacatggtacgtccagccaccaatccataaccagcatttttggaaaagcacagccagcactcaggagagagatgggaattagaaatgcagactggggaggagagatgaggccttggagccctgagttattgcccatgtggggagcgctgagagcggaagggagacaggcaaagccgccaaacctaggggaatgcctccacgtggggcgggggtggaaacagagaaggaggcaggtgtgaacagtagagaaatagaggcaggctaaagagagggcatcgccacacaaatcaagagggaaattaatttcttgaggatgtggggcttcaggttgcaacggtgagtgaggaagcactgagaaactaggagaagctgtctgagctattttttaatgaagtttaatggtgaatgagaagagctattgggggtgcaaaattgaagagataagaactgaataacgatagaaatttattttgctaacaattgatgagatttgtgagtatctgtgtaggctgaagttaaagactcaatggagaaagaaagtaaagaaaatgtcggtttgtctttgagggataaaagatgctatcggagcgtttcctcttaatgagatccatttccatcaccgtctgtgtagcacaccattaaaaataactaacagacaacgtctttttaaatgacacattattttacttaaatctttacatctgaatcctgttcctgcttattttcctgcacttgttgacaagtcattaggaaaaacagtgtttagttcaatatggcctgtcatctaagagacctgtgtagcttaaataaaaaactgatggattaatagtagttaaaaaacaaaaggcagaat

SEQ ID NO: 34410 - DNA, 1729 bp, Homo sapiens
gaagaagagtttgtggggagcacgtggtgattcaaaataaaattgagtaacagaatgaaataaacatcaccgttgggctatttcaaaacctacagagtagttattaagaaggtcaccaatgcatctatgatatctacaagggctgtgcttggtctctaactgctcgtggaacaacccactggtttcttttgctgcctaatgtatgcttatatttatttccctagggaagaaatctgagaattttttttttattatggggactttacaagcaaaagaaaagagcatatttacctattccttcctgccccccacctatgaaagcaaaactgatcttacgcaattgaaatacatgcgcatacagaagcaaaagttacgaattagtatgaccatgtatacatcagattgaccccacttatcttgtgaaaaaataagattacatgctgaagtgatgtggtaataagcaattaaccaatgaatcagggtggaacttatcctcttaataactgaaatgtggttttactgcatttgagagcagtataatttcaaagagttctatgtaagctctgaggcacaaagttctaagtttttgttttaatcatttctgtattttattttccatagacactgattattttatgccatcctttccacagttgcttgaaaatgtagtctagagaatcaaattgatttttaattatgagttcttgattttagccttcagataaactaaattgaaccagaatattcttaaagcataaacaatggattgtctaaattcccagctctcatttcaagtattcgctaatgtggcattgatcaatctacaattcccagactgagcagaagtgataggaatattggataaaaaatgccgtacaggccagaaagataaattgtttgggttgtctttttgcaagtttgaggtcacgattcattcatcttgttactttgctatatccctttagtggcttcaattgcaggattaaatattgaatggtggcagatcattcaatatataggctctcatagtttggcattagagggcttttcatgcttagaatggagctgtgtgcacacagaatgccaaagataatcgtgctgatgatctagtctgtgagattaatccctcaacaatattatcagacaattcttaacacatggatttgtccctgatatgacacttctgaaacaaatggatatactaagcattttaggagtaacattgagcctcctatacagcctggctttttcaggaaattaacccattaggagatttggccagaaaagtccaacactttatcacaaccagtgtttatgaccacaaaattatataagagtcaattttaagaatcaaaatgcttttagggagtactgattaatagaggattaaaaaataaaaattagtttgggtaaaatgtggccctcagggctaaatatgccaaaggaaagtactaaattaatatactgtcttataagtctaattagcccaagaatattcaatgctgagatattatgtttaaaatgttttaattgttgctctccttatgcactttgataggggagatgctgagccctttaaaagagaaatggaaatgttaaaggttgaaaattcattatttagtcaagagacccggagtcttgaaggataaatgcatatgctttttaaaaataaaatgttttatttataaaacataaaaattaaagtttgacaaggacaaagaggtcattc

SEQ ID NO: 34411 - DNA, 1031 bp, Homo sapiens
tgttaaaatggcaataccaatgcattgaaaatacctttcaaaattgatttgcacataattatatatgcacttaccttgagattttatgtttattccaaactcctgcccaatgttataaacctgaactacagagttcaaatgcacctgtcatttctttctttagtcctgacttactcttactacaagccatccagaagtaaaatcacaaactcttcatgggaaaaaggcacataggaccataatctaacaccccagtgtgcagtaagagatatgatattgaccagggagttttcctttttaggttctgttattagtaaatcattgcaagaatagacataaatatcaacttagttgtatttaaactttttcttccaaattccataaaaaagacaccaatttatcaaccattcctcccagaggccctttcatccatattccttagtcgacagttcttctgtgacaataaaatgtgaataaaatgcaggcagaaatatgtatcatgttctgggcagttagggggtaaggctttgaaagctcattaactggaacggttggttgtgtttccctagagaaaaccttcggaccaactgcaaacatttatcttctgggaacaaaatgggccccatccctgaagaggagaaaaggccagcattcttgacatgagagcatggtaaaggtgggattgcaaggaattagagacaaggctgctagctatggttggttaacatcacctaacactttggctcttgttaaaaaaagaaaaaaatcaaatttaactagcctgattgcagagtttaaaataaagagtcatcctttatagtatacttttcttattaacattcagtggattccgtgtagatgaaatagtattcatccattcgttcaagaagcattcttcctcaaggaggcaggtctctgagccagtgttatttgcgatgcacactcaaaaaatgaatcacatgggatgccccttggggcctttggcagcctccttcccgttaaattatcagtgtgagcattaattcaagatg

SEQ ID NO: 34412 - DNA, 1071 bp, Homo sapiens
cagaagattttccccaaatgcttttgacatagagagtaaataagtgccaacctagatttctattcccagctaaactaccacttcaggtataaaattcaagctcctaatggaaaggagtaaaatatcttttatttaataaacagtgcaaggggtgcagatccaagacagttcctatcttagaagacctttcaacctagtgagaacacagtcttgtaaacactaattataacaaatatcttaaatcacatagataatactgtcaatgagaatgtaatttactctgttaccacaaaagtgtactattgttggaatatgttagtatagtgagacaatcatagtagttataacaccatagttgaagatcttgtttattaccttttacacacagagatcatacaatatatttcttccaaatttagtttctagaaaaaattattcttgcaaataaattaatttcttcctttagacagtggcaactatataaaagtaacattttcatttttgctgtagttgctaggaaactcctagtcaaattttatgcctaattgtggtgagtggacttttttgaaatcataccagaccaaaccaggatttattttgctaacagtcatgttctctgctctctgtggatctgtcaaaatttatccctcattgtgtatgttgttaaattttgcaaagtactttaaatctatttggaaggggatactgtgattcatttcttttaaaagaagaactctaagtgaaatctatcattttaataatgagtatagaaaaaatactatgcttcacagaaaaattagtttttaataatttaatttcatgatgtgtgtgcacgaggaaaccgagctttatttttaaatgcatgcaattacatttccaaaaattaccatagcagtttgggtttgaagcaatggattgaagtaaatctttaaaataggaattctgattctaaacttgcatagaaatgtagttcactttaaaatatgtataatattgaactaatctaaggagatgtgtgaaataaatccttataaagtatctcaaagatctattgtgggactatttaaaagc

SEQ ID NO: 34413 - DNA, 1026 bp, Homo sapiens
catttattttatttattattattttttgagatggagtctcgctctgttgcccaggctggagtgcagtggtgcaatctccgctcaccacaacctctgcctcccaggttcaagtgatcctcctgcctcagcctccctagtagctgggactacaggcacgtgccaccacgcccagctaatttttgtatttttagtagagatggggtttcactatgttggccaggctggtcttgaactcctgacctgatgatctgcctgcctcgaactcctgaccttgtgatctgcccacctctgactcccaaagtgctgggattataggcgtgagccactgtacctggcccaaaccagcatttatttggtgtctcttttgtgcaagacactatgccaaatgttaagaaatcagcaaagaaatcgtccctatgctcgtatgttcgtggtctggaaggagctacagacaagtagacagggagcagaatatagtacgatgaaggcaggaaaagagtatttacggagctgaatgggaatgcagaagaggggcccataaactattcttggtgaatcaggcaaggctaaatggaagaactgacttctaagccaagttatgagcaagcagaaattggtcagctaaaatgcagaggtatggagcatgtacttcctctatccacaatgatgcataaatatatgtgcatactcataaatcgtgttcacaaagtcagaaaatcctgaaaaacacattctatatgactatatcatgaaaacacctgaaattaataattattatctaaatttatttgtcaataaagatatgttaaactatttgcaaaaatatcttagtacatatggattcttttgaaatggttgatattataaattgtaaagggttaatataaaagtttgtgtgatttctatgttctgtccactgcataaaggatttgatctatgcacggctattgccactatagacaactacccatctgacaacaccactgcactagtcaccaatgaataattcttcctttctaaacaatc

SEQ ID NO: 34414 - DNA, 1050 bp, Homo sapiens
tttaattcagattttttaaatgaggtgtgatcatctatggtatagctaatgtccactctctgattaatatctagcaaggattagcatcattgatttgaaaattaatagattatgcttttattgacatttctattccccattgaatggcttgtttatttaattgatggctaatgtttttactattaaaggctattaacacatcagaatggtttttattgaacctggcaaaatgatagattatgtttgtgtttactcctttgtgcctaaggctaattattggtggtctttttatggttttggtcaactaaaaccttccggttaggaagttgagtaaattagcaaacttatctggtggtgtgaccttggaaaagtcgctggacttttctggattgctacctgtaaaaggagggaagtgaaccagatcaatgattttgaacagcgtagcttcttgtagaagttctgtagagtttcttcaattctctgattcagaattcttaaaaaaaaatcaaactaaagtggtaataaaacataatgtgaacaaataaaatagatactaaatgtttacatttgctactgggttagtttatttttccatacatgtcctgctttctttgtgtatgtatttgtactttttgtggtattttggtgaatgcagcttgcctaaggaataagaagtgacagcatcctctgcagagaaatcctaggaaaaaaggagtgtgcttactcaccagcttccagggaaatggttgtgctatggactgcatatgcctgccacttttggtatttggtcgtaatagagattctaaaaatgaagggggttgtccttattatgaatagattgttacttttccaatgttccgttatagtaccattcaccaaacttttttgaaactacttttttgaaattgcgtttatttccaagtcacagataaaaatagttcttgttattataggcattcctcattttgatgaaataccaatttaactagtttgattgcttgccttccttcacaggcttgactaaccagcatttcaaaaaaattagatcta

SEQ ID NO: 34415 - DNA, 1034 bp, Homo sapiens
aaatcatccttataagcaaaggtaattaagatggtgtcatttcattttagtgagttatagttctctggactctccctctgtcactgtttccaattagaatttctctaaaagttacaagagtagttaattttaattactaaaaatacctagggggaaatttgttgagtggactcttgaatttcaagggatttttgtcttgcaagtaaattatagagcagaggctataaattagttctccattctttttagaccttgaactttttattattctgcctaaatgtaactgtaacttccattttctcatcttaaaatttgcaaatttatgttctctatatttctttcatgattagcaagaggtctctgtcttacatattttttgaaccttactttctcaatttactaatttgtaatttctactctaatctttattaatccccttctttttcttagacataattatggctattaatatgctgctaaatgcaactttgtccccattccatgtgtaggtgttctttttaaaattgttctgtgtacattttgtgattgaatatttgattttctagacattttgatttttactatttaaaactttctaggtttaattcattgataacagaaaatgtggcttggatatgtaagctttttaaagatttgtaagggttttctttgcctcttacatagtgatcttcaaactttttgcttacatactcactaaaagaatttgatgaactcaataccctcctacacattttaaagttgaagtcaaatacttttcatcacaagtaaaaataattgcaaaggattaatttccagtgtatgacaaatattgatattttaaataaattgttatatcacaatttttttttaagagagtctcgttctgttgctaggctggagtgcaatggcatgatcatagctcattacagctttgacctcctgggatcaagctatcctctcacctcagcctcccaagtagctaggactaaaggtgcatgccatcatgcccggttaattgtatcattttgttgttg

SEQ ID NO: 34416 - DNA, 1037 bp, Homo sapiens
gcctaataatgttagactgaaatgccataatactagaggaaatttagaaagcattttgtagctcttaaaagattgatactttggtagcttgcattattagaaaccagaacatctatctgcatacatatacatacttctttattcagttcataaatttaacttgtgaaaatgacaagtagtagcaagctcacactcgggatttaatcttcactgactaattcatcagacattttacctttctgtagtcacagatggttttaatgtctgtctgtattgaacaatcactcagatgtgtccatcttcgtctttattggataaataataattcagtatccctcaagtgactatgataattggattccagaagagaattcaaggcttctaggtactatcatattcaaaatttgatctctgtgttccagtctctctcgtacatttgaatattttccagcttaagtggaatatatgggacagtagtattttgtgtaaattacttagaatagattttgtagagaagccctaagtgtaacctctttgctttttaaaaatggcatttgccattccaaagtaagtccctggtggtgttacttgactcattccaaaatgacctacacttgattaagtgaagtctcatctaatagctgaaactccccagagatttttagtggctgtttaaaatgaatgtctgtatttaaacccattttagtctatagccaacctttatttcctctatatccagaggcagaaaacagatgtatttcttttttcatctcttgttggtaaaaacagatagatgttgtggcagtggttatgtgtatgacttttaattgtttgggtttggagagaagaaaaacctgatagcatattaaagtatttaagacaggcttgatgatttctgtgatgctggagaaatgtatatttttattgtcaatgttttgaagagttagaaaatgtttatttttaaagaatggtactaagagcataaaatttcagcagtccattctatgttttcaagatttatgtatattatatataga

SEQ ID NO: 34417 - DNA, 1030 bp, Homo sapiens
aggtactatttttaccacccattttacaagaaatgaggtgaaaaagagatgaagtaactggcctgaggtcatgcagctagtcagttgtggagctaggatttgaacccaggcagtgtggcttaacacttaatgctccgaatcattaccatacttctcatgtgtatagagtgcactattaccaatcaattttataggctctgtttccttgttttccctttcacagctgacagaacagtggtaatactttaccttatttgttccatgtggttatttttaatacatggggaaaacgagaaagttttagaagttggttgatatgaattaccctttgaatacgattaattttgaatgattgtgtgcctacctatgagaattgtttgttaaaattttgtatgtcaggaaagattcaggaatattaatattaaataaattaatgataaagaaaagctgtcgtgttatttctgaactggagtacccatttcaaaatgtattaaaagttatgcaaattggtccttcttagagttactgataattgtgtgatttactgttaatgatcatgaaagctacttgagttgatactatgtctgaattaatttatttatggaattataagacaaaattaacttgttaaaaaattcagtacagtagataatgcaaatattatcatttaatatacactactaaattaatagttctctaatggccacagatactccgtgttttaagccatgttagacattttatgatgtttcattttaacttagaaagatacatagtacctttattataaatctgtttttcatagtttattaataattcaaaaactttcaagaagacattttatcttatacctcctataaataaaggtataccatgttccttgcaggcactgaaaaattgtggtatggtatataaatcagtattttctggtaatggatgtgcaaatggctttcacagccctgtcctcgtttgtatttttaggagtgacataagtgtatatataacattttccccttcattacaaatgcat

SEQ ID NO: 34418 - DNA, 1252 bp, Homo sapiens
gatcacaaaagccacagaaaaatgcagagctagaacccccatatgctgcacttttattgcaggagagcctgaagagtttccatctggactgtgtcttaccttctcagacaagggcatgagggtgatccagttgtggtccagattgtcttattgtaaagggctaagcttaatatagataaccctcaatatacactgccttggccttaaggaaactgaaatttctaaaatggttttaagatgagtctagtcccttgggggtcttccagatgatgttagttatctaagctagaaagacatccagttcctggcaaaagaaacggaacaaagcattgtattacatgacgagaccccctgttttctcttttctcttcctctatgtgagtcatctagtaccacatctcactcggtatcataactttgttctgaatgtcagcagtgttaaaggagctccacagcggacatttcctttaacccgctaattcttgcacgtggtttctagaatttggtgagtcaccagagtgtgggatacaatgtggaagagaaacagccatagctagccctttttatgactgctgcaaactagtgttgtaatatagttttatgttcctcttatctgataccaaagttacctgtatggaaagcccgggatgaagtgtgaaactggtgattattatggttactattattttgtgtacttgtctctttatcgttgaattactatagataacagattaactgtatttaactatcgcatatcaaggttgtgtagattacaaattaaaatttttgaaaaagaataatagagtaatttcattttcataatgcaaaataatgtgcatttggttagggcggtagaattaataaacccagttctggtttcattatttggaaccttggtgtattaagtataccactgaaaataattttgatgggccagtgcagtttaggtcttcagtctaacactctcccaactgagctacttaggctactctggccagtgcagtttaataagtgcccttttaacgctaagcatgctggctagatgttcatattttacaaaatgtaaaatatgatttttctctaccctcaaggagttgatgcaggtaacataatcacatgatagatgcttgcgatatctttaaaatgagacctaaataaaatttaagggattcattcaaacatttattctcaggtccagtgggtgaacatagtacgtatctcataaatatttattaaatgcagtgaagcagtt

SEQ ID NO: 34419 - DNA, 1026 bp, Homo sapiens
ttttaaatactgtgttttgcaaacaaaaatgtataatgaggtttttctctgaatacagtgtggtcagtactttttaattaataaagtaaacgttaaggcaaaaaactacctccacaaaaccattaacagacaaatattttatgtaaaccttaggagatgtttattaatcgtggttcggcttggggcacataggatgtttgtcaggttagtgaataaatttccctaatgtatgtcactgaatattgttaaacaatactctacctgcttaattccattactttaaaaattgcagtgaaatttatgtgtgtgtgtgtgtgtcttttgtagaaaagttattacaatttacgatcaaactcactagccataaatgtttttgattaatttatataaacatgatactgtggtagttttggtatgtagaatatttatatttatatttttgtcagtatatttcattaatgttcaaatggtagtggcggatagtgttttcaaatttgttgaaggattgcgttgaaattcttgaaacatggtagtgaaaattgcattttttccagtcttttcttttaaaggtgaattatattcagttgattataagaagtcccaaggaagtactttttactagctttaaactgttcaccatagatgttaatgtgggacacctacagaatccacttttgacatggggcaggttgcaatagtattgcattacactgtcagcaggtgctgccatggacattggtgtaaagtaagaaggaagggattgggatgcagaacagtaattggaaagagagaaataaatccttctctttcagttgcttcactgattcccaatgttccaggtaaagtgcacctgctgagtgcctgagaagaacaggtacatgctagccctccattaatttcagaggaatggcagtggactgcatctacccagcaggtgtgctgagctgaaggaagaagatggatggggacagagtatagaaaagaaagcaggtagcccagatagggtggttctcaaaataagagaca

SEQ ID NO: 34420 - DNA, 1023 bp, Homo sapiens
ctaaatgagaaaagttcatcctttgctataaataggagaattgttctcttatttagactgaccttggaagctaagcattttacatgatattgtcaggtgagcattataaagacagcctgtaatgagatctgtaatgaggaactaaggtatagtagccctttgaaaagttaatttattcagcattttcttattgcatgatagaattaaagtttgtgtatatgtccggacccctttttaaaggggccagtctcactgttcttggtttactcatattctgccagtagtttgaagtgggttagtattactattccaccttaatggaagtcaccattaaagtagtgaattcatcttgcccttttaaacagagctaatttatttagggagtaggaatgttattttccctaccttctcctcacttccttttacagaaatgatatatcagaatttattcaaaccactttaagcatacattttcctgagaggaaaaaaaaaatgcctttagacatcaataaactggaacggcatttccctgttctggaaaatcagcctttaattagttgatgtgtgtgtcttgggttagtatttgttgtctgttcagctcaagtgatttttgtgctttataagaaaacggattgttctggtgggagatttgattgatttctgcttgttatagtcattgtaaattttagtgccatgcatagctacttgcttttatttactttgttttctttgtcaattgtagcttcattaaaaatctcttatctgttcacagtggaaactcttaaaaatgtaagcgtaactacttatttccatagaacagctcctgctgagtgtgctttacgatttatcataaaaacctgtaaggacaaattgaggctggatgtgctaggaaatgaagccgtccctgggatcactagaagagatttctattatgcaaaagaagtagctaaaatgattgattttgagacttcagtcaaaacataccctgaatgttttctggattttctaatgagacatattgta

SEQ ID NO: 34421 - DNA, 1032 bp, Homo sapiens
ttcagtggcttcctatgtaccctcagattctattaaaatttttctcaggatcttggccgggcgtggtgtctcacgcctgtaatcccagcactttgtgaggccgaggcaggcagatcacctgaggtcaggagtttgagaccagcctggcaaacatggtgaaaccccgtctctactaaaaatacagaaaattagccgggcgtggtggcgtgtgcctgtaatcccagctactccagaggctgaggcaggagagttgctcgaaccctggaggcggaggttgcagtgagttgagattgtgccattgcactccatcttaggcagcaagagtgaaactccatctaaaaaaaaaaaaaattctcagcgtcttattaagagtcagttttaaaatacttctagacttcagtgcacaggatggtttataaagcagcatttgtgaaaagtttgccattaggcaagtttctaaagagatctcaggagtcttaagttatatcaagtatttgccaaaacttggaggtgctcagtagtataattctggtagaagcctgaaaataaaggcatagagtttttactttgcacagtttgtggtcattcaatgtacttcaacagtggtaggactgtgaaatgatttgatttggtagtagaaacattcctctggtaaggaagaagtgaatgaggttatctaatccagggtgatctgaacaatgtcactaaaattggaggttaaagaactcaatatttagggtaacaaaaaagaaaataaattacagcctcaattgcaaaagatacctgaacatgtaatttttacaattacgctctgaagtgttggtcccactttgcagatggcttagcttagtctcacaggagttctagcagaggccttccccaacaacacagaactgagaaggagactgtctggtatttgaacccaggtttatgtcactgcagaggctttcagtgaaaagctgcctacccaactctattagagcccatgggtttggctggcagtataaagacaaagaagaaatactgagaaag

SEQ ID NO: 34422 - DNA, 1082 bp, Homo sapiens
tcattacttgtcctaaactcatagcaaattaaaaagttctagtactttcattgctcacagcacctaagaactaaaagaaatagacaactgatgacagaatatgaagtttaatagcattttctaacgaactgaaaattgaataaacccaaccacaagccagattcccagctactaaaatctccactacccttctcccaaaatctattttttctttataacatttacagactataataatgctgtatacataaacattgagtagtaaatgtcatcataaagtatttatgtgattttaaggggaaatgtacaaaagctttttccatcatgtacctcctgaattagcaatagggccaaaatccaaacgagtgaaaagtaattgtttaagacacttatacgacttctggtttatataaccatcaaaatattgcttctaagtgttagaagttgttctgctgtgtgtctgaagcatgggatcccagaagcaaatactcaagtagctaaggcataatgggcccaagtaaatttttgggattgatcaatgaattaattgagaaatactgagaaaatacacgataacttgacaaagaagagctttaaaaagaagctttagaaagagacaagtaaatgagttcatggtaagtatgagagagggtcagtattcttaatatataaagagctcttacagatcagtaaatttaaaaagggacaatagaaaaatgaggaatttgtaagggacatggatagctaacaacgagaaaaatggtcagcattattaatgattaatgaaattgaagagcagtgagatatatttcatttttcacattgccaaagattttaaaagattgctaacatcactgtcatatgcttctgatgggatttgtttactggtgaatgctttaagcacaatttagcagtatatgtttaaaattttttaaagcaagaatatatcatctgacttaggaatttgtatttgaaattcaggaatttaagtaaataattagaaaacgtgtacacaaacatattgtaagagagacaaatgtatggggagagaaatgcatacatgcaaacacatgagaacattt

SEQ ID NO: 34423 - DNA, 1104 bp, Homo sapiens
ttttttttttttttgagacggagtctcgctctgtcgcccaggctggagtgcagtggtgcgatctcggctcgctgcaagctccgcctcccgggttcacgccattctcctgcctcagcctcccgagtagctgggactacaggcgcccgctaccacgcccggctaattttttgtatttttagtagagacggggtttcaccgtgttagccaggatggtctcgatctcctgacctcgtgatccgcccgcctcggcctcccaaagtgctgggattacaggcgtgagccaccgcgcccggccaaacaaagttcattctaacataatagataatagtcaacatagtatggttctaggagaagagattgaagtttagccaatttttataccttatttgcatacctatacttaacattcatcttcaattatttcaaaataatgtgttgcaaatactcatagtacactgaaaaagctgtaattctactaatgcatataaaacaaatttagaagtatataaccatgagtgaaaccacacgttaatctacctggaaacaaatacaaatagtcccctacatgtccaaacagtgctgcctctgcttgcttcaccaacaccactacttgatgaagactccctagatcctctttttcttgatctttttccttctcttttctttttcttgttctttttgtttctgaagccttggaagccttcaattcatattcataggagtctactgtgttcatggtgcctgggacctcatagtaataaaagtctttgggaatcttattggaatcaggtacaccctggaaacactcaaatcatcaggaaacaccagacagtataatagaaggtgactgtgataggcagaattccaagatggcccccaagattcccacccctgggtgcgcccattctgtatgaatcgtgactgtgagtgggatctgtgaatatgatggaatatcactccagtgagtatcttatgttatatgggaaaggggtttgtaagcataattaaggtccctaatcagttgactctgcattcatctagtgggagatcatcttgggtgggccagacctaattgaaagagcccttaaaaaagataagaagcag

SEQ ID NO: 34424 - DNA, 1074 bp, Homo sapiens
ttagtagagacggggtttcacagtgttagccaggatgggctcgatctcctgacctcgtgatccacccacctcagcctcccaaagtgctgggattacaggcgtgagccaccgcgcccagctacatttgccgctttcttatgtatctcgtagaggcagtccctaactatcccatttcaagtgcaccgcccctctcactgtcctgttgtgattggtcgtcccctcagtagtgctgtacatagtctaatcgtatgacattccccttcttttttcactttccttttgccaaatcaaacacacgactctctcttcttcctttagtgggactctatacctgacatcgttgtcaggtatagacatgcactcaaagttaaaggaaattaaaatgggaaaagaaaatagtgggaaggaagaatattactttgtttagtgtctgcaaccctcactagaatgtaaactccatgaaggtcgagctgtaattgtgttttgttcacctctcaaacagagaacacatttgctgaatgaccgactgaataaatgaattgcactaatttactgtggagcctcaatagctgctcatttctcttaactattttacttgctaacggatttagcatggtagtacatctttattcattaacatagacaggtagctaccgttctcatgctggcttgttgaattgtgtgatgatagtcctgaatctatgtgatgatagtcttgaggctgtattcactactatatgtaatattattggttacttgtctctcttttaccttcttgaaactaattagccctttcgctcctttctgagttctttaatttttttttttctgagctcctaatatggaaatctgctggtatgtataatacatctgacaaatgaaatgtggataattatattgtttttctttagagatataatgagttgtctaaagtattagacttgaaagcaaatatttcaattaaagaagtcaaaagtagttaacaatcaaaggaggtaatacagtcaaataaaaagttaggcaacagcttcttaacatacatttgctatttgttgcctaccttatttcctccaa

SEQ ID NO: 34425 - DNA, 1034 bp, Homo sapiens
gcatgatcgttctctgcttacctgtgtcaacgtttagctgcggtaacaaatttttgtgatttctatgcttgcgacaaactcactttggcttatgaacttgtcaatttctattcctatcattctgaagagatttccaagtagattatagttttcaatattttcatatagaaaggaagaacgtcttatatactgggctagtgccataattgaacctgaaaggagttgggagggagggcggagaacattaggaacgctggtgttctaaagaggaaccctaagatgaaccaaaatgtatcacttggtctgaaaagattatcactgtggcttattttgtgtcttatcgataaattatggtggactttcaagtataaaaagtgttcaacatcgatttttcattaactttcttatcacttaggagttccagggtataatagagataatcatctggaaagacaggccttttctctctgctttgcccccactaacttttagtgtttgtctagggttgtgaatccaggatgagtttttagcttccatttcattcttcttcctttcttctacgtagtataaattttttccactccaccccatttggttcaggggcctagatagtactaaaggcctaccataaccttctccctgtaataaccagggagcactcctttttcctatccatctattccttcattcatttgttcatttattccttgacatatgattttaacaaatatttgttcaacaccaatttatgggctaaggtgttccgtatataaatcccagttagccactgacaccaaagtcatggtttacagtgtagttacagagaaaagtcaacaattaccatacagtgtgataaatacagtaagtagacttgtgtacacgtgccaaatgatttaaattgggctctagtgaggagagaccaatattgttttaagcctttgctctatccttgccagtgggtttttatgtggtagctggtttgagtatatatgtaagcgaggtatcttgataccaagtagtaaaggaaaattact

SEQ ID NO: 34426 - DNA, 1026 bp, Homo sapiens
ttgtatgactcagctaagatcatacagccagtaaaaatttgaaaaggagtttgaacccaagccgtctaactttggaagctatagcaaatgttggtgacataacaaaggagttcctaacgaatgtagcttgtgattgacctatatctttcctactagaaggaacaaacacaccagtaatgactcgatggatgcatggatgcaaggatggagggatgcatggatggatgcatggatgcaaggatggagggatgcatggatggatgcaaggatggagggatgcatggatgcatggatggagggaagggagggaggaagggaagtgtctcaacatagagaccaggagaagaaatggcactacagagtgtatttatttgaacaaattcaataggagaaagaagaaaggttctatgtcaggaggttcatgcaattattctgctgcatctggtagggtcattgcttctatttggaggttacatgtatcttcagaaagtttagctgtattaccagttgttggtgtatgctgatttttatgagtgaagtaatataataagaatgggcgagcacaaggagaccagcattctgcttttaataacctctaaccttaaacaggttactgaggcctcatctaggcatctgttcccttatctttaaaaacaaaagttctttaaagtctcatcttttttttcaccaaaaaacttaaaaaattgagatagaacatattttcatatatatatatgtgtgtgtatatatgtaagttgttgatacatgcttttttggtggtattccatctatagaaaggataattttccagaaaagtatattttttttttagtttgtgtcagctactctattttaagtgctttacatactgtcgctataggatagtcggatatgaatctttataaaagtaattttattagggcttattttattctttggaataccaattcagatgatatcatcaatataatccttttggattaaatagacgaaggaggttgccttttatttttatatttaagaacc

SEQ ID NO: 34427 - DNA, 1033 bp, Homo sapiens
agccacagaaattgttttctttttctaacccaatcatttgccatctctctgaaaaaaaattccaaggccaggcacgatggctcgtgcctcgagtcccagcactttgggaggtcaaggtgggaggatcagttaagcccggtagtttgagaccagcctggacaacaaagtgagaccccatctctacaaaaataaaatataaaaaaattagccacgcatggtagtgtacacctgtagtcccagctacttgggaggctcaggtggaaaagatcctgtgagcccaggaggtggagggtgcagtgatctatgatcataccactgtgctccagcctgggcaacacagtgagaccctgtctcagaaaataaaatattcccttctcatctctgatcagaatagaaaaagaccgcccgtgactcatgtttagaatttttgcaatccaaacccagcttttccacattttatgaaaatatgagctgccttgagttgcacaatgttcacagtaaacacacggttttaggaacttgaagaacgtccatacatagaacccagactcttaactccaacacagatcactaaagctttggactgaaaagcaaggagtgcacaggccgaggcaactctacctgggggaggaacacttccatgaccccaaggccgggtgagcctgttggttctggcattcattggttagtcacctgatgtagatgttctactccagaggtggcaagcgtgtgggacatttgttaacactcccacctccaatacttacaacagacatcaataatggatcaccacttctcagccttttggctaagatcaagtgtagtgtctgttcttaccggtttaataatggatcattgcagtgtttcctactgagtgcaaagacagtcttgggatctgtcttaacacagcagtcactttcaattgccaaccttgttttaaaaaagaagcatcagcactccctgaaatccctctccgtttttcttactctattcttatgctatgcatcccctcttcccacccttccccatcccc

SEQ ID NO: 34428 - DNA, 1068 bp, Homo sapiens
aggcagagaaaagcatacaaaaacatctcaatagcctgactcaggctgaactaggtaaaatgtgcatacacattgtggattccctagaagacaggcaagggaaggcaagagggatgtgcattaggttaccctagaggcagtattcatctaatcaagagttcattcattcctgcagccagtttttaaaatcatacatctaatgtgtactgaaaaccagttgctaaatatggttaccagacattttcttcttctacaagattgtcctaggttctgtatttgtttttttgtggagcttttttcggagaactttaaaacaaaattataaaatctcatgtaaaatcaaaattaaatgactttttctattcaacattgtatctaattattacctgtttataaaccaatcctgttcatagggtcagagcaaactgcggctttcaaaaggatattaatggttagtgcatttgttaactgggaccctatttattgttcctgtccaactcagatcactcgtgtgtgtgaactaagtactctgagcttcattagaatcgtaattgtctgtaagtaaactgtgatgtacttgaatttctacaattgtgcttatttttcacattttgttcaaataaaccagggctcagctcttaacattttcaaatacttgtttcattttaaaaaaggacaggggccttatttgagctaacagatgagccctcatttctacggaaccctaagcaagatcctatcaatccatgtgctaatggtcttttttattgatgaatttggcccttgctctgttgattgaatctacatatagtctctagccagtgatgcttaaatagaagccacagggtacaacattttggagttgaagttcagaccacacagtctccctttctgcatcccacagattctcatctgtgctctctcccccagcctccagctgctgcactgtcaccagcccagctgagattcagaatcacttctggtgtggttctgtccctcaggtaccctttatgtgcctcagaaacacttttacctagatgtctctctaccattcatacatgtttacag

SEQ ID NO: 34429 - DNA, 1539 bp, Homo sapiens
cttcacagcctgattgctgtcacatggcccttgtactctggaagagcactcaggttaatctccctctgacttcttttctcataataaatttcttcccaggaacctctgtgtggcctaccaaatcaggtacagattcttccacttggaggtgaaagtggttggttggccccactttatctatccagaactctctcttaagttgctttccaaaccagtgttgtttggaaatctccagtcttcctgctttgactttgctaactgtgcttctcttcaaggtttagctaaatgttagtctacactttaagccttcgaaaccaaccccggcacaaagcaaatgtttccttgttcaccttcttcatgtagtttattattttgcacctgcctgagatttgtgttctcgctgtctcaggaatggaagtcccatctcctcaattagggaataagcccctttaggccaatacacctgccttcttctgtatctccacggtacttaacattatggataaatacagttaggacttgtggcttcgcagcggtgaaccattgttggttctagacaaaaaacaaagttttgaaaatgccatgttggttttaaacagaatatattggagtagagaaagtcagtaggcagagagagcagcattctatttcctcagagcacatatctagtcagcagagagtgatttatttaataaatgagaggtagggaagggtctaggtaggataatgcaatgggaaaacagaggaaagaacataaccaaataacattttgaataagctaacaagaaaattgttgatttggatcaaagaatcaaagagcaagagtcaaaatgtcaccaaacttttgagtagaaaatggggatttcagtggaaaggtgaaatagttgagaaagaggaggagatcttggattgggcagagagtataaaacgaggatgatacatttagtttgggacagatggacagtgcacatagggaagagagaaatatgttttcctttaagattttttagtagaagagtaatgacattacattggctgtaatggatttttgaaattatttccacaaatttgaaaacttctctttttttccgccaatatggattaattttcagggatcatattttgcagtgaacctttaaaatctcatcagcttattttaaagcaaagttgttacaggactctggtataaggaaagttacattaattgaaacattcatactagtataattgtgctataattctcatttgaagtttaaatgaggtttagtgctggctacagagggagggacacactggaaactaatttatctgtgagaaggcagaggagcagagtatgacattttggtccttttgagaaaatttgcaggatgttgaggtccgttgctgctgctgctgctgtttctgttgttttaaatagtatataactaagggtgaggaccattagaggacagaaatcacatcttaatcagctttgatttttttatgtttaaaaaagagattgagattcactttgtagtctagggagtttaattaaagtaa

SEQ ID NO: 34430 - DNA, 1025 bp, Homo sapiens
aagggacattccaaaatggttttgttcaggaaacagtatgattagaaaatctttatagtctctcaagatgtctacttgaagggacagtgatcatttatgatcatttatatgtataaatcctgctatctacattagaaatcagtctctttcattagagtcattattgtgagttagattctttggttaaaacatttccttaatttttaatgttttaggttatataggataaattcttttaaaaaagagagagagagcaaaagagacaggagagctaaatgcatcgctgtctcttgtctcttgtatcgtaacatatttgtatcttataatgatattctccttttccacaggcatttcctattcaaaacaggaacaggtacaacgccactgttcagtactgcaaccccaggatacacaatggcatctggctctgtttattcaccacctactcggccactacctagaaacaccctatcaagaagtgcttttaaattcaagaagtcttcaaagtactgtagctggaaatgcactgcactgtgtgccgtaggggtctcggtgctcctggcaatactcctgtcttattttataggtaagaacaagttcttagaattactttgtctgtaaatcagggtgttacattgttttattacttgtatttattcatttggtctagaaatatattgtgagattatatttggtgggggtgagtttggtaataatgtatcataaatcacagagtattttcagtaattttcagcaaatttagatacatagaaaagcaggttttgtgggtagtgaggtaatattcttggacaaaagctatagggtacatttgtgtttgacttatcccttgtgaaacatggatagctctgtggcatttcatgtacacaaaataattcatgcgcttgcagtaatgaaccctgtgcaggatttccttcaatgcgtactcaatagggagctctccactgcttgtgatattgtaagtctctcagctcactcagccatctaaatgtaaaactcatcactca

SEQ ID NO: 34431 - DNA, 1040 bp, Homo sapiens
attcaatgcatatcagtgattgtttgctcttcattctgcaattcaagatgatgcacttgtaattcatagcaaaattttaagaagacacttctgcaaatcagcatcggtagtatcctctaaagcaataatggaaatccccatcattcgttatttatatttttagttatttgaattttatgaaagaaatattatcgtgtattttttaatgcatagaatttattcattttacatttgtctaatgagcacttatgatgtgccacgcactgagcaagattctgggaatatagctgtaaaagcaagatgatcacagctattgtttccagagcatgtgaattctaggctagatgggaatcgagcgagttattacagtgaattagaaaatctccgttagggaaaagcggagtgtaccctgacagaacatttcaacaccagcttgacttctaaaggggcagtaagacacatgcccaattttagcctaggataatttaggataataaagactgaaataaaaggctatatattacaggcaatgtaactatggcaagtgacttctccaatcaaaagaactctttttgtatggatacgagttgaaaaactacaaatatgtgtgtatgtgtatatatgcatatgatttatgctgcttaaacaaaacaattccaattgcttttaaattttaattttttttttttttttttttttttttgagacggagtctcgctctgtcacccaggatggagtgcagtggcgcgatcttggctcactgtaagctccaccacctgggttcatgccattctcctgcctcagcctcccgagtagctgggactaaattttacatttttgatcatcgtgtatcaactttctcaagtactagacaactctagagagttcagtctgacagcaggttgcagattccctgtgaattcgagaaatggagctgacagggctgcaagagcactgagttttgttcaatagtgttcatagtacttgtgttattacaatgtgtaatagctccttaattagatgctatattgattttgtcc

SEQ ID NO: 34432 - DNA, 1025 bp, Homo sapiens
tgggattacaggcgtgcaccactatgcccagctaattttgtatttttagtagacataggttttctccatgttggtcaggctggtcccgaactcccaacctcaggtgatctgccctcctcggcctcccaaagtgctgggattacaggcgtgagccaccgcacccagccagtctagaccattttaaagtttagatttgactccagttcatcttataggtgacactgactaggatataataaccagattttcttaaggctaggcacagtgacttaggcctgtaatcccagcaccaggaggccaaggtgggtggatcacttaaggtcaggagttcaagaccggcctgaccaacatggtgaaaccccatctctactaaaaatacaaaattagccgaacgtggtagcgcacacctgtaatcccagctactcaggaggctgaggcaggagaattgcttgaaccctggaggcaaagattgcagtaagtgagagatcgtgacattgcactccagcctggacgacaggagcaaaactctgtctaggagaaaaaaaaaaaaagcagattttcttaagtggaagtcctctataacttcaattatagtagacagattggatttatagcaattgtccagtgaaatatgaaaaaatattttcccactgaaaccgcatatgtgattatttgtgtataattcaagaaatatacctctaagctgagcacaatagtaaacatgtaacttacaaattctagaaaataatttcaggtaagaattgtctattgtgttgtgtacttgaaaggtttatttaaagatttagttgactgcaagttgtatataacatttaagattagagaaatgaaaggtgcagtttcgggttttctcataatccttctagtatttaaacacaatacatgtgatatcctcttttcttttctaccacaatatatgtgtttaagtaggttatgcattttcttaagcttcacggttattatagtttcttcctgtggtttattcaagatcagcagagcaaacaact

SEQ ID NO: 34433 - DNA, 1031 bp, Homo sapiens
atttctaacaattgtcatgtgtattttctgcatgattagagcagcatgtaaaattaaatgatgaataaagacgtagagttccaccattgatcatttcctagtagtcagtgctgaaatttacgtagcatacaaatacttttgatttcttttggatgattttgtgtttcccttgaacaaatttgtgtggaagataaaagctgcttattaattccccttctctctcccgccactcttctctcctgttttgtgtcctcttcctcccacatagaaatatgttctgtggactgtggctcacacggcgtttgcatgggggggacgtgtcgctgtgaagaaggctggacgggcccagcctgtaatcagagagcctgccacccccgctgtgccgagcacgggacctgcaaggatggcaagtgtgaatgcagccagggctggaatggagagcactgcactatcggtaggcttactgcaagtctgtgtctgtccccttcctcccagagaagagcaccgacggtcagctgttttcaacttggaaaaagcctatttctttacgttattttttacttgtctttcttaacacgaaattattttttaaatatggttgtcattttataatggcaattcagttctttttagaacagctgtcacaagtatgagctataaacttttttattcattggtttttgggacggccacaaaaatggactcacataaaacagacttaatgatttgtttatgtgaagttttatcgaatattacttcttgatgttccatattgtcattgcatttcttaatagcagattttccactttagaaaaaaatgctttaaatttttttcaaatatatgcccttgttggcctctgtagtttccagaatcacatagcttagacttgtccatatcttgagtctctgcaaaagaggtttgacttattatgacttcattttgtggtatcatgagaaataaagtagaatcaaatgtacaaatctcgctgctcttaaacaaacctgtatggttaacactttttcatatatga

SEQ ID NO: 34434 - DNA, 1083 bp, Homo sapiens
gaagtgtgttacagatttaaccttgtagtgtccctccttccttatctccttcaccttcccgtgtgagtcatacgatgacgtctccaaaagtcccattagaattacaactgcaactcagtttacagattacatcctcaaaaaagtaggtgagactcctcactgacttctgcacctgacttgctgtgtaaccgtcaggaaaagtcacagtcccgagggccatgtggatacacgttctccagtcatgttggtgatttattttccactaaagaatttcccaaggcctcggtttctgtcccttagaatgggagtaagtgtggggataaacagctctcactattgacatcaggccttgagttccctctttctccaccctatccttcatgccgtaatttatcctcatgaaaaagacaggcagcagcatagtcatcagctagagctgcgtggtttcatatcagacggcagtgccagtgctactgagaggtaaatttctaggacaggtgtgttgttttgggaaacgttagatgtgttttttccatactttagaaaaggaacattttttgaggccttctgagactcaattctgagtgtaaataattgcttggtgggtgaatacatctggatttaacatacgtttttccactgaagtgatttacacatagctgtgaggatgagaagttagaattcttgaaaagaaatacgcttcacatactcttcacgtccttgtttagggtcatatgataaatgaattctatactgtggtgtttacttgtgcaggaatttctttccggtctacctcctgtggtctaacttgagtcccaatagctattgctaaattaagctttctcctacaaggcccactggaaggcgggcccactggcattagaagcagctgtttcagaaagaatggagagttaaacctgttgtgatttttctcaactgggagcaatacataagcaacttgaggatttgtattgttttttgataagttagatgtcattgaaatatgcctgattcctttaggcttggcaaacccgattccttcctttcccaggacctcgtgtttgtttcccactgtgaaattaa

SEQ ID NO: 34435 - DNA, 1297 bp, Homo sapiens
ggcccactgacctagccattaaccctatggataactccatttatgtcctggataataatgtagttttacagatcactgaaaatcgtcaagttcgcattgctgctggacggcccatgcactgtcaggttcccggagtggaatatcctgtggggaagcacgcggtgcagacaacactggaatcagccactgccattgctgtgtcctacagtggggtcctgtacattactgaaactgatgagaagaaaattaaccggataaggcaggtcacaacagatggagaaatctccttagtggccggaataccttcagagtgtgactgcaaaaatgatgccaactgtgactgttaccagagtggagatggctacgccaaggatgccaaactcagtgccccatcctccctggctgcttctccagatggtacactgtatattgcagatctagggaatatccggatccgggctgtgtcaaagaataagcctttacttaactctatgaacttctatgaagttgcgtctccaactgatcaagaactctacatctttgacatcaatggtactcaccaatatactgtaagtttagtcactggtgattacctttacaattttagctacagcaatgacaatgatattactgctgtgacagacagcaatggcaacacccttagaattagacgggacccaaatcgcatgccagttcgagtggtgtctcctgataaccaagtgatatggttgacaataggaacaaatggatgtttgaaaagcatgactgctcaaggactggaattagttttgtttacttaccatggcaatagtggccttttagccactaaaagtgatgaaactggatggacaacgttttttgagtaagtatatgaaaattctactctgattataaaatactgtgatataataatatcatctataataacaatataatcttaagagctggaggattccatgtttttgagagtctagagcttctgtaatttttggatcccggctgggcacggtggctcattcccgtagtctcagctcctggggaggctgagacgggaggattgcttgagcccaggacttcgaggccacagtgagctatgattgtgccactgcactccaggctgagtgacagagccagaacgtatctctaaagaaaaaaaaatggccgggcgcagtggctcacgcctgtaatcccagcactttgggaggccgaggcgggcggatcacgaggtcagaagatcgagaccatcctggataacacggtgaaacccccgtctctactaaaaatacaaaaaaaatag

SEQ ID NO: 34436 - DNA, 1079 bp, Homo sapiens
cctccttactcacctccgtttcccaagtcattgacactcatgagatgaaactaaaaacctgggttccggtcgcgattgtgtcgcttactcctaactgcatgactgtgagagtcagagcccctgtctggattttcctgtcctcacctgtaacatgaaaggctccttagtaattaaaaatcacttcctattcacaagaaaatatgtgatttttaccatttccttccaacttctcataggcccctgtcaaggtgtattccaaaagaaataacacttaacaaaagttaccaaatttcctctgctaaaacagttatgcatattgcatattgcatttcggtcaaactagtatcttatatgttatgttggtggtagaaatagcaatttatagtaataaatagaattttctctttccaaatgtgccacctactttttaaaaatctttcccacttactagaagcctggcacagccctccttgtcctcgctcagtgccagggtgtggggtctgtgtacggctgaacaggcaccaggatacaaggagaacaaaagagaaggaggggtttgtcctctgagcacttccagacccatggaataaatccaggaggatgagggcatgcacagttctgttttacagattctttggagcaaaaattttcctcgccatcagctgtctaggaggtctccatttcaagaccagatagctaaacaaataagctgtatcctacccatgtcagccttcctcactcgataaacaatttaaaaaagaaaaaaaaaagacagactgtcttaaacatgattcttctcttaatgatggctaacccagaatccttcgaatccctaagggaactaattctggaatgccctgacttggatggctttgtctcaaggcctgtgaatttcagagctgggcattatcactttgtcagttctccctgatgtggtaatgactatgaaaggaaagaggcattgggtcactatttttgaatttgattcttgaagaaaatgtcatttctgtgaccatctatcactatgctcagcgttcaaaagggctggaccagagaggagtgggggaggctctgccctt

SEQ ID NO: 34437 - DNA, 1077 bp, Homo sapiens
taattttctaactgctttgtatgtatcacatactctaaattgcacagtaggcgtgtttattaaacagatgattggctgggaaagtttcaaaatagctactgaatttacagtatcagtgctattactgtctttgtgtatttggtagagcataccgaagtaattaatcttctaatgaatgctgatgatattttattagaatgaaagcacagattagcattaatattttttattctggaaatcctttggcaagtattatgaagcccaaatttagaaaactatgagatttcaaaccacataaacatgattctgttttccattttattttttaactgttaggtatttgcagttctgttccgtggaacttctgcaggcctgtatttagcatgctgtaagtacttttgggtgaaataggctctgagtctaaattctcagacatgtttctgatgtattaccatgaaaagcttgtgccacatgacagaagtgagatcatagtcttaacctcttcttgacgtggactggtcttcactcgggcaccgataaataacagatttggagtatctcctggtgcttattttagatgatgaagtcaaatcaacccaattagtgtcctgttagtaggtataatgagcctatttctttctaaaaagacttgtgatctggacatgcttttacaagaaatagtgaccttggggaatatgtaaacaaaagacctttttctaagagttgggagggggtgggggactgtataatgaaaagaattagcttacaaaaaagaaattgatattcaaagtattttaggcaaagccagtcaaaatgctttcatgatattttgagatgtaaattttgtctgatttgtattgttcttttcatttgccttcttaactttatatgtgacctgaattttccataacttgatgactatagattgcacctaggcattccaataaaagccaacccaatgtgtgtgtgtttttatattttttcaagtcttgggctagccagcattgcttttgtgtttaacgtggaggacgcaaatagatgcagttgttggggaattgattcatctgcaacccagtt

SEQ ID NO: 34438 - DNA, 1020 bp, Homo sapiens
aacctctgcctcccgggttcaagcgattgtcatgcctcagcctcctaagtagctgggaatagaggcgtgcaccaccacacccagctaatccccataggtagttttttgatcttcaccctcctcccaccttccactctcaaataggctgtgatgtctgttgttcccttttagcttccatgtgtactcagtgtttagttcccacttataagtgagaacatgcggtatttggttttctattcctgtgttaatttgcttaggataatggcctacagttccatccatgttgttgcagagatcatgatttcattcttttttgtggtgcatagtgttccatggtgtatatgtaccacattttctttatccagtctacccttgatgggcctttaggttgattctatgtctttgctattgtgattagtgctgcagtgaacataaatgtgcatgtgtctttgtggcagaatgatttgtattcctgtgggtatatacccagtaaagggattgctcggttggatggcagttctgttttaagttctttgagaaatctccaaactgctttccacagtggctgaactagtttacattcctaccagcagtgtttaagcattccctttcctctgtaacctggacagcatcttttgacttttatctaatagccattttgactggtgtgagatggtatctcattgtggttttgatttgcatttctctaatgatcagtgatgttgagaattttttcatatgccttcttttgagaaatgtctgttcgtgtccgttgctcattttttatggggttgtttgttttttgcttgttggtttgtttatgttccttatagattctggatttcagacctttgtcagatgcatagtttgcatatattttctccaattctgtaggttactctgttgatagtttcttttgctgtgcagaagctctttagtttaattaggtcccatttgttggttttcttttttgttgcagttgcttttggcctctttgtcatgaaatctttgccagggcct

SEQ ID NO: 34439 - DNA, 1023 bp, Homo sapiens
ttttgtttttgttttaaattgagacagagtctcattctgtttccgaggctggagtgcagtggtgtgatctcagctcactgcaacctccatctcccgggtgcaagcaatcctcctgcttcagcctcccgagtaggtgggatcataggtgcacacctcgacgcccggccaatttcgtatttttagtagagacagggtttcaccatgttggccaagctggtctcgaactcctgacctcaggtaatctgcctgcctctgccttacaaagtcctgggattataggcgtgagccactgctcccagcctgggaatttgttttgtttactgctgcatcgctggtatgtataggtgctcaataaatacttgtaaatgaatgaatgaatgtgtactgtgttgtagggattgagaactgttcaggaatgtacagtggggaggaagatagatgtttaacaaatattactctaaaacagtgagtacattgtaaactgtgaccttggtggtccaacgtatatctgaatcatgtgggctcccgattaagagtggagattcctgtggtgccttgcccgagacctactaagtcaggatttctagatgtggggcctgggaatcttccttttcaagcagttattgcaatgattctttcatacacaagatttgagaccactgcttcaaggggagagtggtctggtgctgccaatagataaagacaaagcagatttgcccttgtgttgttaatgggaagatactgactcacgtgggagtcatgagtataaactattagaacttttcagtactttaaagaatatattgggtttagcaagtattttttttactgtatataaagaagcattatttttaataagcagaattacagttttactgctagatcaaattattaataagaccttggaagaacagcatggaaaaggaaaaattcatttaccttcttgacttgtgcccactctactaattttatagtttttataataaaagccacagcctttactgaatttttactctaggccag

SEQ ID NO: 34440 - DNA, 1050 bp, Homo sapiens
cacctaatgtaaattaaccatttaaaatgatcaattcagtggcattgagtacattcacaatgttgtgcaaccaacccctatatttagtttcagaacattgtcatcctcctccaaggtacccactgagcagtttctatttacccctttccttgtcccctggcaaccatcaacctactttccttttttatgcgtttgtgaactagctatttcatatagtggaatcgtaccatatgtgacattttgtgcctggcttctttcacttagcataatgttttggaggttcatccatattgtagcatgtataagtacttcattcttttttatggctgaataatattccatttcatgtatataccacaatttttttatccattcacctgtctatgggaatttgggctctttccaccttttggctattatgaataatgctgctatgatcatgcacacacatgtacttattcgagtacctattttcacttcctttagaagtagacctagaagtagtattgtgggatcatacggtaattccattttaactttctgaggaattgctaaaccattttctacagaggctgcaccattttacgttgccacccacaatgtacagagttcccattgctccacatccttgtcaatactcgtgtcttttgtgtatgtgttttttaatgatagccatcatagtgggtgtgaactggtgcttcactgtggttttgatttgcatttccataataactaatgatgttgagtactgttactatttttatataagttagaaaatgaaggataaagaaagccttgctcttgaagttattttcaaattagttaagtatcctttgaagaaaggaaatgtttacttaaaattaaatgaagtgtctactattccaaataggaggactgttaagccattatctgtttaaatatttcatcgttttcataacagagatacttgtaaagccttcaggtttatttttaacttgagcttgttttccacttctccatcacctggttggattagggatccaatctaatttacgtcttttaaacaatagc

SEQ ID NO: 34441 - DNA, 1066 bp, Homo sapiens
ttctcatatgagtgcattgcttaattttcaaacaattggagattttcttttattattgacatcaacttaaatacattgtatttttcagttcaaaaacttatatttgaacctgggtgcagtggcttacacctgtaatcccagcactttaggaggccaaggtgggaggatcgcttgatgccagatgttcaagaccagcctgggcatcataacgagacataatctctattaaaattaaaaaaagttttaatctcagaatttctatttgattatttttcaattgtttctagttacttgcccaaattctgcacattaatgtgtaatttttgaacactttgtcatcctagagaggatttagttttgtttgttttaggtagtcaggccagggtcaggtaattttaatataatcatgatttgagctgactgtagcctgggcttcagtccttctctaagggcgggtcaatttccagtttcccttttcttttagggcaaagctcttcaaaatcccagttgaactcttgaggtgttttaccagggccccttccgttcgatagatgctgaacttcacgtctcttccctatgccttagctctgtgcagctgccagcccttctctgtgtctcaggtgctcagtcactgcatgctcccagcctttcactttctctgttgtgtgggcaaatacctcaaaagcagaaacagtgcgatgtttggattatgacactgagcttcccttatcttttggattttttttttttttggcggagtcttgctctgtttcccaggctggagtacagtggcgctatctcagctcactgcaagctccgcttcctgggttcaggggattcttctgcctcagcttttggagtagctgggactacaggcacctgccaccacgcccggctaattttttgtatttttggtagagatggggtttcgccatgttggccaggctggtttcgaacacctgacctcataatctgcccacctcagcctcccaaagtgctgggattacaggtgtaagccacggcgcccggcctcttttggatctttaacacaagttcttgctgcctt

SEQ ID NO: 34442 - DNA, 1035 bp, Homo sapiens
gaagctgaggactgtaaattaagactggattgtgctttttattccattaggcttcttaacacaactatgaataaatcactgggcctctctgcaggttgggctcccatcatgtaaactggaggtgaatcacacccttctggagtcctcagcattccaagtggctcccaggcctcgtaagcccggcatcttatcgtgattcgttgggtgagggaaaagcatgccgagagaggactggggttcttccagaggagcctcgtggtccttacaaagcaggaatttctttttttttttttttccatagagtgtttccctgtcaaaatgccaaaattttatggtgctagactgcagaactgctagattttttgtaaagcttaaaataatgcaaatgttaacactcttaaaagttagatctatttttaaaattatgccaaagatattaatacactgcattcaaaaaatcttaatgattacagaaaagtattcagcattgaggtctacctacaaaattgtttggtattgattattagcagctgataataattctatatgttttgccacctaatttgtggagaaagatataggtatagatacagatataaatataaaaacatagagacaaatacagtcttcagtaaagtatattcttactcagcagggaaggaaatatcttccggtgttccctggtcagctttttttttttataaaacaaagccaagtttcaaagtaattttgtagtcaccatagaaatgctagaagttgaaaacatcagcagccattacactacttagagggactgccaaaagacttctctgcaagggataggatcctctgcgttctattcctgtggaaggtggcaaagacggaacaggatcctgcgagcctgtcttatttcctatctgataaaatcacttctaggtaagaaaagtgggttggattttcttacctatgcatgattcatttccttccctgacttttcgtgatatatcccttgttaaatcagtcaacagatgtctgttttaagagtgattttttttc

SEQ ID NO: 34443 - DNA, 1099 bp, Homo sapiens
atagcaacagtgtattcagttacatacacgtgtgtgtatgcttacgtataagtgaaatgagtggcagcaatgatgcaagggacaagagggaagaatgagggatattttgttattataaggtacttgtactactcatgatgtggtataatgttatttggaagtggatttggatagtataatacaaactccagagcaaccactagaaaaaataagagagaaatataaatgacatgctaagaaaggagagaaaattgacattatataaagtcctcaattaaagccacaaaaggcagtgaaagagtagaagacaaacataggaacaaacaacaagggcagcaaatagaaaacagtaacaaattggtagatattattccagctgtttcattaatcactgtaaacatcagtggtctgaatataccaattaaaaaacagtttgtcagagttgatcaaaaaagaaccagctgtattttgtatgtaggaagcccactttaaacataaaacacatatggactaaaagtagacaatgctaatactaatcaaacgaaagtgggagtagctatattaatttcagatggagcagacttcagagcaagaaaagttatccaggatttaaaaaaaaagtatgacataatgaataataaagagattaattatccaagaaggggtaacaattttttttttttggagatggagtctcgctctgtcacccaggctcccaggttcaagtgattctcttacctcaacctcctgagtagctgggattataggcgcacgccaccacacccagttaatttttgtatttttagtagagacggggttttgccatgttggccaggctggtctcgatctcctgacctctggtgatccgcctgccttggcctcccaaagtgctgggattacaggcatgagccactgtgcccgaccaggataacaattcttagacatctatgtgactaacagcaccaactatatatgaggcaaaaaaaaaaaaaaaactacaaggagaagtggatgaattcattattatcctctgacagaaataaacagacccagcaggcagaaaatcagcagacatagttgaactcaacggcactattac

SEQ ID NO: 34444 - DNA, 1053 bp, Homo sapiens
gcctgaagggggaaaaagaataaaaatttatggtttgcacttaggtttgagatgcctaatagatttccagtagaatccagcatggaacccggcatatgaccgttagggtaataggaggtgaacattttggagagtcatctctatggcatttgaagccatgtgactgaaattactcaggaaattagagcttctcaaatgttaataagcatgtttggttaagatccagattctgcttcaggagatctgacgtggggcccgagggtctgcatttctagcaagcttctcagtgatgctgatgccgctgggccggggcccgcattttgagtagcaaccaagtagatggggaggagagagggtcagccctgtgtcactccaacatctaaaatggggaggagccagcaaaggaacctgaggagagctctccgtgatgtgaaataaagtgtttcaagaagggagtcgtcggctcattcaggtgctgttgaaggaagatgaacacaactaactgttagattggggggattgtcgttaacaagctgcacgtttggagtctggattgtgagcagaaggggactgaaatagagatggcaactgcagacaagccttgcaaaggggaacagagatgggttataactgaggcggaggtgagctaagggaggacttaagctattcgggaaatagtatggcatgattgactatatgctggaggaatcccgttaggaggggcaagtgaatgctgttgatggggaaactgaataggcaagacggagtgggatgcaggactcaggagaggctggtctcagtaggcagaagaggcagtgccttgtccatgtccacagggagggcagcacttttattcacttactcaaatatttattgtgcacctatttgcaaggcatcgtttgtactggggataaagcagtgaccaaaatgagacaatctgtaaccttgtggagcttagattctggagtgaatggggcgtatatgcaggtaggttgctaactttgttattgggaaaatgatagcttccactttcccagctgaggaagtgatggg

SEQ ID NO: 34445 - DNA, 1026 bp, Homo sapiens
aaaatatatgtttgtatgctctgaaaaatgtgcttgcttgatatgctagtgcagtggtggcagaaaatggactccaggtgatctttatatgaatattgctaagagtaaatatacatgtgttctaataaaaagttagaataaggagcagctcgtaattaaaagtttaacctaaattatctggtaggataaattctatttcgagacaggtcaaacaataaaatacagataattgtgtgcgtatttgtatatgtgtatgtacgtgtgcatcttgtctagctcaaaacaagttgatcaggttcctaccttcataaagaagctgatttaactgtggagaccaaaagcatccatgttaaattccacagagcactgcaagtgtaaattctgtaatatagtttgtaagtcttacaggatttcagagaagaaataaatagatgtgacctgggaaggtttaaggaagaggaaggcctgcaactgtgcttgaaggtgtggattagtgggaggaagtagtggttattttggacagaggaatgtcataaaaaagcatggacatctgaagttcagctagtttaaatcactaaatgggaagactgaatcggttggatttttttttattgtagaacaaaaaaaactgaaggtctctttccttaaaagagcattcttaatgtttggtgttgccttaaaagtgtaatgtttgagtatctggtaagagaattggtcttttcactaacagccttatgtcttgactagatttgtcgtttatttatttatgtttgtgaaactggttataaggttttctccaaataagcctcaaataataaagaagtgtatgaattaaaaagtggaagccttacaacacttatgctctatcccgtgatgtctctgtagcctgttacggttaaagcgagggaaagatttgactctgtatccctcagtttagaggaaataatagcacttaccaagcctacttactctcagtcttctgtattgactgtttaacaggtgttttatctctaagtacacattcag

SEQ ID NO: 34446 - DNA, 1022 bp, Homo sapiens
ggtgcgatctcggctcattgcaagctccgcctcccgggttcacgccattctcctgcctcagcctcccgagtagctgggactacaagtagttgggactacaggcgcctgccaacacacctggctgattttttgtatttttagtagagacggggtctcaccgtattagccgtgatggtctcgatctcctgacctcttgatccgcctgccttggccttccaaagtgctggggttacaggcgtgagccaccgcacccggcccgtatcagtccatttttatgctgctgttaaagacacacctgagactgggcaatttacaaaggaaagaagtttaatggagaactcacagtttcacatggctggggaagcctcacaatcatggcagaaggcaaggaggagcaagtcacatcttacgtggatggcagcaggcaaagagagcttgtgcaagcaaactcccttttttaaaaccatcagatctcgtgaaacccattcactatcatgagaatagcacgggaaagatccgtccccataattcagtcatctcccacagggtccctcccataacatgtgggaattatgggagctataagacgagatttgggtggggacacagctccaaaccaaatcactggttttgaactcctggcctcaagcagtcctcctgtctcagcctcctaaagtgctgagattacagatgttagcacctaagcctggcctagaattattaaaaaaaaatgtacactccacagacatttgtatactcaaaagaagttacagttcaataacttacttaagtcaacttaaaattgaataatattcctagacgaatagcttgaattgcttaacaattgttttaaagccttttaaattgtagatattgattcattcagtgactagagcattcaccagttcctgggatgtgttctaggcactgaagtggagaacaagtcagatacagtccctgtacttttggaggctccattctagtggcacaacagacatttgaaaaattaaagaaatggtctg

SEQ ID NO: 34447 - DNA, 1039 bp, Homo sapiens
gaaaagaactgtccagtctggacgaatcactttggtttttcctttttaaatctctgttctctggtcaataaaccagactctcctggactcttcctgaggaagtgaaaggaggatacagctcagtgaactctgcggcgcttctggaaagaaatccagttctctatctcatcggttagggttacatctctcctgtagtcttgttacagcgccaccattcattccaatcctcgcctgactccctccagcagtgcctctgggctccaggttctcctgaccggtcacttcccctctgtcctgggttggtcgtgataggctgggaaagccttggaaggcctgctcactttggagttaatatagaaccgcagagacgggaagcatcctttgttttttgttttgggggactttgtgactagcataatttgtctaggttgatcactttcctttcatcagagcctggttattaatttgtaacaaaaagtttgtccaaggaaagtctttaatcgttagtagactgtgaggtaatgtagaaaatgcagaaagcagtacgttttaaatataggaaatgcagtaatgtagaaaaacaaaagcagtactttagacactgtctgttcccagataataatggttactctagcatctttgtttcatttttacctgtatctttagcatttcctcttatattgaaaaaggaacattctagaagacagtctttatgctatatacttcttcattctgttagatcaggggtgtccaatcttttggcttccctgggccacataggaagaagaattgtcttgggctacacataaaatacactgacactaatggtagctgatgagctaaaaaaaatggcaaaaaaaatctcatactgttttaagaaactttaagacactgggggtcttgattgctttgaattgtttttctaggggtagtgatgaatttgtactaaagttttcatctgtacgcattgtaaacaataggacatgcttgaattttgtggaatttggatacgaattagagctgttatttatttatttat

SEQ ID NO: 34448 - DNA, 1033 bp, Homo sapiens
aaaaaaaattcaaaaaaatttaaatggtgaagtgtattcatttattttggaaacatcacttttcttccacacatgagatggaatggaactggaacacattatcgaaatccacaaaagctgtgaaaattttatattaaataatcctgtaacttgaaaagattttaaaaagtcctcattaaagataggctcatgaaaattagcgtatttttgtgtctgccaaaacttctttgcagaggaaatggggatgaaattccagatgatgtctttgtctaactgtacgggcaagggctgcattggctgaattgatgacttcgctgaagctattgaatttctagtgttgcctcagatcacgtcatcatttttgctgtgagctctgatagttgcaattgtgttcaactcctggtgagtgcagcacatgcctcaagtcatgagagatggaaaaggactactgttttctgcaggtaggtggccaccactaaagctttgaaatggtgtccacattcttggaagctagtgaactgaagcaaagaggaaaagaaccctccaactattttgggggctgatctgtgtcattcataaaagaatggctttcaaaactgcttagtaatctaggggaaaacctcagtccttaccaacaagatggttcactgggttcaaaagaacgtgccacacacccggaggcgtgccttgctttgcaaccctttgcatgctggctgcagggtccgtcctttgctggcgatcagtgggaagtatggttgccagactatgagctgaaagacatagtagccctatttttggatcgccagggaaaaaatcaaattgtttgtacttaagaaaagtcctcaggtggagcattgtgtatttggtagaaagactggaaactccaaatacacagaaatagaaatttcaagggataaaaacaaacattatagttcatgcatttataaacaggttttaaaataattataagccaccaatttgatgacactctcaagacttcgtgagagtgacttttgagaagttacatctcatc

SEQ ID NO: 34449 - DNA, 1087 bp, Homo sapiens
tgagaagtaacccatttatgtatatcatggtctccaacctttttggcaccagggactggttttgtaaaggacagtttttccacagactggcatgggggatggttttgggatgactcaagcgcatgacctttattgtgcactttatttctgttgtgattacattgttatatataatgaaataattatacactcaccatcatgtagaatcagtgggagccctgagcttgttctcctgcaactagacggtcccatctgggagacagtgacagatcatcaggcattagattctcataaggagcacacaccccagatccctcacatgcgcagttcacaaaagggttcacgctcccatgaccatctaacgctgccgcggatctgacaggaggcgcagctcaggtggccatctgagcgatggggagcagctgcaaatgcagatgaagcttccctggctcgcctgccactctcctccttctgtgcagcccagttcctaataggccacagtaccggtctgtggcccaggggttggggacccctgtgatatacatgattgtatttaatcttcatggaaactcagtgaggctcttcttatctctattgtctaagaggctgaaattcagagaggttaagtatcttgctggaggtccagctgtgcagtgctgagacctcagcccaggtctgcctgactccacggctgagcctgcacatggctctcctagccttcctgtgtccgacccatctgctgtgcacctcctgagaaccttcgggtgctcttgaaagcttgtatgatctacgtttttctttcaatataaatgtaaccgcaatgatctagcgatgattctctctttttaaaactatcacttgggctgagcgtggtggctcacacctgtaatcccagcactttgggaggccaaggtgggtggatcacctgaggtctggagttcaagaccagcctggccaacatggtgaaaccccatctctcctaaaaatacaaaaatcagctgggtgtggtggtggatgcctgtagtcccagctactcgggaggctgaggcaggggaatcacttgaacccgggaggcagaggttgcagt

SEQ ID NO: 34450 - DNA, 1015 bp, Homo sapiens
gctgatgaggcttcccaagcagtaggttgggaggaaggtgggccgggagcggtcagccttcacacagctgggccatccctcgtgtggcgcgtgctgcagatggcagcggtcagctcgtgtcatctcctagcatccctggaccgcaaaacaggcttgcactgggtggcaggcaaccttcaatgggtgaatagacgttccttcaggcccaagtgcaggcagccaccctcgctgtaggtgtgtgtgtccgtgcctctgtcctgccaacgtgggtgcagcgcccgacccctccctgcccgtcctctgtgtcccaggactcgcggtgaagccctgagcatgggcttccattgttattttctgaggatagcttgacaggacaggggcaacctagacctagtggagcaggagtcagggtcagcgaggtggctggggctggactttgccggggaggggttcagatttaatgcttcgagcagtggaaagctgctctgggctcctgagcacaggcagggtgtgatcaaatcagtgtttggggaagtttagtctgggaacgagtatggcagtcagtttggcaaatgatggggagaaggcgcgagaagggtcgttggctgtgagctgaaaatcgacaccatttgcagtcgctgaaacctttgggtaatctatcacctcttcttctgctctttcctgtttgtctaatctagaagttctcagtttttagtgcacaacagactcatcgggaaacaggttaaaacacagactcctgggccccactcccagggactctagctcagcagaccaggagtggggctggggacctgcatttcgttttcatttcgctcctcagatgattccagtgcagttgattcgaggaccaagtttgagaaaacaaactcagctgccaggttccatctggttttggtcttttttccctttctgttggggcacttctttctgttctcatcaccactgctagtcctgacccctccatggtttccctgagccttgcccctcaccgtcc

SEQ ID NO: 34451 - DNA, 1048 bp, Homo sapiens
ggccagaacgcgaactgtgtcctcttgactttgcatttcatgttctttttcggacattctgataatttctattaattaataatggaaagaatttgaaatatatgtgagttgttttggttcccataagttacatatggtgatgtggcacctaatgttgtgcagattgcatgagtaaagaatccatttaacttttaaacatcaattatgaaatgataaactttcggatttacaaatattgttgatactgagtctgtagcgagttttggccaacgctctaagggttttgtttgttcttccttttgtaaaatgttgccttcgagtaacacaaaggcctgtggtctgtgaacactcagcgtgcaaggatttctttgtttttcatggactctgtgtgtgtgtgcgcgtgtgtgtgtgtgtgttggttgtgggggcaagaactaggggaaaagggatgccaaaaaatgtaagcatgtagtttttctccgctttgttgtgaaaacaaaattgataatgtaacttttggaatcaagtcttttgtatttagattggaacgttctaataccttattgttacaaatagacaatgtgtctgaaaagctgaatttttgagagtggatggattatttaaaataatgattcttaacccatttgtacaattctgtgttctgttacaaatgtcttttctttgtccatgtaacagtcaattcctgttctctgaaggaggaattctctcggtaatttctgagcccttctttaggtggttggccaccagggggcaagcgaagaatggcagaagccatctgacgtagccccttcatcactgcagataaactggtgatgctttcctgacacacttaatggcaaccagaggttttctgcacgtttgtgtttgtgtgtaagtgtgtggggtgagtgtgtggcagtggttatttgctgtattttgactgcataaaattgccatgctttcccctcggtctcctagaaatccttgtaggataattataacacaagaaacagatttgatggaaattctcataattctcatactctga

SEQ ID NO: 34452 - DNA, 1061 bp, Homo sapiens
cctgagaactcatttctctctttaggttgcctgacatttgtagctgagtgaaaccatggtgagcattgatttattttactataaaattatcagttttactcactcaaacaatccttttatattaaaaatattttaaaaataaaagcagggtattgttttgctttactaaatggagtcacctctttttctcttacttttgacaatttggttgtcaaattgtgtgaattgtgaaaaaatagccctgagtacagagaatttttacctcagggatatcaaaaaagtcatgttagtaataaaataagccattgattgtgttaaaactcaaggtgggtcatttaattgcagttattaaaaagttctttcattatttacctctgggagagactgtaggtaggactgtaagattattaatgaaaatgcgtgtagattggtttaaatgattcagcttcatctcaccaaggagttagcatgttcattcattttacaaaagtgtattgagcacctcgcctactatgtcttgagtaatttgttagacatacaaagttgactaaaacatggactctgaccccaaggctaaaatgttatttcacatgtgcacagtgctttacagattacaaatgacatcattacatcctcataagaatctcatgaagcagatgttggttccatttcattcatgatgaaactaaaacatagaaaacataatagtctccccaaggctgcctgtagcacagttccttagattcccaatcaggtgacctttccaaactgtagagatggctctataatagtttaaaaaggagagataagaaatgtccaccataggtaaatacaaaatagacagtaatacgtacaatcacagaagttcagctaaagtggtacaggagtccagaagacggagagatggcttctgggtaggggatggataaagggcataaggactagggatagggatggatggactgtgcactttcagggcaggggaagatcattccatccagagccggaaaagcttcagaaaagcttaagccaggtgggatatggcatgggaagaatggaaa

SEQ ID NO: 34453 - DNA, 1051 bp, Homo sapiens
gattaggaggggcagttcctgggatcccacggtgccttgctcatcgctgtgcccctgctctggcccattctctctctccctcttcccagtgttgtagggtgtcacatgctgccaggtcttgggactgaagaggtgaccaaagtgcctccgaactccagctcctaccgcagtagggcagatacagccatgaaaacagacaaatgcaacagggcaagatcacgacgctggggaggaagaaagggtgtccatcgggtgacattggagctggtcttgccctgtgacaggcacctacagagctcagctggcagtgaccaaagaggatgacagcaggcatttcaggggtggcagaggggactgggggcagtgggcagcctgggaagggcaggggccagatggtgggtgttggtgtggcttggcatgacagaggcggcggggccagggtatgaacaggcttacggagccatctccacccacccacaggacagttttgatgagacaaagcaaatggtgacgcacagaaggccagcatggcccttgcatgcagggaacttgttgttgaaaccaagataaatttctgtatttttatgattttgatatcacaagtcaaatcctgaaacccacatgtcactgggatgatccaaatgatcttaccgaactgaatggatttttttttcctattataccaaagactagaaagacttttgatatctaggactttattttccttgtcacaatattctgtatattaggatttgttcatgtcagttgcgtttactgacagattagattagattagattagatatttactgacagaatttcctggcagattagaatgtgtgtgtgtgtatgtatttgttagtatattaaaactagtcaaaaagcctctttgctgtttaaagataatatataattctgcaattaaatatctgtgtccctttaaaatcatattcttttttttttaccgatgtctacctatttaggatgtagttcactgtgaatttttaaatcaaagaaaataacttcttccagtttttgtaaagggagatgag

SEQ ID NO: 34454 - DNA, 1184 bp, Homo sapiens
gctgtgcagggtgccggctgcctcgcatttgctttgttaatggtgctgaggaagaaagaggaaatgcctcagcttctggaagctaaacaaagtggatgtctagcctgatggatgagtggagtttctgtatctcccttcaccgatagtccattcatccaaggtcctgctccttatatacactggtgtttaatgctcttactgtgggctttgcaggacctcctctttaaattttgtttttaaaagttcattgatgataattgaccaatagccaaattcccaaaacccgtgaaggaccttagtcccctttataacaatgtttgcgtggaaaaataagagttccagtgtcaacacgcatctcattgccccattacctgaaactgttggccgagggagggaaccctttcctggccccagcttatgagtctgcagagatggaggcccacataacagggtggacacgagggctctgagaagggtcctccagagggcgaaggttcagatggttgctggatggtgtaggcagatgcaagatcaggagggtgaaggttccgatggttgctggatggtgtaggcagatgcaaaatcaggagggtgaaggttcagatggttgttggatggtataggcagatgcaagatcaggagggtgaaggttccgatggttgctggatggtgtaggcagatgcaagatcaggaaggtgaaggttcagatggttgctggatggtgtaggcagatgcaagatcaggagggtgaaggttcagatggttgctggatggtgtaggcagatgcaagatcagggtcactaggattgcacaacagaaaggggggggaatgaggaaaggcctccttggagacaggccttgtacctaagagatgatttgacaatcgaatgtttctaagcaggggactacctggatttttcagtaatacagactgagaagaaattctgcctgcatgtctgtgagtccattgaggacacttagggacacaagagaaaggggaaaaaagctagtgtttgagcaataaccatgtgtctgcagctcctggcactctgttccagcaccgtccaggtgcagaatgaaaggcagccagactggaattaagcaagtagtcctggagtaagatgcaagtagtagtggggtaagtagtgtggtaagaaaaagaccaggtctttttcttctaagca

SEQ ID NO: 34455 - DNA, 1675 bp, Homo sapiens
aaaaactgtgtgtcccagcactgctaggtattattagcacaccaccctcaagattttaaaaatatgtccacataccacctaacctatttaatacttcgctttaacttgatctacttttgtatttaagtgaattaaagaaacaattttgcatttcctatgaaattatgggtttctctcgataattatatattttttctaatccctagtaaaatggacatttaattagttcagtaaaaaatattcaactaggtactacccagaatgaacccatgtacctgagcggtactcacaccatgtagtggaaaacctgagtaggccaagggaggagggatgggacaaggtggaaagggttatgaagaggaaagggagaatctgggagaacaaaggaactggccgttctttgtaagtggttgggtttaagaggtggaagaaaataaaggtgaacatggcgaaaccccgtctctacaaaagatacaaaaattagccacacttgatggcatgtgcctgtagtcccagctactcgggaggctgagcggaaggatcacctgagcctggggaggttgaggcctcagcgagccgagattgtgccactgcactccagcctggttgacagaaggagaccttgtctcaaaaataaaaataaaaataaaaattaaaaagctgcaactgattttgttgttgttggaagaatgcagtaaatgaccaggaacctgcagaaagtgagcagagaatgagttccattttgggctaatggtttggtattccaactacagagggctttcaggtgaacaataaaggcgtataagttgcaggtcatttgtgcggcagtgttcgttgtgaacacgagaatagcttggctttctgtgctttctgttccccttcttggaggggagcaggtgactgatttttatttccagcagaaggaggttcagttggattccatgaactcagagccctccttgggtttctgaaacctggaaactcgaggttaggattgcttggagattgtccgctttcctgttcctgaaagtaaagtgccctttaattcttggatttgttttattagtgttctcatctattcagaagccattgcattgttgatagaagggatatgtttttgatgtctatagtcaggtctgaaaacagagctctgcaagtagccgcacaaaagactaggccagctatgtaaataatgtatatttcaaacatctgtcatatacctatcccgttgaaaaattacggcttaggtaactcatacacacagtcaaagtctccatttatctttctactttaatccgtgatggcccctccaggccaagttttctttttctgaagataaaagagagagatttggcagatgcctgtgggcagtcggggtagcaggactattgcctggccttatccgtctgatggccgtagtttcagagggaggagccatcctctgcaattaacattgccttctcacccctacagattcctgtctggttggttcccctaagagagctaatatgccatttactgctttcggcatatccaacttttgctttgaaattgtctcgttattagagaaaacgaaggccgccagagtgactgaggtgcatggggtatttgtcttttttttttttcctttttggctgcccagtatctgaacctcttttcgatgtcggtgtcattc

SEQ ID NO: 34456 - DNA, 1048 bp, Homo sapiens
tcagcctcccaaagtgctgggattacaggcgtgagccactgtgccgggctgccttattcttaaaatcgcaataatgagacctcacttaccaggttgctattatgattaagtgagagaacatgtgaagtattgtctctgatacttagagggtgctcggcaaatcttagatctttctttctcttggctgtaatctatccattgctgaaacaaggatgctaattcctggagactataagaaaaataataagtgatatccactaagcagaggtccacacagtagtggcattaatagttttcatattttttttttagtcttctcatggagaaattgaagctattggtataataggtggggaaagcagtgttcacaaccactaatcaaacgaagattaggcactaaatgaagaggaagaaacaataagagaggagatctcagaaatgatctcaagttgtaaacactcaggagccaaattacaaaacaaatacacaggctaattttaaatcaatcactgtattaattctttaaacatggaaattcaaaggtagcattttttctctttttgtctttgattttaagaaactgcccttaaaatagtaatagtttggatgtgtaatttgctgtactttcttaatttaggccaggcgtggtggctcatgcctgtaatcccagcacttagggaggccgaggtgggcggattacaaggtcaggagttcgagaccagcctggccaacatgatgaaaccccatctctactaaaaatacaaaaattagctgggcgtggtggcaggtgcctgtaatcccagctactcaggaggctgaggcaggagaatcgcttgaacccgggagatgtaggttgcagtgagcccagatcgtgccattgtactccagcctgggcgacagggcgagactccgtatcaaaatcaaacaaacaaacaaaaactttcttaatttaaataccaatacactttagatttttgcaagatatttttatatttttagatcatatttttttgagtgcttgttgtttcaggctggtggtcttatccgt

SEQ ID NO: 34457 - DNA, 1031 bp, Homo sapiens
agtattgtgctatgaatacacttactttccttacacagccattcgttttgtctgcagttaatgattgcctttttaaaaaattgcatagattttaaaaaatagcctttaactttttccccagtgctcatcagaagtgccagattcccaccagaatttttttccccaagtactctagtatctcaggcaatctaggtattcctccctgttcttggagacttagctttgagagcgccctgtcctcctcctctgatcgggactagtagcttttaaggctggctaacagctgatatctgggagttttcttttcaccattcctgtgttggatcctctgtcttctaggccccatgtcttcctgttcctggatttatttcccgattttgctgggccacatctctagtagcttcctgggaatattaattttgggagtttgggagaggattgttctgttctgtgccttgcatccgcttctttaaagtttttttttttctagtttttgctttgttttgatctctggaggcactaaagtgttgcttggaagttctgtgggaggtgggcttatccctcgtgggcctgcctgcagagcgatctgtagaggataatggttgggcttttctcttgcgccagtttccctggaagagtctaccaggctccagagtgtgacagcagtccagagggagagtaaggcatatgatttttcacataaccctatttcattcagtaactgatttctcctttcagctatgcttggtatccctaagttaacaacctgtgggttaacctctccagtatataaaattgctgccgtctgcctaggttgagaggtaactgtattagatgaaggaataggactgagtgtctaaatgctccttagaaagttttgcaaacaatagttctgctttcagtcctgttttacacctcgccgttaacaatacctgaatttgagagactttgcagccttctttcctcccaccagcttttaatttatttcttgtgacagaaaagttacaaagtacatgaaaggaacactagtc

SEQ ID NO: 34458 - DNA, 1047 bp, Homo sapiens
cagggttttgtcggttggttagagaatgttttatcacattcataaatagtaacccaatgccctggaaaggttaaggcagtgtctccaactaaggtatgtgtcgctaggggggacacataccatagttgagttgggctatctggttcatcgtgtcacaaatgggaagcatgtgagcaagcttttggacagagctcaccgagctgtcatattgccaccccaatgtatttacccctcaaacagttcataaaaatttataagcctttaaaagcataaacaaagaataaaaacacatcgaacgacaagtgatggttgctgctgctgctgctgctgctgctgctgcatagaacggtggactctgccagccaccttgctttatgtgaggtcaggccaccggcatgtgaggaagctggatgatcgtcagcccagctacctccgttcaccaaatacaaggccagctagcaagaatctgtagccagctttgcagcgcttcacccttgctttattcttttatatattcattttttaatgttttagattcagcggtacaagtgcagtacccctaaatcttattgtgttacatgcgtatcttccacagtggtgacgtctgggcttttagtgtgcccatcacccagatagtgtacactgtacccagtaggtagtattcttggcttatttctacccctctatatggtttccgtttatatggctttgtaaagaaagactttaccaaagatacataaatgtgatagcatagctaggtttttaaataattggttcaaaatatttgtagcacaaaaaggatcttgggttgtgacttttaccaagatgttgattctatctcctggcacaaatgccaaagccagacagcttgtgctgagaccacagttggagaggcctttgaagtgggctggagtcctttgtctaaaacaaagcagggtgcggtgaccccatgaagagaaatccacctgttgatgagacaggcactttttctctataaacatttgattgttctgttaccttcatttctctggcagatgggttaattgt

SEQ ID NO: 34459 - DNA, 1069 bp, Homo sapiens
ataattcatatgaagtagctaaatcagggcttagagggaaatatggaggattaaaccctcatattagaaaagaaaaaaagaactgcaatgagcaatctaagcttctacctaaagaaactagaaaaagaagagcaaaacaagtctaaagcaagcagaaagaaggaattttataaagataagagtagatatcaatgaatttgaaaacaatagtggagaaaaccaataaaattaaaaatctggttttttaagtatatcaagagctgataaacctctagccagattgacaaggaaatatgacataaattaccattgtaaggcatgaaagagggcatatcactatagtccccacaaaaatataataagcaaacaccatcaagagctctgtgcacataaattcaacaatatagatgaaatggaccaaatcctagaaagaagaggctgccaaaactcaccccaaaatatccctttatatctcaataaattcaatgtataattagatctttaccaaaaactcaaaaatcaaaacctaaaaaactacaggtttggatggtttcactggtagaattctctgccaaacatttgtggaagaaatgacatcaattctgtaagatctttttcaaaaaacaaaagaggaggcaacatttcccaactcgttttgtgaagccagcattatcctggttaccaaaccagacaaagttagtacagtaaaagaaaactgcagaccaatgtctcttaggaacatagatgcagaaatccttcacaaaatattagtacattgaattaggcaataataaaaataataacaagtcatgaccgagtggatttaggcttggaatataaggcagcatttgaaaatcagtcaatgtagggctgggcacagtggctcacagctgtaatcccagcactttgggaggccaaggcaggcagatcatgaagtcaagaaatcgagaacatcctggccaacatggtgaaaccttgtctctactaaaaaatacaaaaattagctgagcgtggtggcacatgcctgtagtcccagctacgcaggaggctgaggcaggagaattgtttt

SEQ ID NO: 34460 - DNA, 1035 bp, Homo sapiens
gctaggtcagttcctggcttctgctgatttttctcccttcctccttttctggatgtgggtactcctgtctccctctggccactgggacaacgtcttatcctcctcatatccatcttgcagagagtggagctacagtagagctgatgggagccccatgtggtccagggaaaggggggcgttgaactgagctgggtttgggaagggggtgaggcctgagccttgggcactggagtcctgctgcttcctccgaggcacctgttggactctccccgtacgtgctgatctttgtcccaggccctgctgcctgatttcatcgagcaaaccatttctctcctagcccatcaaagcagcaagtttttccccatagggactctgcactcctcctgcaaactaggaactgtggctgggcatggctttaagtgcctgacagtgaggaggttggtccacctcagagcagccagacaccttgtcggggagggtgttgcttaatgctacaggccgacctgagtctcggttttggtcaaccatggtagcttattacaagcatgcttcagaaacaaaaaaggctagattatggaagtacatttaggaaatcagattagaaacttaacagaccctgtgagcccttctatgttctactgtgttgatagtttgcatcctcctcgtgtaggacatcttttcaaatgcaaccttggagaaccccaggtataaaacaggtggcacccaggtgtcaggagcgaactttcctgccctcccagcctctgcttctactgggggcacctccatcccagaaatattccaagaaattctagggatccttggagcatcacttgaaaatcactgactgcactgtggtataaagacttgagaaatgaagacagatatttgcattgtaggttgacatctcaagagtcaccgtccatcacccctccgatgcagggtcttcagcctctcctgcctccactggcccttttagtgtgcaggaggccacattctctgagggaattgtaatctgccttctcccactcctcccag

SEQ ID NO: 34461 - DNA, 1050 bp, Homo sapiens
acaacaacaaaaaaaaacaaaacaaacaaacaaaaagaactaacaatatccatgatgcagagtcatcaggagaattcgaaacaggaactgggatgcacttaattcaagagagctattattatgcagtagttgtcactgactaaaatttaaacagacatttttcttgatgtatttattatctgcaaggtgtaaaataactttctatgcatgtcattgaagctttgggggaggggtcattctagagctgctacggatccgggcgtgatacatgaagatgaatttcgcagcccttatcattagtaattaaaggtgtgtgagccaccatggatagtgtattagtgagcaaccctcatctttcagagctaatcttattttttcataccctatttatcttatttctgatgttcttttgtttctttttaaagtttctacttcacttatctttgaaattacctcaaatcttcctttggaagtgattgtatatgttaaaatgctgctctaataattgtcaatagctaagcattcttcctttctgttctgtggcttctccctaagacatacaatacagtactggttagcccttgctaactgatggtctcacttctgatttattcagacaaacgtgtgtgtgtgtgtgtgtgatttgtcaatgcatacaaaagtaatatataatagaacataacatggtcaacgctgatttgtcggtttcctacaggggagcaggtacttggatccacagcagagtgtggggcgggaggatgtgggggagatggaagggagaaggtacttggacccacagcagagtacgggacggaaggattagggggagatggaagcagagccaggggaaggaggacgtgtcctcagacgtgtcactgggcatcctgagtgggccagcaccagtcagaatggtgcagaggctgccgtttgttcttgctctcccctcaccccttctttctgttctttgtttcggggccccagtctacctgactcctggcctctgtttcacttttgtcctgtgattgggaccccctggtctgcacttcagca

SEQ ID NO: 34462 - DNA, 1023 bp, Homo sapiens
caaaacaaggagaggaaactgcgaagagccgcggctggaaatccccccaccccccgccctcctccggccgcgctccctccctcgcctcccctctccgccctcctccctccgcccttcctccccagtgtttgtttcaagcttgtgcaaccgggaggtggaggcggagggagggcgcgagcggcccggccgggaggtgcggaagttcgccgcagcagctcattggcgggcagcgccgctttcatcatttctcggaaaagtcaatttcattttcgcttccccaggtcgcggcggcgggagcaacaagcagcggctcgtgagtccgcggctcgcacccaggggcgcccgcacgtgcggctagaacgtccgagtcggggtccggggcggggggcgcaggcccgcggcggtaggggaggagagcgggcacccgagtctccatcctcagggtggcctgaaggttccaggagggcgtccggcgaaggcacggggctgcgaccatccagttagcagggctggtgtgactgttgagagtaaatgaaaattcgttttgtgacaccgaccacctccaaggaatgaaaggagcagtcagccgaaacgacagcattacttgcgtccttacctaattggaaccttatccgtggctgagggtgccaccattggaggggccgccgccccctctgacaccacctggcgctccgctccatttaggagctagaacgaaaaggaggcccatcccccagtaagtcacagcccacgccaagatgagttctggagcctgtgcgaccgaagtttcttcaccgcagggcgaggtggacaagggtgtgagttactttgacttcaagacgtctcagtggcggctggttctggagagaggctttatgctggagcacttccagcaaagttcggctggggcctccttaactcactggctggtcacccttggcctcggttttcaaccaaagcctaaggcctcagttttcaacgctgtaaatggaaataaatgagagaagaaagtacagcccgtgt

SEQ ID NO: 34463 - DNA, 1062 bp, Homo sapiens
atgtacattttatgacagtaaatgataacttagactagccatctacatatattttatgcattcatgacacacttaactttttctaattatttttaattattttctaacattttccaatattttaggctatacggttcatctgtgagttttctcaaattgttgtaagtccccccaaaattttccaatatccttattgaaaaaaatttggctcatgcctgtaatcccaacactttaggaggccaaggcaggtggatagcttgaggtcaggagttcaagaccagcctgaccaacgtgatgaaaccccatctctactaaaaagacaaaaattagccgggcatggtggtgcatgcctgtaatcccagctactcaggaggctgagacatgagaatcacttgaatccgggaggcagaggttgcagtgagccgagatcataccactgcactccagcctgggcaacagagtaagactcagtatcaaaaacaaacaaacaaacaaacaaaaaaactcacatataagtggtgccatgtagctcaaacccttgttgttcaagggtaaactgtagtgtgtgtttgtggttgcctttgtacccttagttgtgtgtttgaggaacataagtcattaaataatagtagtagtctgattttatcagtattttcctctgtggtcagtgtttcttgcatcttgttaaagaaacgtggcctatcccaaagtcattcttttgcttttcttccttatcttctaaaaacttattgttctgccttttatgtttatgtttaatttattattttttagagacaaggtctcattctgttgcccaggctgaagtgcagtggtgcaatcctgccgccttaaactcctgggctcaagcaatcctcctgcctcagcctccccagtagctagaactacaagtgcatacgaccacacttttaatacaaatcaatctttcttccctcccctcccctgccttcccctcccttccctttccttcccttcccttcctttctccttttccttcccttctcctttcccttcccttcccttcctttcccttcccttccccct

SEQ ID NO: 34464 - DNA, 1073 bp, Homo sapiens
gttttttaaccgtggaatatatcatacatacaaaagtatagataacacacttttttttattttctgagatggaatctcactccgttgcccaggctggagtgcagtggcatgatctcagctcactgcaacctccgcttccttgattcaagtgattctcctgccttagcctctcaagtagctgggattacaagtgtgtactaccatgcccggttaatttttgtaattttagtagagacggagtttcactatgttggctgggctggtctcaaactcctgacctcaagtgatctgcccgccttggcctcccaaagtgctgggattacaggtgtgagccaccgcacccagccgataacacacttgtatacgcacattttaaagactaaagtgaccacctgttgtatctgccgcccaccttaacaaccagaagctgatcaaacctcagaagcacctgtgggcccaaccccaatttccttctctccctggccctcagagatggtagccagtatcccgattttgtgttcatcttttcctcgcttttatgatttctcccatatacgttcatatctctaaacaatatactgttttctttttcttttcttttgttttttgagacagagttttgctcttgtcgcccaggctggggtgcaatcgcacgatctcggctcactgcaacctctgtctcccgggttcaagcaattctccggcctcagcctcccgagtagctgggattacaggcatgcgccaccatgcccagctaattttttgtatttttagtagagacggggtttctgcatgttggtctggctggtctcgaactcccgacctcaggtgatctgcctgccttggcttcccaaagtgctgggattacaggcatgagccaccgtgcccggccataaacaatatagtgttttcttttgcttgttttcgaatcgcatcctctcccttgccttgcggtagcatatctgtgattttcacccacgttgcagtatgtagctgttgcttatttgtgtcactattgtgcagcatgccatgtgtataaatataaataggccacagtttatctgttttcccac

SEQ ID NO: 34465 - DNA, 1057 bp, Homo sapiens
ccttcaccaccaccacccccaccccaatcacctttaggtattttctcccctaaagcctcacctgttggcattttacatctttttaagaccttattttgtattttaaatgtatgagaaaaattatggaggatgatgcaagatgagtgagtccataatggtaataattggacactaaaaacaatgaaaacttgtctcaagtatttgtgttgaaatctcaattaactgggcgactgctcccgttccattttattctgtaaaatatgtggcatcctttgtgttgaggcggcatttactaaacacccccaaggtgcaaggctgcaagagaatcgagcgccgcaaggcgagcttatcttccacacctggtacagtgcccaggacagagaaggtgtttagcaagtttctgctgaatggaagagtgagcgagaagggaaagtgcatctaaaaagcacagggaacctacaaaatatttgggaaagggtttcatcagttcgggtgaaatcttgaacgtgcaaagcaccatgggggtggctggacaggcttgttggagtcgtataatgcaatgaataaaaacttacggctgccttaaatgcaaatgtcaagcccttaaataaaatttaacaaagtctaccgtgtcacaaattctttgcttttctgctcctcctcaatatcagagattttatcaatccacaataaagtacagttgatctcattcacagattacatatctgtaaactggcttcactgccaaacttcatttgtaaccactttaaggtccttggacacacagaatgatgacaaactcaagttgcctgacacacatccctagctgcagtggaacaaggtgacacttaccccgccttttcatttcagcctcatcctgtaaacaagcatcctgttcacatgtttacttcgtgctacagaaattctgctgtttaaaaaggccctcaagctttgtgcagtggccaaaatgcagtttatccaaggcacaatcattgccaattaacatggcccccaagcagaatgctgttcctcagcacaggagggctaagacatgcct

SEQ ID NO: 34466 - DNA, 1072 bp, Homo sapiens
gataaaaagtgagagttaatgaagctgtgtgaatggagacaacagacagtacattcaaaagtgagtgagacttttctttgatacaattctcattatttatcattacaataggttcaagaatattctcaggagggtcctaacattccttttaaacaataaattcaaccccaaaccaaaggatcccacaatatatagcagcagatgtatcctaggaaagtcttccaagttgaatgttctacttggcaccttcttaattctggtcattcccaggggatttatttctcactcttgaatcttcagctgcttttgtttttgaagcatacgatgtcacattggtaatggtaattgactgttgccttcctaaaaatatcttaggcttcgtttcccaaccatatcattttggggataggaagtgccctagattccttaaaatgtaggattctttatagtcagaatggtacacgtggttgtgctaaaaaggtgacgcagcaagtttggtgccgagcgttcaggacacagaaaatgcacagtgtctgtggaaggctgttaggactgaaataattgcataccaccttgccagcatttttaacattgcaactgtacttttgaaggaaaaagattgcaaactcagaacctgtatttttatccttcactgctgtaggtcacctatgccacctaggttgcttggttgaatggggatgacaggtaggtaggcagcccttcgcaggggcactcctggataccctaagggccgggatttaggtctaagtcacaccctgctttagtctaggagtgtgtgcttctatagttttttgaggcggagtctggctctgtcacccaggctggagtgcagtggcacaatcctggctcactgcaacctctgcctcccgggttcaagtgattctcctgcctcagcctcccaagtagctgggattacaggcgcccgccatcaagcctggctaatttttgtatttttagtagagacggggttttgccatgttggccaggctggtctcgaactcctgacctcaggcgatccgtgccccttggccccagaaagttctgggattac

SEQ ID NO: 34467 - DNA, 1028 bp, Homo sapiens
gactccatctcaaaaaaacaaaaaaagaaaaaagaaaaaatgttttcttcttatggaagctaaggaacttatgcccctccttgcatctcctgtgaaggcagcatcttcttttttcttgtggcttctctccatctggctcagactggctgctgggatcaagccaggactttctctagtccccaaccttgagctgctacacataagccacctcccacaaggcctcttcctcttatgtaaatcaactcataaaaatatatacccgagggctgcttgcaggctgccaatttgttatacatgaaattaacatcttaactgttccagatatttccatgtgtttttcctgaagcagagttgttaatcttttttttttttttctgatttttttccatttcactgaacctttctttttttctgaaactgcaaccgctagatagctcagaaagttggatgtttcccagatttgcatttgggtcattcttgaggtctcattcttcattctgttactttagggcagtctcaactttggcctcctacaataatcatccctgtctatattgaggacttaagagatttattcctgaggttcagatctagttttgggcctcagacttatttattcaactgcttaacttgacatttccacctggcagtcccagtggtacccgaagcttgagtctgtgacatcttatgaccagtgtctgtctctgttcctcttgtttctttttttttctttaaattttattagtattatactttaagttttagggtacttgtgcacaatgtgcaggtttgttacatatgtatacatgtgccatgttggtgtgctgcacccattaactcgtcatttagcattaggtatatctcctaatgcttgttcctcttgtttctgtgtcagtgaatagcacctctgaaagtcaggtcccacaactgagtcccttttttttttttttttgagatggagtctcgctctgtcacccaggctggggtgcagtgtgcgatcgcggcttactacaacctctgcctgccag

SEQ ID NO: 34468 - DNA, 1032 bp, Homo sapiens
acagagctagctgggatggtgccaggctttctttgacaggagagccagccctcttgatctctgtgctctgctgtctcataagggagaagcagcatcgcaaaggtacgtgggctgagtgctgaggagttaagggccaagatgtgaagttggaggccatgaaagactagcaacgcccgcggtgtggttgtggaatttttgtaggtggaacactaacactcctggagtgaagcagtggagatctcatctgtgggcgtggtacgacagagggccagggcacaagaatgtttaatgagagctgcccacacctcatcaagccaagggaggagccgaggccgggaggaagctgagagcttggagagaagggaagggtcagaggcctgcgaggcctcctatctgctggcatgcaaaagccttccatgtggccgtgagaatgggcgagcgccgtggagtggagatgagggttgctggaggtgaggaggtccagttgcggtgtgggtggaatctgccccatgttctatgtctgttgtcttttttctcattgactgaaggaattgcccccagaagttctctggtaaaatgttaaaggaagattgcattatccattattaaatcagagggagttgaggaggctgagggtgggtagaatgggtgttgccatctgttgatttgcccacggctgtctctgggtgtgccagcgtcattcaggccattctcttgtggctgtgctcaggcacagttttgctgactaaacgctacagaagtcaggtattgggaaggagaattgtttcttctttagaggagtaggttttaaccatgttaaatttccaagaatgggtttatttatcgcctctacatagtgtagaccattccaggaaaataaatgatttttgattcaagtactatatttatttatttatttagagacagggtctcactcctgtcacccaggctggagtgcagtgatgcaatcatggctctctgcagcctcgactacctgggctcaggtgatcctcccacctcagcctcctgagt

SEQ ID NO: 34469 - DNA, 1085 bp, Homo sapiens
agcaagttacttcacttctttgagcctcaatttcctgaagggacgaaactcacttactatgtaggaactgtggtctatttgtttgttgccaataaatgagattataggatcaacccattcctgtttttgcagtttcatctgggtcagaaaccatttccgctgtttttccttaatggaatagtaccattagggatgagatgtagctactttttgcaaaatctagaaaacataacaaccataggttcaaattaatatctgaaaatgagcagaacgtgactgagagtttcatgtgccttgttttctggttttgcttttgttttaccttcctttttgtgtccagtgcttagtgatacggatattgattccaccttacagactagaagccctctatacattttatttgctgagtagtaaaagattgagatagatcttttttctgtctttggcaattaattgttctcagctggaaggcacagttatcttatccctacaactgaggctgctggaatcactctgaaaatttatctaaacctttgtgtcattgtttgtgaacaaaaatcctaatgctgttgcatgtttttgagttatgaaatttaaaatgctgttttataaattgctataaagctgaattgcaaaaatactggaaatgtgaaaaaacattgaatatacttccatggttgatatttcaaccatgaaaaaagccatcatagaatattaataccaaaattgtgcttcctttgacctgtgggcacttgcaaatatgtgattccattgccattcagttttctaagaaaaatgactctccctctccccaccctccaatccctccccccagagagctcacctaaatttctttttttttttttttttttgagtcagggttttgcttgctcacccaggctggaatgcagtggcgctgtcttgactcactgcaacctccacctcccaggctcaaatgatcctcccacctcagccccaagtagctgggaatataggcgtccaccaccacacccggctaatttttgtattttttgtagagatggggttttgccatgctgcccaggctggtctcaagctcctgggct

SEQ ID NO: 34470 - DNA, 1027 bp, Homo sapiens
agtcctggtgcagatattttgattctgttgggttgggaccgtgttctaaatgagaagcaatgaggcgctgcactcaggcagggcagtggggctgcaggggagagggcagttctgagaactatttaagacggcaccatccagtagaactttctacagtgaagaaaatgttctacttggcaccgcccggtgtggtccacaagcccacaggtaccgtggagcatttgaaatgtggctagtgtgattgaggaactaaacgtttattaatttaattggatagccacatgtagctcatgatcaccttattagacagtgccaatgtaagaagtagaatcagctagctctgctcacctaggattgtggaggagagggaggctgagcataacctcagagtttctacaggtagttatgcttctggtatagggaacagagtggaagtgaggaggctcctgatgtttacgtgagggcctcagaatgactagcgcgtggcatggggcccggcctattgtagatgctcggtctatgtcggattattttatggagccttgggcaggattcacagctcctgtgttacatttgtttagtataaatacagtctaaagttatttctgaaaatagtattttcttcctcttaaatctttttcttttctctttttaaaaatcaggtatcaaattgtagtggaaataatccaggcgactacaattagcagctttccccaactgaagaggcacaaaggtaagagccaggttgttttcttcagttccacatctgaaaggtcagcttgatccccggccttctcccacctgtcagatctttggcaaataggagcttttctggcttacatttaaatatttcaatttattaaaaacaatactattacagtattagagaagtaaatataatttcatcctaacaacaacctttgtctgtatttctgtattcccgtataaactttattcagctgcagtcataatttttagaaggctaaaatcattcagtatatgtttctgttctgtttttaaactaaac

SEQ ID NO: 34471 - DNA, 1029 bp, Homo sapiens
tgctcaccctctttctttcttcctcagccccaaattctagaaagaacacaatacctgatacatattagcaaaatgtaccatttgagagttcattgatccattcaactcctgtttaatgagcgtctcctttgctgccaggcactgttgtaggtgctggggatatagcagtgtatacatagataaacacctacttttatgaggatatatttacgatctcccttgtcagcttctcttcccccttactcttaagagtaaggtttatctcagttgtgtctaggattatttgtttcctcctgggttgtctcacacactcccatgatgtcatttactatcccagagctgaatgtttccgaactctagaccttctctctccacctaggtagctcagaagcccgcagactcattttgcctgtttggttgtcttttactgtgtaacaaactaccctaaaacatagtgtctttaacaacagccatttattttgctcatgaagctgcaatctgggcagggtttggaagtaatgactcttctctgtgtcacgtgacgtcagctggagtggcttgactggggtgggacggtttactttcaggatggtgtactcacacggtgcctcattggtgctgaatatgagcttgagatctcagccagagctgtggttcggggagcctcggttcctctccatatagatctctccaaggactgatggcttaggcttcctcaaagcatggaagcctcggggcaggtgagccacttacatagtgacccagagctccaagcccttggtcttttatgatctagccttggaagtcatagcatcactttcgtcatattcgtaaccccaaccagattcaagaaaaggaaacatattctactttgcagaggcagattgtcagagggacatcgtaaaaagagcatgtgagatggaagacattgcagccgtttttggaaaatatcacctgccatattgtccagagttgagttagcatcttccacaaacctgctttttctccagtgtttctagcttagtaatt

SEQ ID NO: 34472 - DNA, 1053 bp, Homo sapiens
caggaaaagagaaactcatttctgttgcaataattcatcctcagagtaaaaccatttcctctaatcttcaggatggaaggctaagataagacagaattccaatagttatggtcatttgctatttgaaaggtaagactttggttagtttggggccattctgatgtcttcatgagtgggaagaaaacttttgctatgacctaatcatatgtgatccagaagaattaccattaactttatttcagaatttagacttccaaatcaggttaatcctccaattaaaagaaagattcagagtgaattttttaaaaggcaaggcagttatatgttgcttacaagaaactaaacataaaggcacagataagttggaagtaagagggaaaaagacatgcgaatactaagtataagagatctagagcagctactgtgaatatcagacaaaatagacttcggaacaggaagtagaaccagagatgaagaacctttcattatgataaaggagtcagttcgtcaggaagatagaataatcaaatgttctcaatcaataaagagacctttagagtgtacatgaagcgaaacctgacagaaatgagaaaaaatgtcacaagtagagttggaaatgttaacagtccccctcagtaatatcagtaataggaaaatctggaaaattcccaaatatttggtagcatatctaaataaggcttccatcaaagaagaaattataaggaaaattaggaactattttcaatggagtgaatatgcaatatatcccacaattatttgtgggatacattatgatatgtatattgtgggatatattgtgcagttaaagcaccacttacaggaattatgtacagttggcccttgaacaatgtgggggttaggagtgctgactctcccctgagcaaaaattcacatataactatggagtctccaaaagcttaactgcccatatcctactattaactggaagccttaccaataatagtcagttaacacagatcttgtatgttatgtgtattatatactgtactgttagaataaagtaggctataa

SEQ ID NO: 34473 - DNA, 1032 bp, Homo sapiens
aggaatgagatcatgtcctttgcagagacatggatgaagctagaggccatcatcctcagcaaactaacacaggaacagaaaaccaaacaccacatgttctcactcgtaagtgggagctgaacaatgagaacacatggacacagggaggggaacaacacacaccagggcctattgggggtgggggcaaggggagagaacttagaggactggtcaataggtacagcaaaccaccacagcacatatatacctatgtaacaaacctgtacatttacttaaataaataaatagtaaattactacaataaaattttactttattcctttaaaaaatgcatttttaccctaaatgtagaaatcagtccattggaagttaaagcaaactgacatttaaaattcgattttaaaaaaagttttcttaaattctcttaatagattcttcagtttgaagatatcttggccaatacgttctaccgagagcactttggaatgtacatggaaaggatggacaaaagagctctgattagtttttgggaatctgtggaacatttaaagaatgctaacaaggtagtatatgtaggctgaaaggaatattaatcactagctgatgtaaacttggcatgtgaggcagcatgtctgtttttctcaagataagtatacattaaaaatattttaaaccaaatataatactgacattatgttctagcccataatggcaaataaaattacattatatttttacagaagattcttttgaatgtgtagtcaagggaaaaaaggttttataaatgtaccaagagattgaatttagttttgggtattttttttacacattgtaaaaagacatatacatatccacattactattataatgaatttggccccctcacctacacttcagtctcataatcttgccatttataatatcataatgtgcatgttttatactttgcctttcatttcaattttttttttttttttttgagacggagccttactcttttacccaggctggagtgcagtggggcgatctcgg

SEQ ID NO: 34474 - DNA, 1033 bp, Homo sapiens
cgagcttggtagtttgctttttgttctcacaagccatgctagatgctaaaaaaatatcttgggtgttttttttaattaaaggaaaatacacatataaaaatacacgtaagtgtataactgtctccgtttcacaaactgaacacacccatgtaaccagcacccagtccaatgcactggttatcaccagcagcccccagcttcctcccatcgctgcagcccctctaaaggcaactgctgtcccgacttccagcaccatagatcagttacagttgtctttcaactttatataaatggaaccgtatagtgtgaattccttcgtttctgacttctttcactcattatgttcataggactcatccatcctgtcatcttagttgtagatgattcattttcgttgctgtgagaggttttcatcgtgtgaatacactgcattccaaattcattccgttgttgatgagcctttggctcctttccactctgaggcttttacaaagggtgcttatataaacgtctagtacttgtcttttgacaaatatctgtcggctgatgcccagagattaggatttctccatttttcttcatggtcacagcagttttatactctccccagcagtgtgtaagggttctgattgctccacatcctcaccaacacttatcttttgcgtttttattcttagccattttgggtgtagtagtatctcattgtgtttggggggtttggtgtttttttttgttttcttttgttttgttttgttttgttttgttttgagacggagtttcgctcttgttgcccaggctggagtgcaatggcgcgatcttggctcaccgtaacctctgcctcccgggttcaagtgattctcctgcctaagcctcccaagtagctgggattacaggcgcctgccaccacgcctggctaatttttgtatttttagtagagacggggtttctccgtgttggtcaggttggtctcaaactcccaacctcagatgatctgcccacctcgacctcccaaagtgctgggactacaggcgtg

SEQ ID NO: 34475 - DNA, 1042 bp, Homo sapiens
ttttttgaggagcctccataccctttttcataatgactgtactaatttacaatcccaccaacagtgtacaagggttcccttttctttcatatccttgccaacacttcttttcttttgtctggtgtgagatggtatctcctggctttgacttatatttccctattcatgaggttgatcattttttcatatacctgttttccatttttatgttttcatttgtgtctattcaagtcctttgcccactttttaatgggattattgtgtgtgtgtgtgttttgctgttgaattgtttgagttgttttccttcatttgaatataatttaaggccaaagatttacatctgtaatgatttccctattaatatgctgattgtattaagtttgggacttaaccattagtatatcctgctattttgtaaaatgttagagagtagatgagtgaaggacatcaagatgggggagaacatctcactactcctgatccatcctcacatacaggttgaactgaccatttaattctgaaaaacgaatgaagactgtctgcagggttcagggacagggagggcagtaggggcactgcccatcccccttaatctccttctcaatggccatggcagggcctgcccacctccaggccagtctcctgcagggtacgtgaatgctgatggtgttccgtggaccccttgtccccagcggggcagtattgggccctctcagaggtgatttttctagggagggtcatagcgttcgtcaggtcattagccatctaaacaaataggatgttgccatcatggaccaacccctctggaactagacctgaacttccacctcccccacactctgtcatcagaggcatagctggcttctgagtgttccatctccctatgtggctgacagttcttataggtttacatattcctaagcccagtgtcttataatactagatgtgtaaatattctgtggtcacattgttaattctgctgtcttaccatagcacttgtacatagacaagctcgatttatgttcttctttactctctccta

SEQ ID NO: 34476 - DNA, 1054 bp, Homo sapiens
aagctgaggtgggagaattgcttgaacccaggaggtggaggttgcagtgagccaagatcgcaccactgcactccagcctgggtaacagcgagactccgtctcaaaaaaaaaaaaaaaaagagccaaccagatactatgctatatatacaaccccaagacagatatcatctctgtcctaacgtaacatagcgtcctgatttactctgccccatgttcctctgactacagaaggttagaatccttcacgttgctttttatgtgacttggcatagcttccattgccttgtcactaaaagttatacagaaaactgttttgcttagcacagaagaatcctgttgttaaaggtgagtgttggtgttaggataattccatggccaaggacgtgggaatgcctccaccctatttttcagctaccttttttcctcttgagcagtagttcttcatggagggaaggagggacatatggtgatgtctgaaaatgtttttgattgtcttaacttggagtgaggggtgctactggcatctagcaggtagagtctgggatactgctaaacattctactgtgctcaggacagccccgcggcagagttgtcctgcccccaatgacagtaatgctggagttgagaaatcctaccctagtgaatcctcaaggagagatgtacgtagaagaaaccattgtaaaatggggatcaaagttccatttccttaagagctatacaagtgcctctccctgaaagcatcaccttggtgaaaggtaaactggactccatggcttagtgttgagcgttgaataggacttaatgctactctccgtccacacattcacagctcccaacactctaaatcttgacaccagtagactttgtcatacctagagcctcagtaccagctagagatatggcaggtgcccacgggcacacctgaccacctcgaagaggaagcaaatgagaagagcaagggttagtaagactcagtagtggcaccagccagccaaatagtgcagcgtccatgtcctgggctctgtccgttcacatcagcaccttttcccttgag

SEQ ID NO: 34477 - DNA, 1133 bp, Homo sapiens
ctgggattacaggcgggagccacctcgcccatcctcccttgacttttgatatcacattgccgcataactggttggttttcttatttcagcaaagccaactgtttcccagtcatctctgattatagttaccaatattaaatactgtttgagagttacttgtttactgagataatttcagacctaaaattagacttttctcttagatgcagatatttattttgaataaacccttggagaaaaacatttttccacttttttccttctttgttggttcaggcgctgatggaactgctgctaattgaactgtgtcctgagctgagagttcatttagatcaacttaaagctggccaagtttgagactacacaaataaaccaccagaaaaatgtctgtgtaataatagacatgaaacattttcctcttttccacagagggcttaactgagaaccgtattgatttttattttagttacctccctctagttttatgtgaaattagtagaatcagggaggacgggacttatgctgtggtaggcaacagaaaaaaacttctattgattttaatttaatatgaatactttaaagatcaacataccgattgaaatacaaatgttaatatgtgagaacctaggaagtattttaaatatttatgaaaatattttgttttaaaatgaactatgaatattgtacagttaatttcctcactgaggactgtgaacattcttatattatttcatgtatattgaagaacattgttatgcaatgctttgtgtaaagttattgtgaagattttattgtctttatttttaccaaagatttcccatagtttgagcattcaaagcaataaaatataaaaatgaatcacagtgctctatgatatttaagatacttatatctcaaagaggttgaaactctacaggctgttcaaatatttatcaaatgcctttttagagaaaacactatgtacttaactacttctgcagggaagtaaaagtttgctgccttctccagaaacaaaataaatctgtaaaatatatgatttttagtgagcagaaagagccaaattagtgcttgaagtgaggcattagggaggagagatgggagctgacccttggagtatgggcagggccgagatg

SEQ ID NO: 34478 - DNA, 1047 bp, Homo sapiens
aatgttatccttaagatttttttagttatagcttttttatccttttttcaaaccatgatgatatttgacacttaaaaaaatacccaaagttggctattgataaaaattatccttcaaaagactatatagaaaagaccagataaaatacattcaaggaagagaggcaatgtgaagttgtcaagcctgaagaacttatcacaatacaattatgggaaatgtctattttaggcataattctatgctatcatttaaactgtagctgttaagtttacattgcgaatgagaaagatcactattattttgtctctatatttatttatgataaaatgtcatttttccatgagatatcagctacaaggaatcttagagaaggagtgtgtgtgtgtgtatgtgtgtgtgtgtgtgtgtgtgtaagagtaatgatctggaagtctcaatgcactcgagttacagactcaccgcagtctcaggtcaaggggtttactactgtcctcagcagtggtagtttgcagggactcgcttgtgccagagcattagctttatggtaactagagtaaactgaaattttaaattctgcattggatttatagaagacatataagcatagcatgttaccatgtatggcacacgtcaaagtttatgatttctgaaacccatctttaatggcagtttaaaaagtgctctttacttagggccgatcttttattatgttcctattttaagattctttttatttttttttgagatggagtctcgctcttgtcaccgaggctggagtgcaatttgcgcgatctcagctcactgcaacctctgcctcctggtttcaagcagttcttctgtctcagcctcccgagtagctgggactacaggcgtccgccatcacgcccggctaatttttgtatttttagtagagacggggtttcaccacgttggccagcctggtctcaaactcctgacctcatgatctgcccgcctcagcctcccaaagtgctgggattacagacgtgagccactgcgccgggctaagattaggtcaggagactccgt

SEQ ID NO: 34479 - DNA, 1065 bp, Homo sapiens
ggataggatagaacctgaaatcggcttggtttggaaattgatgtaatacagagagctttttttttttttttttttttgagacagagtcccaggctggagtgcagtggtgtgatctcggctcactgcaacctctgctcccaggttgaagcaattctcctgcctcagcctcgcgagtagctgggtttacaggcacacattgccatgcctggctaattttatttttcagtagagacaggattatttagtatttttagtagagacccagtttcaccatgttggccaggctggtctcgaactcctgacctcaagtgatctgcctgcctcagcctcccgaagtgctgggattacaggcatgaaccactgtgcctggccagtacagagaacatttaaatgaaaaaagttagacaactgttattcatgctaagaatggtgtagaggtaaatatcttaaagatcagttgcatttggctgtgtgctatgtgtctatgtttatgttttaatatggctttgatgctctggaagttttaattttaaagtaatttagggttcccaaacttacctgacattggaatcccacagggaacttcaacaaatacgcttctgtctcctagagaccatgattgaaattttctgaaataaggcctgaactttggaatttgtaaaagatcctcgggtgattttaacatgcagagaagcttgggaaccactgctgtaatatcagagtcagccaagggactcagaagactcccccactcaggctgaacaatctgtgttccacaaacactgctctaccaagtctgctatgatgtaattctgactcgtggatgtgatggacctaagatgtgcacagctttttggtttttctttttttaaaaaaaatctaaacttaagagttagtactcataatgatctcccttacaccccctccactaccacaccccttgctttttagtatttactttgagatgtgaaacgcatttgggatctaaataaattgatcacatggattaaaatatgaaagacttattttaactgattacctcaaactcaaaaatatcccgcctaa

SEQ ID NO: 34480 - DNA, 1033 bp, Homo sapiens
ttctttctcccaataaggctgtgaagtgtccgccctctgacacgatgtataatactatgaatctgtgcccaaggggtacaattgtcctggattctgcagggcaagcgataaggaggaaaagaatctctaaaagtacatctcctactcaggcactcccaggagctctgggatataagaaatttccttccttttacagctgcctgagttgatttaagtctcgatatgggcttccttttttctctcctccctcccatctaataacccttatcctgaatcagcacagttcttagaactggctaaagtggaagaatggccaggaacagctttcacatttataattcttacgatacacttgcgagcccctaacaaacaccgtcttccattcaagcatacttttactgtgtgctcatagtttgtatctaatatacaaatcttatgcactaatacgacatctgctacgtggtcacaaggaaagcatagaagatattctaaccactagcaagaacagatctgtaccctccacccccaaatccatcagacacaaaccttcaaacatcacccaaaagaagaaaataatattggacaatcaaatatattttggtttttgtttgtttgagacagagtcttgctctgtcacccaggctggagtgcagtggcatgatcttggctcactgcagcctcccaggtagctgggaatacaagcatgcaccaccatgcctggctaatttttgtatttttagtagagcctggccaacatggtgaaatcctgtctctactaaaactacaaaaattagccaggcgtggtggcagtgcctgtaatcccagctactgtgaaggctgaggcagaagaatcactcgaacccgggaagcagaggttgcagtgagccgaggtcgcgccattgcactccagcctgggcgacagagcgagactccgtctcaaaaaaaaaaaaaaaaaaaaaaaaaaaaaaaaatatatatatatatatatatatatatatgtatatatatatgtattaaaatataaataatttta

SEQ ID NO: 34481 - DNA, 1050 bp, Homo sapiens
tacttttttttgagagggagtctcgctctgtggcccaggctggagtgcagtggcacgatctcagctcactgcaacctctgcctcctgggttcaagcgattctctgcctcagcctcccaagtagctgggattacagatgtgtgccaccatgcccagctacttttttttttttttttttttttgtatttttagtacagatggggtgtagccatgttggccaggctggtctacaactcctgacctcaggtgatccacctgcctcggcctcccgaagtactgggattacaggcgtgagccaccgcacccggcctgataatataatttgtattattaaatattttgagcaaaaatataaaaatttgatttttaatctatagtgtgaaatggattttatactaaaacgactcccataaatggctttcatgacatggattttatgaagaaaagtcaggtagctcctcaagctggcagcactgtatcctactgttaaagccacagccatagtcgatgtaattggacagaatttccctagtataacacagtaagaaactctacatgaaatttttgtctgaggatctaacaacagaattacaggaaatgaaaacgaataaacaaaaaatgatacctcttcaaaatatagttgacctcgtaggaaatatgccagagtgtctcctttcagtattctttccttcaagagctgcaatgccttatccaccaaattagcatgggtgtaatctgattttaaaaaggtaaggaattccatcaaccacacaatatgaattttctctcttgaagtaatgaatcatataaaatccatctaacactgttgacattcttgctttctagtgctcattcctacaactggcctccttagctcaaggaagaaatattacctgaaaaaacgtcatggtcacaggccctaacactgtgccttgtgtaataaagcaatactggccgggcgcggtggctcacgcctgtaaatctcagcactctgggaggccgaggcgggtggatcacctgagtttgggagttcaagactagcctgaccaac

SEQ ID NO: 34482 - DNA, 1057 bp, Homo sapiens
atgttggccaggatggtcttgatctcttgacctcgtgatctgcctgcctcggcctcccaaagtgctggcattacaggcatgagccaccatgcctggcccaaagttctagaattttttaaaggtattcatggtgactcaggaatacacacatacacacacacacacacacacacacacacacacatacacacatataatttgaaagaggtgagtatgtactctgacttcagctctcaggttttaaaaattatattagtgggaccagttatgacaagaataatcattatagtacttttcagattttataacctggagcagattattttaagttgattagtaggttctgttacagtttttcttttgatcgtgcacttatagtcttcatttaattcctcatagaatcccagtcacctttatatatcatattattggaagagattcatcttcataatctccagttttttcacagtgcctcacagagttaatcatgccttttggagctagaaggactttagaacttatctagttatgctcctttatattataagtaagggaatagaatcaataagacagtttctgcccaaagtcatgttaccagttggtgacagagctggaaatacgtagagatctatacccttaaatctctccactcacatgctgatatactttctactacaatatgctatagctttatggaactcagggtgatgatcagacgtgtcattagaacatgagtcctctgcttctgattcaggcatacttttgggattcttccatctttaaaggaaaaaggaagccattcatctatatttagtaacccagtaatatctcacttagtttagggttagatctttagttaattcaaccttatagatcatacttatgaaggtgataactgacacgtgttcactgaattttaatttgataggcaatacatctacccactccattattttttaaaacttcatttaatagtttaaacaagattggttttgttttcaatttttattcactcttcatagaatcacaattacctttatatatcatatgttattgg

SEQ ID NO: 34483 - DNA, 1110 bp, Homo sapiens
ggaagctgaggcagagaattgtttgaacccgggaggcagaggtcgcagtgagccgagatcgcatcactgcactccagcctgggcgacagagcgagtctccgtctcaaaaaaaaaaaaaaaaagattgctatgctagaaagtcttcctgtagaggcatttttaagaaacattatgataggcattggctctggaaagcaggcatgaaatagatgactggggtctatcatgagagagaccattctctatatgtcactttgtaccttcacatgttgcctcttgttttgttttggtctttttttgagacaggaccttgctctgtcactcaggctagagtgcagtggcatgatcatagctcactataacgttgaactctgggctcaagtgatcctctttccccagctccccgagtagctgagattacaggcatgcacccccatgcctggctgtatgttgctattttatgttttaaaaacctaatcctgactgtgctggtagtcgcatgaatctctgcacatacatgcaaacaagtacatgtaaaactggtgaaatctgaataagcttcatggattatatcaatttcagtttcctgattctgacagtgtatgatacttatgcaagatttaatcgagacaaagtgagtaaagaatatgtgagatctttgtattatttcttacaactgcaaaataagaagtttttaaaattaagttataataacaaaaaaaagaactctgtgtcaaaactaaaatataaagttgaaatattgattttattttttaggaatctggtggacagtaacaaactttggtgaaatttcaggaaccatagccattgaaatggataagggaacctatatacatgcactcgacaatggtctttttaccctgggagctccacacaaagaaggtttgtgtctggaagggaagaggctgccacaagtgtagattttaggacattcattcacttaggccaaactctaactagtctcaaacattttccaaaggaatggaaccattgcatttgactcttccatttttttttaattccttaatatttaccagccattggcaagtccctctttctaatataagcatttgaaaacattccgtatag

SEQ ID NO: 34484 - DNA, 1061 bp, Homo sapiens
taaaaaatgaatcaaatagtacaaaacctggttcactgttgctgtgatatttaaactcactgtttggaagtccaaaggcaaacaggaagactaaaaaaaggaatattgttgaaaccagcagagaatgttacagaatcataacgaccaaaagaatatttttactcactatttttacagtcattttataaagtaaccttttttattctcaccttgtgcaaaagtatagaacgattctttgggcagaagatactgaaagtgaatttacatattttagtaattggttacatcaatatgataatgatttctgttatataatcattaatgtataaaggagtaaaagtcaattctggcatcccaggagattctcggtaaggtaaaagattagaaatcataattttaaaaaatcacattaagatgattatttctgtactttctttgaaagtctgataagtatggtgaaagacagaataaaagcagaggaagaaaaaattcaatagttttaaactgctttacaattataaacaaaaaaggattataaagaaaattaactgacaaatgaggaaaatatttgcaacaatcttaataggcagtgagttcttactcttcatatgtatcttgtatagaattcatagcactgatgaccccagtagaaaaactgcgaacaatcagatctcaatagaaaaatggacaagggacattaccagataatctaaaaactaaaaaggaaaggaaaagaaaaacaattgttattctagttaactactaaaatgcaaatttataggatactgttttttccatatcaggttttcaagtatttttttaaagtcataatgtttaaaaaaaaatgcgtgatacaaaacatactctgttaatttgaggtaagaatgtaaatggaagcagcattttctggaaaacagtttgatgacataagaactttatactcttcgatccagttatttctaggaattttttctaaggataaagcagttttatgtacagaatagatgtacatagaactatttataataagagaaaaagtaagttttagtaatttattcttg

SEQ ID NO: 34485 - DNA, 1069 bp, Homo sapiens
ggaagtgcaaagtccttagttcttgttttcttgagagaaacaattcagcccagacacaaagaacacaccaaaagaggagtaggttggcccagctggaaacagtcttgagagttacatgttgcagtttttattatcatagacttaaaaaaaatttcccacctctgtcttaagtgtctgcctttgtttagtatcctgcttcctggtaaatctcttcttttatcctcatcgagtttctgcccaggtctgtgagatgcttccttactgtcagctgatatacatgtgtgagttccagtgatcaatgaatcttaatggcagcactgcttattaccgccatcttaggaaaataatatagcagtcaaatgtgtacttactatgcctacgtatctcttaggaattttcctttagccctttttccctttttatcagcatgtagctagctacattctgacagtttaatcacagtatgagcaattactgggtgtcctaagtggtgtttcagggtgttcttcataggtatttctgctcctctctgctcaaatttagcatacatgttttgggttgtctttggagcatgaggctttttcctctggggctctttttttctgttcatgtctaactgcctactcgaacattccctcaatagattgtgactctaaaaatctttgagacagtgcactgtgggtcttctgtaactacttcctggtgacataagataactcatcagcatctcattatcttgctctttgtcagaaaaacattccctccatgttttcccaggtttgacttgcagtatccagaggaaatgtggagaaacacagttgtacagaagggaagaaaataggttgatactcctgttgcaggaccatttgaagtctgagagtttccaggtgagaggaaacaaacctggttacttgatttagtgagtaaagctcacaaaagagaaaaaggaagacaaaagctagggatcccccaaaaagggatgtgatgagaatttgaaccagttggcaccccaggagaactagcccttagtggcatgtttctgatggtgacaggcttggtttataaaatc

SEQ ID NO: 34486 - DNA, 1629 bp, Homo sapiens
actgggaagacataagtattggggatgttttgataaataattgtagtgaacaaacacaaagtgctgggtgtgtaatagatgctccataactagccataaatattcctggagttagttcgtagctccaagtaaaagattaaaaatatctatgttgaagaaatgtcattaattgtgcatgtggagaggacgtgttcccaggctgcaaaactgactcagtctgaatttaaagaggatttctgtttttattttctaattatctttagttttgtgatgtcttcttttcctttgtgttttggctacagtttcctcgctgatctcttcatgccgtgtaatttcacatggactttcaaggttcagatgagaagtttagaatttttaatgtggtatattattgtttttaactgggttgtttgagattatttataatttatcaatacaacattcagatgacttgagagtaattcactgttcacaggtaagaggattaagtcagcattgcttctctgtattggtaaaggaaaaattgtatgagattctaacaaaaagtgtgttaaacataagttagaataggtaaaacattaatataagtgggttgcatattgtaagcaccatatgaagaaactcatcagaattttgatatctcttaagataaaatatatcttagaaaaaaaatttttttttttttttagacagaatctttctctgttgccaaggctaacctgcagtggcacgatctcagctcactgcaacctctgcctcctgggttcacgtcattcccttgcctaagcctcccgagtagctgggactacaggcgcccactcccacgcctggctaattttttgtatttttagtagagatggggtttcaccatgttagccaggatggtctcgatctcctgacctcatgatccgcctgcctctgcctcccaaagtgctgggattacaggcgggagccaccacacccggccctcttgaaatttttaagagacttaatggtaggtgaaggattttacatatcattttctatgacatagcaaaactatttttttaagctgaatcttttgagtgtaaatgttaagtgttggaaaaatagaatgatctgtgtagattcaagattcaaaatctgcagtgatcttttctgttgagattcatgttacaatcttgaggaaatttgttatgatttttttgttttagtggatgcagttcatgaggtacggttttcatttttagtcactttatccaagtccttcgtcaccttctctggaaaatcagattatggcagctattgaattcaaacgttcattaattaatgtaattcagcatatacataataatatataccaaatactaaccataatcctgtatatctgttaattttcacagaaactcaatgcatagacattattattatccttattttacagaggaaggaacagagccacagagaaaaatgacttgctcacaacagaagagccagtagtaaaacacaggcaagtttgactctagagataagtcttaactactacggtaaacaacctcttcaaacagaaaatacatgattatcttcaacacccatttttttttttgagacggagtctcgctctgtcgtccaggccggagtgcagtggcg

SEQ ID NO: 34487 - DNA, 1099 bp, Homo sapiens
tgtgaagatcgtggcagagcctttggattgtccacaaacctgaatgaatataagaaaattcatactggagataaaccctacaaatgtaaagaatgtgggaaagcctttatacattccttgcacctgaataaacatgagaaaattcatactggaaagaaaccctacaaatgtaagcaatgtggcaaagtcattacctcatcctcaagctttgctaaacataagaggattcatactggcgagaaaccctttgaatgtttagaatgtggtaaagcgtttactagttccacaacccttactaaacataggagaattcatactggagagaaaccctacacatgtgaagtatgtggcaaagcctttagacagtccgcaatcctttatgtacataggagaattcatactggagagaaaccctacacatgtgaagaatgtggcaaaacctttagacagtccgcaaacctttatgtacataggagaattcatactggagagaaaccttacaaatgtgaagagtgtggcaaagcctttggacggtacacagacctgaatcaacacaagaaaattcatactggagagaaactttacaaatgtgaagagtgtggcaaagactttgtatggtacacggacctgaatcaacagaagaaaatttacactggggagaaaccttacaaatgtgaagagtgtggcaaagcctttgccccatcaacagacctgaatcaacacacgaaaattcttactggagagcaaagttacaaatgtgaagagtgtggcaaagcctttggatggtccatagccctgaatcaacacaagaaaattcatactggagaaaaaccttacaaatgtgaagagtgtggcaaagcctttagtaggtcaagaaaccttactacacataggagagttcacactagggagaaaccctacaaatgtgaagatcgtggcagatcctttggatggtccacaaacctgaacgaatataagaaaattcatactggagataaactctacaaatgtaaagaatgtgggaaagtgtttaaacagtcctcacacctgaatagacatgagaaaattcatactggaaagaaaccctacaaatgtaagg

SEQ ID NO: 34488 - DNA, 1046 bp, Homo sapiens
gtattttgttatgtgatcttactagcgtactttgtataatcttatgatttgtaaagtatatgcatatgaatctagtaactgggataatttgttatttttgtttctttcagctatgtgttctcatttcacccaagactttttgccagtgcaggggatagaagattcattccacaaacttatactgagaagatatgagaaatgtgggcatgataatttacaattaaggaaaggctgtaaaagtatgaacgtgtgtaaagtgcagaagggagtttataatggaattaataaatgcttgtcaaatactcagagcaaaatatttcaatgtaatgcacgtgtcaaagtttttagtaaatttgcaaattcaaacaaagataagacaagacatactggagagaaacactttaaatgtaacgaatgtggcaagtcatttcagaagttctcagacctaactcaacataaaggaattcatgctggagagaaaccctacacttgtgaagaacgtggcaaagactttggatggtacacagacctgaatcaacacaagaaaattcatactggagagaaaccttacaaatgtgaagaatgtggcaaagcctttaataggtcaacaaaccttactgcacataagagaattcacaacagagagaaagcttacacaggtgaagatcgtgacagagcctttggatggtccacaaacctgaatgaatataagaaaattcatactggagataaaccctacaaatgtaaagaatgtgggaaagcctttatgcattcctcacacctgaataaacatgagaaaattcatactggagagaaaccctacaaatgtaaggaatgtggcaaagtcatttcctcatcctcaagctttgctaaacataagaggattcatactggcgagaaaccctttaaatgtttagaatgtggtaaagcctttaatatttccacaacccttactaaacataggagaattcatactggagagaaaccctacacatgtgaagtatgtggcaaagcctttagacagtccgcaaacctttatgtacata

SEQ ID NO: 34489 - DNA, 1044 bp, Homo sapiens
taggatagtggtacagaactttgtgtacgtgcatatctttttcagaaagttacatattttcgtatgattatgtttggttttcttgcattatgttattttcactggaagacactttcttcagcatttttttggtaagacaggtgttgtgctaatatactttttcagcatgtgcttatcttgaaaggtctttactttttcttcatttttaggacagttttgctggttatattattcccatgtagaatttttttttctccagcatcttaattatattgcagttccttctggtgtgaaatagttttgttgacagattcactggtaatcttataagaccacacttataaatgacacatcactttttgtagttcctaaaatgcccttcttgtgtttgatttttcaaactttgctcatgtatatatatgtgccttgcgataaatctgtgtgtgtatcctagttgaagtttgttgagctgcttcatttattacatcctttttttaacttctgaaaatttctgagtcattattttatatttttcacctcctttttttatgtttttaatgttttcattgatgttctgatttttctgattacatttagttatatgtgttttcagttaactgattcagcattattcagattacatttaaaaaattagtacatctttttttatggttttctgaaaattttaaaatcattataatgtgttctaatattttgtatacattgtaatatttgcttgttatttgaacattaacaaaaagctatttgtcacaatctttattatgttgctttgtcatgatgtagtctgaagccagttgtctttggtagagattatgggaacctgtcatacatgttggaaggatgtctcttgtctggaattttgtgtttattttttagttaaaagggtttcttcatgtttcctgttaagaggctctaattggccaggcatggtggctcactcctgtaatcccagcaactttaggaggctgaggcaggtggatcacgaggtcaggagattgagaccatcctggctaacatagtgaa

SEQ ID NO: 34490 - DNA, 1049 bp, Homo sapiens
aaatttcttaaaataatatattttttgttttattttatttatttatttattttgagacggagtcttgctcagtcacccaggatggagtgcagtggcgcgatctcggctcactgcaagctctgcctcctgggttcatgccattctccttcctcagcctccccagtagctgggagtacggtgcctgccaccacacctggctagatctttttgtattttcagtagagatggggtttatccatgttagctaggatggtctcaatctcctgaccttgtgatccacccgcctcggcctcccaaagtgctgggattacaggtgtgagccactgtgccctgcaaaataatatattttaaactggtaaaaacgagttgcatttgaaaaattcttcctcagccaggcgcggtgactcacgtgtgtaatcccagcaatttgggaggctgaggcaggcggattacgtaaagagatcgagaccatcctggtcaacatgttgaaaccccatcttcaccagaaatgcaaaaatttgctgggcgtggtggtgcgcctgtagtcccagctacttgggaggctgaggcaggagaattgcttgaacccaggaggggaggttgcagtgagccaagattgtgctgctgcactccagcctggcaacagagtgagactctgtctaaaaagaaaaaaaagaaaaaaaaaagaaaattcggggttgggtgtggtggctcacgcctgcaatcccagcacttttggaggctgaggcaggcagataacgaggtcaggagttcgagaccagcctggccagtatgatgaaaccctgtctctattaaaaatacaaaaagtagaagagcatggtggtgtgtacctgtagttctagctactcaggaggctgaggcagaagaattgcttgaactgggcaggcagaggttgcagtgagccaagatagtgccactgcactccagtctgggtgacagagtgagactctgtctcaaaaaaaaaaaaaaaaagaaaacttcctcattacatctgtcctcgtttgttattgatgtcagtaatcatattt

SEQ ID NO: 34491 - DNA, 1050 bp, Homo sapiens
atgttccagcaatcccatttaattaaaaaattaaaaatagaacatgtgatccagcaatttcaattattttttctgtgtgtgtgtggtcgtccacagtttatttgtgtaggcaaggagtcaaagaaacagtgttaaaataccatttgttgatggtttaaacatatgttatcctgtgatacttatttttttctataatggctctactaacttacaattttaccgactgtatgtgtttccttttctattcattctcactaacatatttttgtctttctaattacagtcattctaattggagtgaagtggtatcttgtggttttgatttgcatttctctgacaattagtgatgttgagcatctttgcatgtactttttggctatttgtatttcttttgaaaaaggtctcttaaagtctcttgcctatattcaaattgtggtatttttgttaagtttgttatatattctgtaaatttatcttttgtcatatgtatattttgcaaatattttccttcattctgtagattatctcttcactctgctgtctttgctatgcaaagcatttttactttgttgtaatcccatttgcatatttttgcttcttctgcctgtgcttttgaggtcttaagattctttgctctgtactgtgtggtaaagcattcctgtatgtttacttcaaatagctttatttgggtttcccatttaaatctttatttgtgattgacttttttatatcataagaggtaggagcctagttttattttttttattatcttgtagataattttcctagcaccatttattgaaaatattgtctttttccaataacaaaaatgttattggaaaatctatacttttgtgtgtgtggaagaaacactttcgtgatttgaagataatttccaaaactgtcatacctctatctcttttagatattatttttgttttcaaaaatgctgaaactttacaatcatatatttttaaatattcagcttagtcatattaacgttgttatgcactctatctttagaatatgtttatcttgcaaagctaacac

SEQ ID NO: 34492 - DNA, 1058 bp, Homo sapiens
acatataggaatagattgaaatagagatttctccaaaacggcactggatgaacgtgtcaaggggctcacacagcccattccgggatttggtgaccgttgtttgtgtccatgttcaattgagttcaaatttaatatttaacttttcctccacattcggcctcagtttgatcctcaattgtaggaaaatacccttacagatacatggggaaggcatagttgatatagattacagatacaggtaagcacaggagaactaaaagcagagttaataaaaaccacacccaccatggctttgcaaggagagtgattgtgagaattgtcagggatatacacataacattcagtatgcagtaaggctcaaacccctccttgggctgcggtaagcatatctaatgccattcagttttgcaacacaacagtacacagctgagcaaattcctctgacaacaacataagtccagtgctactatcattaagagctttgtctacatgtaaacttaatattttaatttgctgctgaagcaggattgtaccagcagcaggggagaatactgtagtaggctatcaccaccagggagtccagcgcatttgtatggtggatggaattaatggccacccccaagtgtatctctctgtccattgtaggggcaggtatcaccacccgtagtatccacatatccagagggcccccccaggggactgcaatatagttactgtaatcatagtgtactaatgtgttattaaagtaggaaagagattgtgtttcattagggacaatgctgttgatttggagtatgtgttgacagttgtctggtgggagaaacccagaggaacattagaggagccatttaaggcctccagacaaagtggcgggtgggtggggagctatatggaatccggccaccagcacagcaggttcccaatatataccgttccaggcatattgggcaggataccaaggcttttgatgcatggtgaaggtggagttcacctttcacttgacttgggcataaatagattgcttggtttggtcataggaagttcaggttggattgcaa

SEQ ID NO: 34493 - DNA, 1054 bp, Homo sapiens
ccctgtctccactaaaaatagaaaattagccaggtgtggtggcgcatgcctgtaatcccagctactcaggagactaaggcaggagaatcacttgaacccgggaggcggaggttgcagtgagccgacattgtgccactgcactccagcctgggtgacagggcgagactccatctcaataaataaataaataaataaataaataaataaataaaaatttttttggtgatcatgactgttttcttttgtaggtgagtaggcaaagaaacagtggaatattaccacctatttattgtttgattatgttttgtgagagaaacacttgttattcaaaggtgatttttgaaaaatggaacctttttaggtagatgtaaatatttagttgtgatgaaaaacataaaattgcctaaaggttttcaagtgtacagtctagtggggttaagtacatttacattattttgaaatggatctctacattttgtcttacaaaagtaaagtttaatactctatgaactataaactgccatttttttctttttcttcagctcttgaagaacaccattttacttactgtttctgtaattttgactgatttttatattgtcattggtgtaatattttttctttctttttttttcttttttactgtcttcacataatgttcttaggcttggtttttggttggttggttggttgttttgagatggagtcttgctctgttgccaggctagagcgcagtggcacgatctcggcttactgcaacctctgcctcccagattcaaacgattctcctgcctcagcctcccaagtagctgggaccacaggtgtgcactaccatgtccagctaattttgtatttttagtagagacagggtttcaccgtgttggccaggatggtctcgatcgcttgacctcagctgatccgcccgcctcggcctcccaaagtgctaggattacaggtgtgagccaggacaactggcctcaggcttttgtttttgtaagattgttgtgtgctgcggggtgaaaggagaaggaaagacacacacacaatatcttta

SEQ ID NO: 34494 - DNA, 1032 bp, Homo sapiens
cataaaatgagttagggaggagtccctctttttctattatttggaatagtttcagaaggcatggtaccagctcgctcccctttgtaccgttagtagaatttggctgtgaatccatctggtcctggctttttttggttggtaggctattaattactgcctcaatttcagaacttgttactggtctattcaggggttcaacttcttcctggttaagtcttgggagggtgtatgtgtccaggaatttatccatttcttctggattttctagtttatttgcgtagagttgtttatcgtattctctgatggtagtttgttgctgtgggatcagtgttgatatcccctttatcatttttcattgtgtctatttgattcttctctcttttcttctttggtagtgttgctagtggtctatctattttgttgatcttttcaaaaaacctcctcctggatttgttgatttttttttttttttttgaaagggtctttcgtgtctctatttcctccagttctgctctgatcttagttatttcttgtcttctgctagcttttgaatttgtttgcacctgcttctctagttcttttaattgtgatgataaggtgtcaattttaggtcttttctgctttcttttgtgggcatttagtggtatagatttccctccaaagactgctttggctgtgtaccagagattctagtaggttgtgtctttgttctcattggtttcaaagaacttatttatttctaccttaatttcgttatttacccagtagtcattcaggagcaagttgttcagtttccatgtagttgtgcagttttgagtttcttaatcctgagtcctaatttgattgcactgttgtctgagagactgttataattttctttcttctgcatttgctgaagtgtgttttacttccagttatgtggtcaactttagattaagtgcgatgtggtgccgagaataatgtatgttctattgatttggggtggagagttctgtcgatgtctattacgtctgcttggtccagaggtgagtt

SEQ ID NO: 34495 - DNA, 1032 bp, Homo sapiens; identical to SEQ ID NO: 34494

SEQ ID NO: 34496 - DNA, 1712 bp, Homo sapiens
atggctgcaaatttgcagcatttagaaaactacactatcaacaagctttcctttatgaactgagatgtacaaaatgtagaaagcagatgaaagtgaattatttcttcaacattttagtaaaacttctgataatcagagttcaaagcacataacaactcaagcataaatgaagatggagagcctggggagtttgatttcttaaattttccaaaaaggtattattgcaaacatataggatttccccccattttaaccttaccagtttcaaaggaaagtaaaggtactggattacatgaagacagcatgtgtgcgagtgcacacgcatgcagggtggcaggtagagtgtcttaattcctttttcttactacccaagtctcacttcacagaaatcattaggtaaaggaaaaccaacgaggagttctgcagttttcttttaataactgaggctgaggcaggagaatcgcttcaaccctggaggtggaggttgcagtgagccaagattgtgccactgcattccagcctgagcgatagagtgagactccacctcaaaaaaaaaaaaaaagaaaagaaaaacgacaacaaaaaagataaaaggcagagaaataacttatgactaccattttgttcattgttttctgaccatgtagtagtttctgttttttaatcctttcatgctgtcttcccttgtgtagtgttgagttgttttgtttctattgttatatgctttggtttccttttttgtgtgtgtatctactacagttttgttttgttttttttttgtaatttccaagagacataaaatatctcataattataaaagcgtagcttggccaggcacagtggctcacgcctgtaatcccagcactttgggaggccgatcacgaggccgatcatgaggtcaggagatcgagaccatcctggctaacatggtggaaacccatctctactaaaaatacaaaaaaattagccgggcatggtggtggatgcctgtagtcccagctacttgggaggctgaggcaggagaatggcgtgaacccagggcgcggagcttgcagtaagccgagatggcaccactgcactccagcctgggcgacagagtgagactccgtctcaaaaaaaaaaaaaacaaaaaacaaaagcctagcttaagataacaatctaacttcttttttattcacatagggtcttgctttgtttcccaggctgtagtgcagtggtgcattcacagctcagttcggcctcaactctccaatatcaaacaattttcccatctcagcctcccaagtagctgggaatacaagtacacgccaccaggtccagctaagttttttggtatttttttgtagagacagggttttgctatgttgctcaggctggtcttgaattcctaggctccagaaatccacctgccatggcctcccaaagtgctaggtttacaggcatgtatcatcaggcccagctgctgttttttttttttttaatggaatcttgctctatcacccaggcgggagtccagtggcacgatcttggctcaccacaacctccgtctcctgggttcaagcaattcttctgcctcagcctcccgagtagctgagactgcaggcacctgccaccacacctggccaattttttttttttgtatttttagtagagacagggtttcactgtgttagccatgatggtttcgatctcctgacctcgtgatcctcccg

SEQ ID NO: 34497 - DNA, 1712 bp, Homo sapiens; identical to SEQ ID NO: 34496

SEQ ID NO: 34498 - DNA, 1050 bp, Homo sapiens
cttgcagtgagccgagatggcgccactgcactccagtctgggcaacagaacgagaccatctcaaaaaaaaagttctacttttattcttttgtttgtggctctccagtttttctagcaccatgtattgacaagactataatttctgaattgtatattcatgatccccttgccaaaattcgttgaccttgtatgcatggatttgtttctgggctctctattctgttcattggtttttgtatgtgtgtttatgcacatgccatactcttttgcttactacaacctttacataaagtttaaaattaagaagtatgatgcccctagctttgttctttctcacgatggctcagattatttaaagttgtttaaggttacacttaaattttacaattgtgttttctattactgtgaaaaatgacactaaaattttgatagggatcgcgtttgaatctacaaatcactttcgataatatactttgacaatattagtgatcctaatgaaatatgtgtttgtgtctgcttcaatttctgtcattattgtatttagtgtatacatttattgttatacactagattttgtgctttattgtatttaatgtataaattttttatttcatttgttaaatttattttgaatttcttatttttatagtattgtaaattgaatttttttcttttttttgggaaattttgttgttactttatggaaatgaaacaaatatttgtatgttggggcaggtgtagtggttcatttttgtaatcccagcactttcagaggccaaggcatgtggatcacttgagcacaggagtttgagatgagcctgggcctcagagtgagaccatgtttcaaaaacacacaaaaaaacaacctgcaagtatttacatgttggttatgtatcctgataccttaatgaatgcatttattagttcagtttttgttattctactctagggtttcatatatatgcatgatcatattatctacaaacagtaacattttttcttcttttgcaggcaggagagctttgttctcctttttcttgcctaattgtt

SEQ ID NO: 34499 - DNA, 1050 bp, Homo sapiens; identical to SEQ ID NO: 34498

SEQ ID NO: 34500 - DNA, 1066 bp, Homo sapiens
agttatatatgtgtatagtaaattcttaacattgttgatagattctcagaaactgtaagtgaagcaacatatcatttaggaaaatgaattttagggctgggtgcagtggctcacgcctgtaatcccagcactttgggaggctgaggtgggcagatcaggaggtcaggagtttgagaccagccttgccaacatggcaaaaccctgtctctactaaaaatacaaaaaactagctgggcatggtggcaggtgcctgtaatccagctacttgggaggcttaggcggagaatcacttgaacctgggaggcagaggttgcagtgagccgagattgcgccattgaactcctgtctgggagacaagagcaaaactccgtctcaaaaaaaccaaaaaacaaaaaataataattttagcaaagtttaattgatacaaacgagttatgtttggtatatagcaacattgcttcatataaagttgcagttttcaagaacctgttttgaacattaagtgaggacttactcttcatctgtgtttgtgtgacatggatttttctgttaaataaaaattgtttaactatatttaatgtgtacaatgtaatgatttgatatgcatatattttgtaatatatgcatatattttattgtaaagtaaaatataatcaagttgatcaacatatctattacctcatatagatcatgatttttttggtaataagaacacttaaggcctagtgtcctagcaaattgtaagcatacattacagtattattaattataaatggaatactgttttgctaatctaatgctaatgtacattagcattaggtttctccttaggtttctccttattcaacttattcaacttataactaaaaatttatactctttgaacatctcatattcccacccttaggcactaacaatcgccattctactttctgcttttatgagtttacatttttagatttacccgtctatgtaaaaagaagcagtttctttgtctgtctgtgtttggctaatttcatttagcatcatgtcctccaagtctatccatgttgtaaaagactagatt

SEQ ID NO: 34501 - DNA, 1066 bp, Homo sapiens; identical to SEQ ID NO: 34500

SEQ ID NO: 34502 - DNA, 1060 bp, Homo sapiens
agaaaagaaaaaaaaaagaaatcacactcaaccaatgcatttctcaccctgaatcaatgcttcttacccttggatgcatattagaatagcctgctgtgcatgtgggtggtggtatttaaagttcccaaatctaagttgcaacggaataattaagccagaatctatctatttatttatttatttatttattttttagatggagtctcgctctgtcgccaggctggagtgcagtggcacaatctcagctcactgcaacctctacctcctcggttcaagcaattctcctgcctcagcctcccaagtagctgggactataggcacgcaccagcacgcctggatagtttttgtatttttagtagagacggggtttcacccatgttggccaggatggtctcgatctcttgacctcatgatccgcccgcctcggcctcccaaagtgctgggattacaggcgtgcgccagttaagccagaatctttagagtgagacccaggcaatggcgattttaggctctccaggtgattacaatatgcaaccatgctcccaaatgtctgctgtaaaccaacatctttcggaggaccagttgaaaataatatttctcaaattaatgtgaaaagtgtttgctgttgagttgcggcctttcagtcccgcctttgttctctactcaccactgttgagttgtggcctttcagtcccgcctgtgttctctactcacctctactgcttgttttgctcctgattcaaaccagttccacacatactaagcccactgtgctaggtggcctgaccgtggtgaatattattgtggaggaaggactttgctgtaagaaattgcattccccaaaactgaaaccatgatatttactcaactgaggtaaaaaatgaaagactaagggggactcccaagggtcagggcaagaataaataccttggaatattaatacccatctcatgatgcctgagtgtaaatgctccctttcaagcaaaacaatactcgctgggcgtggtagctcacacctgtaatcccagccatttgggaggccgaggcaggcagatcactg

SEQ ID NO: 34503 - DNA, 1076 bp, Homo sapiens
ctgtatctgggaggtttctcttcttatttgtgtcgttcatatctggattccattttcaagtttacaataaatgtttgggcttggctagcccgactgcacttttcttggcaagtccaaaccctggggctgctctgcctggtggtccgaggcgagggggacagagcgagcgccccaggacggcgacttcccacggaggaagagcagacagagacgcagagcagctggtaattcagaaagaagaagtgagaacacccaacagcaacactttgtacacggatgtgcctgcttttgttgatactttcttactgtaaagctctccataaatagtgaaaatgtttggtaaatttattgcaatttaaaattggtgagttcctttattaaattaattgctatgttattggagaatattcatcaaattggaattagaggatgtctacgcacaagtcagtgtggggggaaatggtttcatttggtcggacaaatgttgagtttgaacagttgtattctgctagctagttgactgaatccagcctctttctaaagctaactttctgtgtgtgtagagaccctgatgccacatcccatacatttcttttttcttttctttttttttttttggaaactggttgtgtggtttcgactgcaaagcagatcttatttttgattaatacatatgaacaatttaatcctatttcggaaaatcagtcatagtttttctggcatagataattttcctgttgattatttcattaatctggtaattttgagtatgatagcatttcatttcaaatataccccgtaatcgccttaattgatgtgaaggtcatacttttaaatgatgaggctatgtgtgtgtgtgttttcacacatgatatgaaatgagttccatatgctcgtggagtgtgtttccatctgtctgctgggctggctgggagccagtccggctccaagtcttgggaaaaggtgatcggactcccacatgctggaattgtggcatcaggctggtagctgctgaccctgagcagctgggagcagagccacagcctggtgggaaagatgagtacctcctgccgtgg

SEQ ID NO: 34504 - DNA, 1068 bp, Homo sapiens
cacctgagggttcccagccttcctacaaggcagtgtgcatggtgatgactgaagtctcggggtaatctcccagcaagaggtcaggtcctggttgtgcgtcccagggtgtcagtgaaattggctgctcccctgacccagggcaccttcatgcgtcttcacagcaggactactgtgaccaaggccagacctttcatctttcaaaagactttgactaaaaatgctttaaaaaagcaaccttcggctggacgcgctggctcacgcctgtaatcccagcactttgggaggccgaggcgggcggatcaccagaggttgggagttagaaaccagcccagccaacgtggtgaaaccccgtctctactaaaaacaaaaattagcctggcgtggtggcaggtgcctgtaatccagttacttgggaggctgaggcaggagaatcgcttgaacccaggaggcagaggttgcagtgagccgagatcacaccactgccctccagtctgggtgacacagtgagactctgtctacacacacacacacacacacacacacacacacaaagaaaaaacataggaataaatgtagtggtcaaatggttgtttgtccaacgtcgacaggagtcttatcccttgagcaggccacaccttccccaggaattggcgtgggcagacactctggggtgggcggggtgggcccaggggagcatctccttcctcacaattggagcataagccaccaaaaaaaatgaaacaaatgtgctttgtgtactttccttgactgaggagtaatgtgggtaagagaaaggactctttgcttatttatggatttaggactctgtgctgatttatgtaagcacagttgcatttctgtgtaagcggaagacagataattctttctattaaaggggacgttcagtgtagctactgcagagcaccgtcaggacacaggcctcccaaccaatgcaggctcagccctccacagcccctcaggagggactcagtgcatctcaagggagttttatccttaaaaactagaagccatatggacatctactttgggaggatttggtgggcctca

SEQ ID NO: 34505 - DNA, 1050 bp, Homo sapiens
aagcagaggctgcagtgagccgagatcgcaccattgcactccagcctgagcaacaagagtggaactctgtctcaaaaaaaataaaagacccggtgtggtggctcatgcctgtaatcccaacgctctttgggaggctgaggcaggcgtatcaccaggtcaggagttggagatcagcctgaccaacatggtgaaaccctgtctctactaaaaatacaaaaattagccgggtgtggtggcacacacctgtaatcgcagctactcaggaggctgagacaggagaattgcttgaacctgggaggcagaggttgcagtgagctgagatcatgccacatttgaacccgtgaggcagacgttgcagtgagccgagatcatgtcactgcactccagcctgggcaacagagccagactgtctcaaaaaaaaaaaaaaaatcttacttctatagacaataaaacattggaaactgaagttaaaaacacagtagctcctgagagagagagagaggtataaatctaacaagacaaaacaggatctgtatgctaaaaagactatgtatgtggagagacggcacacagcacgctcatagactggaagactgaacataagatgccagtctcagaaggatctgtgaaattaacaaaattccaaaacattgcagtaggactctttttagatttagaaaagatgattttaaaatgtatacagaatggtgaaggagctagctaaaacagtaaaaaggatagataaaacaatgttttaaaaagaacaaaaaagttagatgaatcacattacacagttttaacagactttaaagccacaaaaatcaagactgtcgtattggcaaagaacagacagatgggtcagtgatcagagagtctagaaacagacccacataaatagggccatttgatctttgacagcagtgcaaacaaaagcaaccctgtggagaaaggattgtccattcaacagagcagtggggcagttggtcatccatatggtagaaatggaaccttggcctaaacctcacattgtacacaattaactccaatcat

SEQ ID NO: 34506 - DNA, 1050 bp, Homo sapiens
tgccctcggtggggttggggagcacacaggcagccccccctccatttgggaggaaggaggggcctccttggagatccagggggtgcccagcaccaggagcagaaccaactgcttctatggggaggggctgctgagacaggagcaggagatggcaggggaggggctcctcctgggcagaaaggcccctccctgtggctggtgatcccgcggtgtgctcctccgtcctgtagagtgctggtgcccactcccctcctaagttttctcctggacgcagctgctgacgccttcactactccagagcacctgtaatctcagatccaggaccttggacctggcccgggggtcctgttcaggggatggaagtccagctccgtacaacaccaggcccccaatccttccaggccagcccaaccccactggttcccaccttcctgggcagcaggaggctgttccgtagttccgtggcctgaccatgaccacaggcttcctgggctggtggctcacgggagggctggaggagtgtggcgtggggaggcgtattgatctagaaaccaaaaccccggggcctgacaaaaacttagaggcctggagggcagaagaacaaaatcccacactccctctggaggctctgggggagggcccttccctgccccttcctgcgtctggcggccccgaatccctggtgtttcttgaccactcgcgacctcctccgctttcgtatgcccgcccccatccgggtgtctgtcctttctgtctcttacaaggacactctcactggacttgaggcccctcaaatccaggatggcctcgtccccatccttaccattatgagatcaacaaagacctgtttccgaatgagatcacctttgaagctccaggcaatatgaatttgagggggacaatattcagctactacggagggcagacgcactcacgggagatgagaaacgcgggtgggcagggggtcggtgaggcccaggcatactggctgagggcacgactaggcgggattccaggacacccagtgcctggaagtgaccgcagcccagg

SEQ ID NO: 34507 - DNA, 1048 bp, Homo sapiens
gagggccccctgccgctggtacgtgtttctgttctgaaggcgagtggcttcacagtagatgagtgatgaggctgagtcattctcactgcatgggcgtgtttcgaaggtgcttgcaggaagggaacgtgcccttcccccacctcccccaggagcagcctcggggtcatgtcagggttctgtgctgcccacctgagctcacgggccgggagctactggcttctccatctcagcagtgttgctgtgtccctgggaaagtcatcctgaggcgtggggcacggggagcccctgggctgactgcctcagtgcccctgcgagggcagccgtggggtctgggctgcccagctggagtggcctcttgggcaggcctgactccagagctgggctcctttgtcttcaggcagccgggctgagtcctccccatgcccgcctgtccccacagctgacccctttggcccgcttctgccgtcttcaggcaacaactcccagccctgctccaatcctgatctcttcggcgaatttctcaattcggactctgtgaccgtcccaccatccttcccgtctgcccacagtgctccgcccccatcctgcagcgccgacttcctgcacctgggtaagtgcctctcgcctggcagccagctctccatggccgcctccctcaggaccgcagcctctggtgggaaacagagctgtgggtctcaggcagtggtggggctggactgtgtggcctccgggtgcgctccttgcggcccaagcatcctgcaggacgtcccagaggtcaggacagactgctccctgctctgtctccccaaaccatccccaaacctggaacaggttgtggggccctgcagtgcctcagtcgtctgtgactggcaacaggtgtttctccaggcctcctcaggcccaggccttgcagctgttagcagagaaggccacctgcacccagagcttgtgtagggaccagaggtcagagggaggcagctgggggacccagggtccgggaagctgacctggtctgggtgtagcaggggccgtggggcaccgtatccat

SEQ ID NO: 34508 - DNA, 1037 bp, Homo sapiens
ctgactctgagaaagccgatttctctttcatttctgaatctgcttccttggccactcgggctgttggcaggatttatttgttgtggctgaaggaccggctgtcctggctccctgctgactgagctgggccacagtgtcctgtggctgggaagatggggtctgcaccgtcaccatagaagtggtgtcacctgcctggcccgcacaagctccgggagagggcctcctgcagggcatgggtgccacgaggtgggaggcagactctggggggtttatgctccacagaggcaccacgggaacgccagccacgggaaagccagagctgtgctaccaaggtcagagaaaacagattccattccacatccatcaggcaaaaactgatcaaattgaaaggagaaccagacaactcatttgtagggtagacctcaatattttcgtctcagtaatccgtagaacaagtagacagaccaccagcagggatatagaagaaccgaatgtgccaacccatgaaggctgacacagctgtagagcgttctaggacgttccacccaacaatagaaaaacacacatttatttctttcaaatgcacatggaatatgcaaggagaaagatcagatttggggctataaacacacctcaatacatttttaaaatttgaaatcagacaaactatgctgtcaggccacagtggaataaaaattgaaatcaataccagaagaatatctggaaaactctctaaatctccacctcccaggtttaagcagttctcctgccttagccctcccgagtagctgggattacaggtgcacaccaccaagtccggctgatttttgcatttttagtagagagagggtttcaccgtgttgcccaggctggtctcaaactcctgaccttgtgatccacctgccttggcctcccaaagtgctaggattacaggcgtgagccaccgcgcctggcctcaaaattaagcaacttctaaataacccatgagtaaaagtgggagtatcacgagaaatttaaaaatatcttcaactagggcg

SEQ ID NO: 34509 - DNA, 1042 bp, Homo sapiens
ctccttcctctgagcccctcacgtccttggctctcctccgaagcttcttttcccagagatgggcagatagatgccgtctctgcccacacgtagcctgctctcaccctgtgtcttggagctggaggagttaacttgcgctctctgcacttgggccttcttgctcttgtgtcttgcattggtagctgactgtcccggcctcaggcaggtcattcctggaaagcaggtcttcgtgcttttcagcatgagtggagggcgctttatcctgctttccgtaagctctcattttcccattccctttaagaaattgtggcctgcccaaggccgtgcgctgtcctgctgtataactgcagagcccacttgccccctgctctcctgtgaatctgcagctgaggatggggtttgtgtgtctgccgtgcacggagattcactgtctcctcacagctctgcggccccagcctctgcctctcacaacatgtctgccatgcacggagattcactctctcctcacagctctgtggccccagcctctgcctctcgcaagtgcctccgtgtgtttgtgaggctctccattgttaaccttgaaccagtcgggtgagcttgggtggacggcttcctcctcccagataccctcacgtaccctggggttctgggtgtcacagaagctgctctgggtgcggccactctggagcggggcccttgtgccaggtgagacacccttctcctcagcaagcggacttggtgcgcagcaggccaatacgtcggtgccgacatgccatgaagcacgggaggccgtaggagattgagggaggtgaatgactcagtcctcatcgtaaggagcgcgctgaggccgaagatgagcagcggagctggtgcatggggccgactggcctgaggtcatcccggggcatagtgtgcgggacaggctgcccctcagtctgctgtgcatttggaaagctgcacggaagtggtgcaacataaaaaatactgtttgtgggatgcaacttttcctttgaaatgtttgtattttttcagatcacgagga

SEQ ID NO: 34510 - DNA, 1028 bp, Homo sapiens
ctcactgcagccttgaactcctgggcctacgtgatccccctggcctaggcctcccagagtgctgggacgacaggcatgagataatgtgcccagccttagactgatcttaaaagtagaccgggccgggcacgacggctcacgcctgtaatcccagcactttgggaggccgaggtgggcagatcacccgaagtcaggagttcgaaaccagcctgaccaacatggcaaaaccccatctctactgaaaatacaaaaactagctgggcatggtggcgcgtgcctgtaatcccagctgctcaggaggctgaggcaggagaatcacttgaacctgggaggtggaggctgcagtgagctaagattgcaccactgcactccagcctggacgacagagcgagactctatctcaaaaaaaagtagacccttaggttgctgtggcgagccagccttgtagccgaccctcttcccacataggacttgtgactgagggcaccagcctctgaagctccgtgctgttctcttggccatgtgactgagggcaccagcctctgcagctctgtgctgttctcttagccaccagggttctgtcatccttgcttctttgtacctctcctggacccagagcctgaagtgcggtggctgcgctcacccagggaggggtgcggggcctgcgctcacccagggaggggtgcggggcagtgcagagcgcaggtaagcagggaggggtgcggggcagtgcagagcgcaggtaagcagggaggggtgcggggcagtgcggagggcaggtgagcggggaggggtgcggggcagtgcggactacaggtgagcggggaggggtgcggggcagtgcggactgcaggtgagccgggaggggtgcggggcagtgcggactgcaggtgagccgggaggggtgcggggcagtgcggactgcaggtgagccgggaggggtgcggggcagtgcggaccgcaggtgagcggggaggggtgcggactgcaggtgagccgggaggggtgcggggcagtgcggactgcag

SEQ ID NO: 34511 - DNA, 1067 bp, Homo sapiens
acacctgagaaggagcctcccacaaaacagaccatgtggggaacggtaccgggagctggactggggcgctgaactacctgggcgggaatcgcctcggcgactgttccgcgcgcctccgcttgagtcagcccggccgggagcttgacagccggaagttcatcgcaagcccggcgacgccgcgcacgcgctgtctccgtcagacctccgcgcctgcgcgcgcagccaggaagtgaggccgcggcggaggggacggggctaggccgggtcgccgcctgacgcgacgcgtcctcacgggcgcctacgtcacggcgtcgaggcggaagatggtgcacctccgggccggcggttgctgagctgacccggacggcgagggagcgggagcccgagcccgaccactccggctgccgcggggtgcggcgcagccaccgccatgtcgctgctgcagtcggcgctcgacttcttggcgggtccaggctccctgggcggtgcttccggccgcgaccagagtgacttcgtggggcagacggtggaactgggcgagctgcggctgcgggtgcggcgggtcctggccgaaggtgaggccccgggtcggcagcgcgggtgcggccgcggagtgttgtctccgggacgctgggggcagcgtcagcccggagtggaagggcgtgggttagggctggggagggtcccagcgggatcgtgggtcagggtcggccaggggagggtctctgccgagggcgtgggtcagggccaggcgaaggtcatagcgcgggcgtaggtgagtgcctgctggcggtgattgcggagggcgaggctgggaccgggtcggggtactttcttgtcataagagtagggtcaagtcggagcaaggcctggggcttggggaaccccctcagggtgggtgggggaagatgttacggtgaggtgggggatggtggcaggcagggagcttgggtggggacccacagcggagactgagggacggtgcctagaaggccgacagctggagtcaggaggtgagcggtgcaggaggtgggtttaagccttggccttttgccggacatctgggg

SEQ ID NO: 34512 - DNA, 1023 bp, Homo sapiens
gggtattttcaatttgtgtgccagcctaagggtgaatgtctgataacactcagagctggtgcaggggctgtgcctgtcatcccagcgtatccagaggccaaggccagaggatcgcttcagcctaggaggtcaaggctgcagcgagtcatgattacaccactgcagtccagcgaggtcctgtctgtaaaataagtaaatgaaaaagtttatatattcaaagactcctcccaatcagtagaaacagaaaaatcccgacagaaaatggatgagggcggtggcgtttggtacagacagagcggtgtatgagaaccggggtgcgcctcctgggttctcacaggtgcagcaggcaccgccggtaacccctggcctggcctgcgctgagccctgcaccagccgtgctgagggagcctgggcctggcccttcatgtgggatagaaacggccgtgccggtctcgatggtgctttggcagtttctctggaaatctgaaacctgcggtcttcagcccagccccaccctgggcctgcatgtggctgcgtgtcgtagagaaacatctgccctgatggtgacctgatgtgagcagcagtttcacagagtaagccacccctgtgcacgaggtctggaaaggtaagtgcgacgtcgagtcctgagcacagaagcaggtggcagaactgcatggcaggaggtgggcttggcgggccccttcctgacccccaagagccagctgccaccaggagcgtcctggggtctgtttccagcccggtggcagccgagcttcctgggcacccagctttccccagcctgctctgagcactggagttgagggcactgagcagagtggggctgagcccctggcggtggaggggacacatcagtgggtgttggcttgaggtggtttctgggaggctgctgggccccgatctaaagggacacacctggctgcacccacctcctgcagactttctccgtgggagaccaatgcaacaggcggggtggagcagccacgtggcagccacgagggggaa

SEQ ID NO: 34513 - DNA, 1030 bp, Homo sapiens
ctgagaggctgaatttggctttggtggcatcactggcctgctgggtgtggggccctgccgggatatccatggcctgaaaggtgacatctggagtgagggtgacctggactctgacgcgccacacgatcggcacccagcctgctgatgtccaggaaaccttgaatctggatttttggggaccccgcactgccggccccaggtgcctggcaaaagaagtaagacggcccctttagaggaagacagcgtcagccgaggcctcgggtcatttctacaaatcaccatctggtgcggggtccatcacatgcaaacagaggtaaccaggcagtcaaggagatgcgcaaaacgcagaagccagggaagcagtgccacccgcaggagctccccgtgctgcccacgagccgatcaccccagcccagcccccaggaggctgggccagacaccgacgaagagctgatgactctggaacggggcgtagcagcgttaggggagaaaatgagatgcggatctgagaaaacggcgaagctgatcggtggaactgaggggcgggtttaccagctgaccaggcggcagcggacaggagggaaggagagaacgcgggagagggcgagatgaggaagggtcgctcttgcagaaacttcagaacaggagagggaaggggttggaagtgatgatgacagcaaaaccctttccaaaatggacggaagaaaatctgatgttaaaaatgcgcgtggtctgccgggagcgtctgctggggcgttcgctctggaagattcttcatggtttctcacacgggtagatgcgtgcttgtaatgcagcccagtggccacactcctttatcccggagactcggaatgcgcgtccacacacagacctgcacgtcatgctccctagcagcttaactcaccatagcccaaaccagaaggacgccccccaccggctgtccttcagtgggtgagtggccaggcaaatgctggccacctccctcggtgtcctcctcagcaacaggcatgaacgctgggtccctgccaca

SEQ ID NO: 34514 - DNA, 1058 bp, Homo sapiens
gttgtagccacggggccgcagtggtgcaaggctgagcacttgcctctgtcttgcaggcgtccgacctccgatcatgaacgggcccctgcacccgcggcccctggtggcattgctggatggccgggactgcacagtggagatgcccatcctgaaggacgtggccactgtggccttctgcgacgcgcagtccacgcaggagatccatgagaaggtaccaccacgtggtcgcctggggctggcagaaccgcacgttggggggagttggagggacgggagcacggcaggcccgggccacagcaggtctgggtgccactggggcaggagcagcctctgtcccagtcgtcccgcgccgtcaggaggtggacacggggttttccctggacaccatcaggaggtggacatcgggtttgccctgagccccatcaggaggtggacacggggttttccctgtgccccatcaggaggtggacaccacgtttgtcctgagccccatcaggaggtggacattcggtttgccctgtgccccatcaggaggtggacacggggttttccctgagccccatcaggaggtggacactcgttttgccctgtgccccatcaggaggtggacacggggtttgtcctgagccccatcaggaggtggacacggggttttccctgagccccatcaggaggtggacacggggtttgtcctgagccccatcaggaggtggacacggggtttgtcctgagccccatcaggaggtggacacggggtttgtcctgagccccatcaggaggtgaacaccgggttttccctgagccccatcaggaggtggacacagggtttgtcctgagccccatcaggaggtggacacggggtttgtcctaagccccatcaggaggtggacacggggttttccctgcacaccatcaggaggtgaacaccgggttttcactgagctccatcaggaggtggacacggggtttgtcctgagccccatcaggaggtggacacggggttttccctgagccccatcaggaggtggacatggggttttccctgagccccatcagga

SEQ ID NO: 34515 - DNA, 1035 bp, Homo sapiens
tctccagtggtgtcgtgtgtagactgtgttgggaaggggaggaaggtgtagccctgataccccacatgtggtaggagccaggaaggtggcgttctgggggttcctggagctcacaggttgtgtgcatgtgctcgctgaacaaacagggaaacgtgcggctccacggatgtcctggagaggaatcttgctggcaaatccatgcctttgatcacagcccctgcgctgtgtcctctgagctgtgatgcggccctgcaggccccgtggagtgcggtggctccctggctcacagggatgctgccgtccaaggtgccgtatcggctcgtggatgacttgggcagtgtctgtctggggtgctgtcgtcggaggagctgtttcaacctgtgggtgacgggccttgtctgtctgggggaggttctcttggccccgtgctctcagcccagtggctccatgctgctgtgcggctccctcttgggggcctgccttctctgccattgcagggcagggcctcagttttctctgggcggcaggtggctgtatctcaggactggaaggctccgggtcaggctgtgcacagccttcgttcatgtcagcccctggctgggcagcaccgccaggccctagtctttgggcctccaggcctggacagccagagggggcatctcaccaatgcccagatggctgccggggactcacggcagggcagctttgtcacgagagggccactcgagcccggagtaatcagggcttatggggacagggcagggtgagggccgctgagaccacccagccttagggtgcccttctggtggtcggggagcccttcctgggcagcggctttaggggctgctgtggggagggggaagaagatggggttggtgaggaggagcttttgggacactgtcctggtggaggtcgtgagggaggggagcggaccggttggcccagcagggctggccagtggagggacgtggagggttggtagctgccgagcctgggtctgagcaggcggggatgaggaccaggtgctgaggctgg

SEQ ID NO: 34516 - DNA, 1196 bp, Homo sapiens
tggggaaaagggaaggcggtcgcgcccttcccggtgccctgagtggggaggtgaaaccctgagagttggggcaagagggcctggagctagggccgaggcggcgggtgcgcagggtgttccgttgagcccgagccccccccccctccccggcctctccaccgtttctgtaggagcgcggcagggagcacacgtccctcgggaagaaaacggcgctggcggctgggcccgcaccgcggccgtcctcgctgagctcctagcgcgtggcctttgcgcgtctgtgtacccgtctgcagcttggggcagggttgggggagaaccgtggggtaactatttgccgttgcagctgaggatgacagctgcggtttgggggtccccctttctgtgtcctggaactttgtagggcgtggctctgccctgggcctcagcacccggcctcccaggtctcccctgcctgcccgggcctggccacctccctctggggtctgggtttggctcctggttggggctgtcggctccgcagacgccttttgctctctgtgattctgttgcccatctttgagcacctgcttccatacaggcgtcctctgcagagctctgggagggacacgcactgggggtggcatctggtcactcctgggggtgcctcgtccgcctgcccggccatttttggggtgtctgccatgtccccaacatgcacttcttcctgtcagccttgaccagggcagctgttagttctgagaggtgggcgtgtggttggggatgtcagcgagtaggatcttcccttttactcgcttgtcattaacctgagaacgtggcagtgggggaggagaggcttggcccggggtgcacaggactgtgggctggtcctgtccctctgatgagtgggacgagccttggtccagtcctgtgggcttggcgcagagccggccccctgccatgtcctggtgggattggaagtgctggctcgtcctgtctgcctcccccaagggctgggagccccccactctttggacatttgtagtgtaagcagacagcaactgttaaccatcattctgttaataaattttttctggaggaaccctggacagaagtagtcatgctctccaggaaacgggccccaggctcgagaggcccagtctcttccctcggggcttagaggtggccgtcaagccacacctggttccccaccagcctgg

SEQ ID NO: 34517 - DNA, 1086 bp, Homo sapiens
tttttatagtagaaccacaaagacagaaaatatgtcaattcgtcttttgtctatttatttatttttttgagacagagtctcactctgtctcccaggctggagtgcagtggcccaatctcggctcactgcaagctccgcctcccgggttcacgccattctcctgcctcagcctcccgagtagctgggactacaggcgcccgccaccacgcctggttaattttttgtatttttagtagagacggggcttcaccgtgttagccaggatggtcttgatctcctgacctcgtgatccgcccgccccggcctcccaaagtgctgggattacaggtgtgagccaccatgcctggcgtcaatttgtcttttagagcccaataatatccttagaaaaaaggagctctgtccccgagggccatgtgcttttataaaaatcagtcgctggaagtgtttccaggaagtgtttgaggttcccgtctgtggggtgtttccttgctctggacgaaggtgatttggggagtttcttgggtcctgtggaattggtgagcttgtgctctaggtcataactttaggtggccgagggtgctgtgtcagtgtggccttgtcatcggcatcatggcgcccctgtgccctgcaggcgtggccagtggcacccacgtgccctcacaagcctgagccacgaggtgaggcgtctgaagccagcgtggtgtggtcgaggaggggagccttgaccctgaggaggcctggaggtgacccggcaggtggggctgggtaggaaggctgctcccagtggcagtggacgagtggcatggacggcgctgggcaccacagacgggggacttgaggcaaggactgggaggtggcggggggtgggggcccgggagtgctgaggggctggtgccctggtcgtggccatggactcgtgccccagctggacacacctgctgggtctcagggccctggagacgcccaagagagcacgcctgggtggatggagactgtttgcagctcagagtgctctggttggggggtgcagcctggggggaccccctattcctaacaggccttgggaagggaggctactgagtgaga

SEQ ID NO: 34518 - DNA, 1089 bp, Homo sapiens
ctcacaggagcgactcgcgggtgcgggcactcccctgccctgggccagcagcagccccacgtccacgcctgcgctgggcgggcgccgtgggctgctccggtgccgctcacagccttgcgtgctcagtgggaagaggagccggcgcaaacggaggcgtgaggaggacgccaggtggacacgcccatccttggacttcctgaaaatgacccaggtgaggctttcttatttccaggggctcagaggggcgtagatctggacagggcggtgctggggtgaggctggctgattctctggatgtggctgttagcatccggctggtcttctctgggctgggaggaaaggagtgaggagagccatctggagtgcgtgggagcgatcgggggcctgtcctggtgtcagagcacccagctcaccccgcctgctcccgcagaggcagagccccacacacggcccagggtggccggccaggcttgcagtgaggcctgggggaggcagcagaacggagctgtgggtttctggcctggctgagccgccccccgcctcagctgctggggagtcccctgactttttctggtgatggctcaggaagtaacaagctgtcctgggagccccattcgaggcagagcccggggtcctctcttgtgggagctggtgggtgtgcatgttgcagctcagagcccagcagcgcctgtgcgctttgggactgtacaggcacctcctgcagaaactgtctggatgtaggagagagccttcacccacttgaagattctcagtgccacccacctctccacacccccgtcacaggccgtggttggcacagagttaaggaaggaaacaggactgaggaggctttcccaggtcttgctctgtgttactaagggagtgcattcaccagagacctctgggggcccggcagcgctcggggagggagatggcagagccgtgacagagtagggtgggctgtgtgcacactcactgggtcatctgtgtcggggaagctttgggcagtggcagaaattaacaggacttcccgatgccaactgagtaccagccagggccgagtggggctgtggctagggtggggcggga

SEQ ID NO: 34519 - DNA, 1061 bp, Homo sapiens
acagcttgttttaggggttgagtgaggtccggccccaacagtcacatgttgaagtcctgaccccccccagtacttcagaatgtgcacttacttggaaatagggttgttgcagatgtaatgagttaagatggggtcacactggagcatggtgggtcctgccccaaaatgactgatatccttataaaatggggagacttgcacacaggcacacgcagggagaatgcggtgggaagactggagtgatgccagagccgggagggaggcctgatcagtccctccccagagccttcagaggggcatggccctgctggcgtcttggtcctggactcccagcctccaaggacggctggccagtgcgtttctgtcctaagccaccactttgtgattcttggttataggaagctaattcatggctctacaaatgctgtatctgactgcatgtggatcgaattaaattaaaacacagaaaaatcgaacctgctttggtgcctttttggaggatggagtcctggagaatgagagtggccagagccgccagccgagggcattttgccgctgtcccgtgaggcggccatctgagctgaggcactgcctgtggtgggggctcgtccctgctgcccccgtggagctccagctctgggtttgaccctcctaggggtctgcagggcactggtgtggccagatcctggggagcgaggggagaagatgggggagttggaggaccagggtgaggattttggcctctgtcctaagggctgaggaggctgtttctgggggccagagcattgtgatctgctttccgctgaggtcgggccaagggttgcccagtgtatgggaatgagtgtaggctgctgcggtcctccagaccttgaggatcaggcttgagctgggtgcagaggtggaacgagaggcagggaaacctcctggggttgtcggctaagtcaccagtgcagttacaaggaagggatttacggtgcagttacaaggagcctttgggagcgaggacggcgacttaatgccagaaaagtggaagtgagttcgttgtagccgtcctctgaagt

SEQ ID NO: 34520 - DNA, 1023 bp, Homo sapiens
gggaacctgcccagaacagccctgcagcaccagaaaggcatgggcaccaggccagccccgcccttcccttcagggcttcatcaacgccagaccaccatggacctgacacaaggcggcttctcctgtatgggagcaggtagcattctcagagggccatcaggagagcaggtggtggcaaagccacagactgtcactatggtgggacaaacccctttgctctgaggctcagcttccttatctgtaaaatggggaggattccaacaccttcccgtgggctagtccacagcaagggctagctacacagcactgtgatgactgaccctcagccacggcaggccaactgccccacagcagcctgaaacacggccctgatctgactcctctcacataagggagaggtctaagccctgagacccagcaaccatctctggccagcaagtgtgtccctgtaatctgccctgtaggagggctttgaaatgcttttcggttttatggagatcatcaaggcaaatgggacattactttaaaggggcacagactcgtatttctgtctttttttttttttttttttttttttgagacggagtttcgctctttcccccaggctggagtgatgtgatttcggctcactgcaacctccgcgctccccaggttcaagcgattctcctgtctcagcctcccaagtggctgggattataggcgcccgccagcacgcccggctaatttttgtatttttagtagagaccgggtttcaccatgttggccaggctgatcttgaactcctgacctcaggtgatccacccgcctcggcctcccaaagtgctaggattacaggcatgagccaccgcatccggctgactctatttcttaatccactaaaagcccttaataattatccaagtaatggctgagaggggtgggtagatataagttaatcagtcacacagctctgacgtttgtgatttgaagtggttgtctccagtccacaggggccaggatggaaacccagctcaggaggggctg

SEQ ID NO: 34521 - DNA, 1917 bp, Homo sapiens
agaaagaaaaccatgtgctgcgcgtggtggctcacgcctgtgatcccagcactttgggaggctgaggcaggcagatcacctgaagtcaggagttcaagaccagcctgcccaacatagtgaaacccagtctctactaaaaatacaaaaactagctgggtgtggtcatgcaggcatgtaatcccagctactcaggaggctgaggcaggagaatcacttgaacccgggaggcagaggtggcaatgagccgaaattgtaccactgccctccaccctgtgtgacagagtgagactctgtctcaagagaaaagaaaaccgtttttaaatgtatcagtttaaatactgtctcctgtcctgagacagccactatttgtggttttgtctaggcttttacaattctttctgtgcttataaactatgtacatggccaggcacagtgactagtgactccttcctgtaatcccagcacaatgggatgtgtgcacatctaaacgtcagtgtcttgtaaatggtacatgtggtttctctttgcagtgttattattaaaatctgtctcagttgcacgtgaagtgtacaccttgctgtgcattacatcacatgatttaccacataaggagtggggtgtaggaaggggcccctgttttcagggtgagatgaatgtcaaccgagccatgcttctgttttccaggatgtgtactctggcacacccaccaaggtgagacacatggacagtcaagtggaggatgagtttgatttggaagcttgtttaactgaacccttgagagacttctcagccatgagctaactgccccctggcggccaggaagagaaacagctcctccccgactaggtggaaggctggccaggcaccaagcatgtgtgtgcacttgtacctggtggtttctctgttagcagtccattagctcatgctgaattatttttgccttactttcttaagaaacattaattttatgtatagtgagtatattttgcatgttttaaattgtaaatggagctaagtccaagaaagtacttgaagctctcttccagcgagcttaattgcgtaatccctgttgtcctccagggtaagctgacacgtctacataactggttttccacaggcatcttcagttattgcttgtcaggtggactgttttggatttaaccatgtaatccatgggaccaattgagagtcagctacttttataggcatcaaagtattctcagacacctttaatatctttatggaaacttaatttttggccttttatcaatatgtcataacagcattctgaagtcagacattgttaaattgagctattaaactaatgagttttatgtaagttatatggtcttaatttggtacttgtaaatagcactagttagactctttagaatactccaagagttagggcagcagagtggagcgatttagaaagaacattttaaaacaatcagttaatttaccatgtaaaattgctgtaaatgataatgtgtacagattttctgttcaaatattcaattgtaaacttcttgttaagactgttacgtttctattgcttttgtatgggatattgcaaaaataaaaaggaaagaaccctctttcactgactggggctgttgccaggtgggccagctgccgtgagagctgacatgtttggagggtcagaattgtgtctgcctttcttgtgtctgaagcaagtggcactcagtgagtggcgctgggtaaagggccttctttatttttttaattttattttttgagagtttcgctcttgttgcccaggctggagtgcaatggtgcaatcatggcccactacaacctctgtctcccgggttcaagcgattcttctgcctcagcctcccaagtagctgaaattacaggtatgtgccaccacacgcagctaattttgtattttta

SEQ ID NO: 34522 - DNA, 1084 bp, Homo sapiens
cttttggcccacggagcttctggattgcataggatggtgtgcctgcgggcatcagggtggagcttcctcagacctggctgctttatttttatatcttttttaaaaacagcaatatttattttgccctcagatataaaaggaaactcctcatcaatgactttggaagagagagaaaatcatcatcaggaaggtaaaggctgtgtaaatgtttcttttctaatttgatagacctgtaatttgttaaaaaaaaaaaattgtgactgtcagaaatgctgactgtcgcagtagcatttattaatacctttttcactaatttgaaatactgtatctgttgtgtactaaattcccatacatgcagtctccggactatttaggattcatatggttgggaatctggagtgaatcttccattattgtgttttgacattttcttggcttaccttacatacatggtgatcttaattgcagggcttattctgttaatctgttgttttttcagttctgattcaaaggagtctatgtctactgtgccggctgactttgagacagatgaaagtgtcctaatgaggagacagaagcagatcaactatgggaagaacacaattgcctacgatcgttatattaaagaagtcccaaggtagtcttgtttcagtggcatgtcttgaacaagctgtgtggcattgcgtttctaaagagttgcttagattgggtagtacaaatgatgctggggatagttcacacctgctaagagctatttaatagggacttactggggcttatgacgtaaataaagaatggattggcaactggaaaactaaagacatgaagattttaaaaatcattttcatataattttgaatgttagataacattttatttcttaggagtcagcaatcatagatgtaagcttattaaaatacatgatggggaaaaatgaagttcaagttaaatattgtaaaattctaattggagaaaaaaaaattggcattgccctattgtctttaagcagcatgttcttgcctatcctggtccctcaaacacacagacacagaaggatataaagaaagctttagtgttttcctga

SEQ ID NO: 34523 - DNA, 1412 bp, Homo sapiens
tacaggcgtgagccactgtgcctggcctttttttttttttttttttttttctgtagagacagggtctcactatgttgcccaggctgggttcgaactcctggacttgagcagcgctcctgccttggcctcgtgcagtgctgggattacaggtgtgagccatggtgcccagctgatagagcatttttttttttaagacagtctcactctgtcacctaggctggagtgcagtggcacaatctcggctcactgtagcctctgcctccctgcagcctccacctcccggcttcaagcagttctcacgcctcagccctccaagtaactgagattacaggtgtgtgccaccacgcctgctaatttttgtagttttagtagagacagggtttcactatgttggccaagctggtcttgaactcccagcctcaagtgatccacccacgttggcctcccaaagctctgggattacagatgtgagccactgcgccctgctggagtattttcgatccaagagaacatcgtggacattatgtagcagcttccagccttctttctcatagaaacaaaggcagagaagcagcacccagactttgggtaagcaaactgtaagacagcagttgtgagacccagcaaacttgaatctcactcagtggggaaacctcagctgatgtgaggctatttttatttctaaatctgtacttagcgtgaatgctgatgggatttgccgggggatgttactgtggtgaggaccaggcccctgcaggtgtgcccaactctggatggctccctgccttcactgagtccatcgtgtgcttctctgcctggtctgtttttccgagtcttcgtctttgcctgtcgacaccccgtgactgctggcatcatgccttcttgtggaagccaccatcgtccttgctaactgagggttgtggagttgtgtaattcagcttgatgcagggaggaggtgtattcccatgtgtgggcactgtcatcacccacacagggaggtgagcccacctcacagaaggaacacagcctggccagggggcagtctgagcctgcgtgggctctgctgcattctgtgtggctcggctctcggcacgccttgactcaagactgcatggattcaggggccccttcctggctcagaggtgaccccagagctgaggagaacctagagacatggtggctggggctgggccagcgcctggagagagtctgaagctgccctcacagggattggggaggtgaccgaggtggggtgcctgtcccccttcccacccctcccaggcctcattggtgtccaccaggcaccttccacgtgtctatttcccgtattcttgagaacctctccgtgaggttagtgttgggtttgcatgtctgtaattgagggaagattttgagcctgggagagtttttgg

SEQ ID NO: 34524 - DNA, 1036 bp, Homo sapiens
gctctgtcatccaggctggagtgcagtggcatgatctcggctcactgcaacctctgccttccaggttcaagcgattctcctgcctcagcctcctgagtagctgggattacaggcgcacaccctcatgcctggctaatttttgtatttttagtagagatggggtttcaccatgttggtcaggccggtcttgaactcctgacctcgtgatccacccacctcagcctcccaaagtgctgggattacaggcgtgagccacctcgcctggccaattcttgtaatttttacaataatggctggttagccactgaaacttttggagtggtgagaggatgttgagtggtggaactgcacagtctgaaggtggagctcagcatgtggtctttccagttgctgtgttagatgttagagctctctctggacctcttgatggtgataaaagtacttttaacacttcgtgcttattatcagatttttgataaataataataataattagctttttatgtgcgattctgtcatttcaggaacacaaatgtcttctgtagttactactgtgctttgtgacagggacactggcaggtctgctgtagaaacagtagggatttcagagccagcgagacccagggctggactgtggaggaggtccctgaactgatgagtgatacaccgagtggagtgctgcaggcccctgctattaacatcttagatgagtagggttcgttgtcacagttaatgaactgaccttgatctgttactgttcactaaagtccataacatattcagattttctttactctcccgttctccattctgaggtcctttttctgtcccaggacccatctgtaccacccttcttgattgcctctcaggctttccttgtctgcagtgaccttgacagctttgaggagtactgcccaggtggagtgtagggtgctgctctactggtatttcttgatgtttcctcataattaagctgggaaagatggtttttcaggaggaagaccacagaggtgaagcatccttatcatatcccgcc

SEQ ID NO: 34525 - DNA, 1101 bp, Homo sapiens
ggttgaggaagttctggataatatccttaagtgtgttttccagcttgtttccattctccccgtctccttctggtactccagtcagtagtaggtttggtctttttatgaaatcccgtgttttttggaggctttgttcgttccttttcattcttttctctctattgttgtctgcatgtcttatttcagtaaggtggtgttcaaactctgatatcctttgttccgctttgtggattcggctgttaatacttgcggatgactcatgaggttctggtgctgtgtttttcagcttcatcaggtcatttatgttcctctctaaaccggttattctagttagcaattcctctgaccttttatcaaggttcttagcttctttgcattgggatagaacatgctcctttagttcatcattgtttttttttttattacccatcttctgaagcctacttctgtcagctcgtccatccaatcctccgtctagttctgcgccctttttggagagacattgtgatcatttggaggagaagaggcactctggcctttggggttttcagcattttttcgttgattctttctcatcttcgtgagtttgtctagtttcagtctttgaggctgctgacccttggatgggggcttttgttgtggttgttgttgttgttgttgatgctgttgtcgttttctgctcgtttgttttccttgccgtagtcatgtccctcttctgtagggctgctgcagtttgctgggggttcacttcaggccatattcatctgattcactcccatgcctggaggtgtcactaaaggaggctgcagaacagcaaagatgggtgcctgctccttcttctgggacctctgatctcgaggggcaccaacctgatgccagtagggtcactgctgtatagggtgtctgacaacccctgttggagggtctcacctagttgggtgacatagggagcaggacccatttaatgaagcactttgtcccatgatggagggagtgtgcttcagtggggggaaaccacttgtctgggctgcccaggttattctatatttaacattttgagaaattgccaaactattttccatagtggctacaccatcttac

SEQ ID NO: 34526 - DNA, 1039 bp, Homo sapiens
aagatattcaggacttgaactcagctctgaatccaatggacctggtagatacctacagaactctccaccccccaaaaaacagaatgtacatttttcctggtgccacatggcacttactctaaaattgatcataaattgatcatataattgatcatataactggaagtaaaatacccctcagcaaatgcaaaagaaaggaaatcataacagtctctcagaccataacgtaatcaaattagagctcaagattaagaaattccctcaaaaccatgccactacatggaaactgaacaacctgctcctgaatgacttctgggcaaataatgaaattaaagcaaaaatcaagaagttctttgaaactaatgagaacaaagagacaacttaccagaatctctgggatacagctaaagcaatgttaggagggaaagttatggcactaaattgccacatcaaaaaccgagaaagatttcatatcaacatactaacatcacaactagaagaactaaagaaccaagagcattaaatatataagttgctttgggcagtatggccattttcatgatattgattcttcctatccatgaacataaaatgtttttacatctgtttgtgtcctctctgatttccttgagcagtggtttgtagttctccttgaagaggtccttcacatcccttgttagctgtattcctaggtacaaaacaaacctcagagctagcagaagacaagaaataaccaagctcagaatggaactgaaggagacagagacacggaaaacccttcaaaatatcaatgaatccaggagctgggtttctttaatcaataaaatagactgctagctagactaataaagaagaaaagagagaagattcaagtaaacacaatcagaaatgataaggggtgataccactgaccccacagaaatacaaacaaccatcagagaatactatcaacacctctatgcaaataaactataaaatctagaagaagtggataaattcctaacacatataccctcccaagactgaaccaggaagaaat

SEQ ID NO: 34527 - DNA, 1063 bp, Homo sapiens
catccaggcacagggccttcctggtattatttcaaagagagaaagctgatgttttccaaacagggcagaaccccagttcagcaccacagtggaaacaccttaggccagggagtgttagaagctggtttcagcattgcagatgggttttctattatcccacctgtgcgttccacagtctggaagatggaggagggctgcaagcacaatgggaatgccaatccctccaatcccaaccagctttcactatgcaaggtaagatgtcaatcaatcttttttcttttttcttttttctttttttcagagagagacaaggtttctccatgttgtccaggctggtctggaactcctgggctcaagcgaccctcccacctcagcctccaaaagtgctgggattacaggcatgaggcaccatgcctggccaataaatccttttttttttttttttttgagatggattttcgctcttgttgcccaggctggagtgcaatggcaccacctctgctcaccacaacctccacctcctgggttcaagcagttcttctgcctcagcctcccgagtagctgggattacaggcatgtgccaccatgcccggctaattttgtatttttagtagagacagggtttctccatgttggtcaggctgatctcaaactcccaacctcaggcgatccgcccgcctcagcctcccaaagtgctgggattataggcatgagccaccgcgcccagcccaataaatcttttataacgtctcacagtttaccccattctctttctttccacagctttctatatccactcttatctatcattcgtttttatcccttcaactaaacctttaaaaacctctagacaaatttactcttcccataacaaaaaccacattttcatgccttctttataatctttaccaaagacataacctatttttcttacatgctctgtattcagaattgtttcttttacatctagtagttttaattatatatataaactacagtgttttttgagacagggtctccctgttcttgctcaggctggagtgcaacggtgtgatcttggctc

SEQ ID NO: 34528 - DNA, 1025 bp, Homo sapiens
tgtctttgagctctgaagttctttcttctgcttgtttgattctaatggtgagattttctagagcattttgcatttctataagtgcatctattgtttcctgaagttttgatttttttttatatatgccatctatatctatttcattgaaaatttctcccctcgttttttttttttttttttttttttttggagtggtagggggacagagtctcactctgtcactcaggctggagtgcagtggcatgatctgggctcactgtaacctccacctcccgggttcaggcgattctcctgcctcagcctcttgagtaactaggactacaggcatgtgccaccacgcccggctaattttttgtatttttagtagagatggagtttcaccatgttagccaggatggtctcgatctcccgacctcatgatctgcctgccttggcctcccaaagtgctgggattacaggcgtgagccacagtgcccggcctcccctcatttcttgtatcatttttttgacttccttaaactgggctttgcctttctctggtgactccctgattaacttaataactaaccttctgaattctttttcaggtaaatcagggatttcttcttggtttggatccattgctggtgagctagtatgattttttgggcatgctgaagaaccttgttttgtcatattaccagagttggttttctggttccttctcatttgggtaggctctgtcagagggaaggtctaggactcaaggctgttgttcagattcttttatccaatggggtgttcccttgatgtagtcctctccccattttcctagggatgtggcttcctgagagctgagctgtaatgattgttatctgtcttctggatctagccacccagcaagtctaccaggctccaagctgtcctggggcttgtctgcacagagtcctgtgatgtgaaccgtctgtgggtctttcggttgtggataccaacacagtatttggggtgtctcctgggagcaggagcaatctgcttccttcaaagga

SEQ ID NO: 34529 - DNA, 1050 bp, Homo sapiens
tatcagtaatctctaaaacagtacttggcacaatagcatttgttgaatatatgaatgcacagaacagcttacatatcgagtacacttcagcaagagtttcctttgaatcacttaaaattatctatcagaagttgttgcaattaatcttacttagaatttatattaaacctgttatggattttaaatcgaggtttatttattgctaaaattgcgggaagttattaagtcctttaaagtctttccatgtaaattatattttaattttataattggtattaggaataaagtgttttaatttttatttttattttccttttttaggagttaacagagcagtttcataaagttgaatctcaactgaataagctaaatcatctcctcactgatattcttgctgatgtgaagacaaaaagaaaaactttggcaaataataaattacatcaaatggaaagagaattctatgtatattttttaaaagatgaagattatctgaaagatattgtggagaatttagaaactcaatcaaagattaaggctgttagtcttgaagattgaaaattactgaaaactgaatctttattacgtgtcctcttttatttattagaagactgtgtataataaacactactaaatttttaaaatttgaggtcaatggaacatttaatttgatgaattgaactattatattaatttgtcttttttctcatgtagtacattcagaataccagtgctttttatgacttgagcatgtgtttagtggtacttagtcctggtaattttttacttacagggaaaaagcattattacataatgcaaatattttttaatatagttatctctctcctttttagaaatagaaattttctgccgttaaatttttttttgagatagagtctcactctgtctccaggctggaatgcagtggcacgatcttggctcactgcaacctctgcctcccgggttcaagtgattctcctgcctcagcctcccaagtagctgggactacaggcgcacaccgccacacccagctaatttttttgtattttagta

SEQ ID NO: 34530 - DNA, 1022 bp, Homo sapiens
tttcttattaagaatttttgtttttcatacttactagaaaagatctttttagatgtaggtagacatagatttttatcataccactcttgggcatatgttaaaaggaaaaaaataagtcaatttaaatggttagggtagttctaaagcatcacatttcaatgttcaattcttctgttattttttgactcagagttgtctgtaattttccacactgtgtatcaggaatgttgatgagaaagtatttcttaagagtacctggccagaaacaatcatatgatgttcttgattaagatgcatcttcatttcagatatgttaaaatgtgaaaaaaaaatgcatccaagaatcactaaaatatggtaatctcactctaatcttatcagtgggtatcattagtgtttttccctagctcaatgtgatataaaatgccgtatcaattttaacttgtgtttctattattaatgaagctgaacttcagtatctgtagcaatgttgttttagcaactgtatgatctttagtatttaattgaaggtaaagatgagattgttgtttctcagtatattcaagtttaccaagtttgtcttagaggatatcactaaatgtagatataatgtcgaaattacttgattttcaaaagtatgtattttaagaagtactcctctgtgaattggcatttatgacaggtcttaagtagtcattcttgaacttgtacattagaatcatcagggagcgtatcaaaacgcaggttcctagctctgtacagagattaagtaatttagtctagtgggggggtacaggaatctgtattcataacaagtacctcagataattatgatacttgtggactatgcctagaagctgtggaaaattgagggtagttagagcaacagatttttctgagaacctctttggtgatactggctaaaatttataagtagaatgcttgattagaaagctatggaaacttgttaataatctggtttaaatgctagacactgaggaatttgaatttactgtaataaa

SEQ ID NO: 34531 - DNA, 2032 bp, Homo sapiens
gtaactagccacaaatctctgaggttaaatgctaaagaagaagaagccactaaaaagctgaagcagagtcaaggaattctaaatgcaatgatcactaagatcagtaatgaacttcaggctcttactgatgaagttacacaattgatgatgttcttcagacattctaatttaggtcaagggacaaatccactggtatttttatcgcaattttccttggaaaaatacctaagtcaggaagagcaaagcacagcagcattaactttgtataccaaaaaacagttctttcagggtatacatgaagtagttgaaagttcaaatgaagacaattttcaacttttagatatacagacaccatctatttgtgataatcaagaaatccttgaggagagacgactagagatggctagactgcagctcgcatacatttgtgctcaacatcagttaattcacttaaaagcaagtaattcgagcatgaagtcaagtataaaatgggcagaggagagtcttcacagcctaaccagcaaggtaagcataagaaatgagattggattcacattgtaattattgttaggaatagaggagataatattgctgttaaagtactttagaatggtgcatctgagaagagattacattttattttctttgttcagtgcttatttgtgatctgtgtcaatgtttcatacaaatagttccatacgttaatggagggcagcaatagtaattataatctctaccacattatctaatttattttaaacaaaagtgctttaatttgcattccgaattttaaatttgtgtaatgcagatacagactggactgagattttctttttaagatgtggctagaaactaattgctttattatgggtattctgcctcgtttgctccaaccagagcatagtgctaatgaagtcagaggtccaggttcagtagactgaaactgatttctttttgagaatatatggatagatgtattgcagatgtctgtctgcactcttggagagcttgttttcttggtaatataactgctagatacttgagtaaaaatgtaacttttctgaatcagaatatcagcaccaagttagtttctatagctgacaaaacatttgaatgatataggaaatccaataattacgtagaagtgctaaaatcaactggccaactaggacctattgaagtaattttaacttaagaaaaactagtaacatatacttggattcagtgaatagtgtcctattaataatgattctgattaaaagaagtataataagatctctattttggtagccgttactatatatatggtagtaatagcagtaaaatttagtaattcatacccttgacttagtccacatttttcccttttaaactgtaatttttgtttatatgaatattaaattagttttcattcattgagcttattatctggtcacctaaagtggaaagtgaaaataatcttaagatgatttcaaatttaggcatacagtttgaaatgtaattgcttttctttgtataggctgtggacaaagaaaatttggatgctaaaatttctagcttgaccagtgagattatgaaacttgaaaaagaggtcactcaaataaaagacagaagtttacctgctgtggtaagagagaatgcccagttattgaatatgccagtggtaaagggagattttgatctgcagattgctaaacaagattattatacagcaagacaagagttagttttaaatcaattaataaaacaaaaggcatcatttgaacttctacagttatcatatgaaattgaattaagaaagcatcgggacatatatcgtcaacttgaaaatttggttcaagaacttagtcaaagtaacatgatgctctacaagcaattagaaatgttaacagatccatcagtttctcaacagataaatccaaggaataccattgatactaaggattattctactcataggtacgtatgcttcattgtttctttagtaaatatttccttttgtttttgcgaaatactagagagagtttgagct

SEQ ID NO: 34532 - DNA, 1327 bp, Homo sapiens
tgcgagaagcaagcggaacttcctgaggtgactgacgcgggcctcggttctgggcgcaggggtgtggggctggaggagtggccgcgatccccgtctgcacccaggtgcctcttttttttcctgcgctcctgggggctccttccaggtgctccagcagctgcccggggatcagggcccggtccgctgggcgaggagctggggcgggggctgtgcggggcctgtcacccccgtcttctgcagctcggtgtcgacggcgattcggtgggcttgtgcgtttgttttgtcagcgtgcttaggtgtcacagctgggtgaccctccgaaggaaggttttgccgctggcgcgtctggtgtatcgcggccttggggccgcggatccctggggcttgccgctgcctctggggttcgcgcggccctggcgtcggggctgcctcagcgctggctgaaggccggcccgaagcacccttaattgtggccgcgcgcttccctgctgctcctgctgttctccgcgtcgcggtggtggactctggaggtggagccttgcccggcgagacgttgaggtaaatatttagttgatcttcagaagatgtgccatgcttatttgcgtcttcttacgtacggagggcagggaagagaggctgcctagcctcctggtggcttgggtttgtttggatccatttattttgaattaaaaacaaatgctgctctataaagtgtaatgcattttaaaccattttatctttggaaaaaaagataaaatggatccaaatagatccactttcttgttaattacttttcgttactgttgcggttttctgagaactagcctaattgtttctgtttctctttatcatcatcaaacattgcagctacgactacctgtcatttatcccgctctcggatatcatgtgatatttgtctgtgtcttctttttaaaaacactgtcgtcatatttgtggtctaatacttgttttcttcccccctaggaggaatcattatagattctaaaaatatattttcccttctctgtggacttggtataaaacgtagctttttttctgcttggatttattttctaaaaatcaacaccgtaaacccatatcagatacaacaaaattggggtagttaaaaccatgagttgtggaaatgagtttgtggaaacattaaaaaaaattggttatcccaaagctgataatcttaatggagaagactttgactggttgtttgagggcgttgaagatgaatcgtttctgaagtggttttgtgggaatgtgaatgaacagaacgtgttgtctgaaagagaattggaagcttttagcattcttcaga

SEQ ID NO: 34533 - DNA, 1049 bp, Homo sapiens
tttaaaaagaagaaagcctaaagactctcggcctagggacgtccgtgtgtgccgcctctgtttcctgtaccagatttttgtattctattttcctagctgttgttgcgtccttgtttgctgaggggtgggagccacccagcgtctcagggacctgtccctccgtcacgtcgtcaaagtgtgccttgtgtcttgtgtcaggccttgcccttcccaccagcatgtccctcgtggctcagggtgccccaggcctgcccagctagtgctgtcctcccatctcctgtgggcagcccctcccggcagccagggcttcctggaggcgatgcagccaggcccctgtgggtggcacggaggggctgtgacctggtccccagtgttgccctccccagtggctggcaggggcctgcttgctcactagagagatggattctcacctgtcacctgactcgagccccctgcttcctggcctaggcgagggttccaggtttcagacactggcagccaatgaagactgtgctcgctgggtggtgcaggcctggcaccaggaggcttgcacccgcctttccttcctgacgtcctctgtccttggggctggcccatagcagtgcctgccgtgcctctggtacatctgtagccaattcccatatcatggggaaaattcgtgtctattttcagtcgtacgcatagacgccccaggatggggggcccactgtggcggaagggggtccctggaaacaactctggcacagaacctgccctgcaggctgtagggggcatggtgcctggagctgaggggcatccgaacgcgttgcgggtggttgtgaggaggcctgtctgcatctccttccggccccactggggtccaggggtgcccagaaaggagcttcccctgcctgcctgagtctgtccccccaggcttcatttcaaacaccgtggcacctccgagcaaggcgggccgtgtgtaaaagcttgcttccccagccagcactgcagggccctgaggtggtcgtgtccctgccctcaattcttgaagcaccagctccctgccccac

SEQ ID NO: 34534 - DNA, 1044 bp, Homo sapiens
gtgtgaggagacccgctgtaagcaggactgtcctggagacggtgccagccaaagattgggtagcactgacccgctgccacacatggctcaacttggccaaggctgcctggtggctgcgggtattagagctgggccgtagacagaaaccacagggctgggaggtggcatctgactgtgaccgcctggctggggcagggagggacccacctcaggctgtggggctggcagagactgggcaccctgtggcctgtagccttggctaggtcttggcagggatggggaacctcccgggcccaggcctgggtgccccagtgcctggccagggggatggggggactcctcttcccgctgtgagctcacagcccccctcgaccccagaaactggaggagcaggaccgccgggcactgagcatcaaggagcagctgcagcaggagcatcgtttcctgaagcggcgcctggagcagctgtcggtgcagagcgtggagcgcgtgcgcacagatagcacgggctctgctgtctccacggacgactcagagcaaggtggggcgtggggcgcggggcagcctcacctgggcctccgggtgcgcagtggtgcagctccctgggtggagaggaggtgcctggtgctggggctggggagaaccctcccagctccctgctgcactggggtgtgtgtttgtcactaagcgcagaagggactggacagggagggtgggatgcagaggctgtgtggcccgctgaggactggtgcttctgaggccgggttctcagccagagccctcctggcgtctgctgccccagggcccagacagcgccctccgcacttctgcccctctgcctagagcttctgcttccagaaaagggagaaatgggctggcaccctcagagtggcctgaccccatccccactctattctccctagaagtggacatagagggcatggagtttggccctggtgagctggacagtgttggcagcagcagtgacgcggacgaccactacagcctgcagagtggcaccggcggcgacagtggcttcgggcc

SEQ ID NO: 34535 - DNA, 1065 bp, Homo sapiens
tccagaggaggtgggaggggacgccaccctggatggaggagcaggccccagctgtgcctggccttgacgtaactgcactcttctgaccctaagacgtggtctgtgtccctgactctacagaggaatgcactgagcttcagggaagacgagggctttgcaggtccccagccgactgagagtccgtctgagcccatggctcctgcggttgctgctctttattgccctggctggagtgcgatggcaccatctcggctcactgcaacctctgcctccctggttcaagtgattctcctgcctcagcctccctaatagctgggattacaggtgtgcgctaccacgcccggctaatttttgtatttttagtagagatggggtttcgccatgttggccaggctggtctcaaactcctaacctcaggtaaaccacccgcctcggcctcccaaagtgctggcattataggcatgagccaccgtgcctagcctcctctatcactttaataatcctaaaaaacagtcacatgcaccgtgcgtgttttccagcagtacatggcggccgccagctggacacagcgattggcgcactttctcctgtcttctgtttcaggacaatgtgttgaacatcattaaccagatcatggatgagtgcatcccccaggaccgcgcccccagagatttctgcgtcaagttccctgaggagatccggcacgacaacctggccggccagctgtggttcggtgccgaggtagcgggtggccacccgggttcggaggtcctgatgtggggtggcgtctagccaagtccctgcgaaccttgtgcatgggcgcctgcaggtgccgggacctggtgtctcctccaagagctccgtccactctgggttacgtggtgtggtctgagcctggtaggccgtgcacccctggaggatctgggaaagccatgaactggtgcccccaaaactatacatacaaatgaaatttcccatgtggtttttatgaggttcacaggcccccagacagccaggacctaaaagtggtttttaatggcagtaatgcccacatcaggaacaagt

SEQ ID NO: 34536 - DNA, 1064 bp, Homo sapiens
ccgtcgtgctggacagatttaacactaagtgatgagtaggttgagattataattgtttgctttatactctgcatacttagaaatggaaatttagtaccccaaattttcttctggattctgttaatcaggatagactgaattttgtaagctgtgttcattcatttcctgggacccctgcctgaaggtgtctgctcacagtgaggggtctgggtgggatgactgacacaatgaataaagacccctcctgctcccgccccaggcactgctgggaccatgtgggaaacttggcctcttcctctgaaatactggtcctgaatggccgggacgctagctcaggggctaactcagcttttcaaatagcacggggtttctgtgtgtgcgtgcgtgcctgtgtgtgtgtgtgtgtgtgtgtgtgtgtgtgtgtgtgattacagctctctttttgcagatggtcaacacctttgtaggtctggttttaaggtctttaatttactgaaatcaaggtacagcggcagggtatttgcttgtgggcactgatgccaagtcagcagtgtgactgtggtgcccgtcatggcatggtgtggggcggggtgtggtgagtgttgttcctcgtggtcgtgaagacactcggagcttccctgttctcgggggcaatggctttggacacgctgttcaggatgcccctttcccacgcgcaggcaattataccgtcagagcccatggcccctagacatcatggaggcctcctcaaatcacagagaaccacaaatggcctcgcaggttgttgtagacgccgtgcgcttgtccggggtgggtaaaggctccgaggctcaggtccagggcccgagggggctgtccttccaggtggatgggggtccccagggtctttcagggaagcttgagcccaccccaagagcagcttcctcagagttgtacaggcccacagatttgaggttttaccttggaggagggttacctggcagggtttgctaagtggatgtcagggctcccaggccctcctgcatggcactgcagcatggaggggtctggccaagggttggctc

SEQ ID NO: 34537 - DNA, 1023 bp, Homo sapiens
acaaccaaaaatacacttcagggctacatgtggctgccacctagcttttggaaggggccgtgagagccaggctcagggactgtgggaggtgtgcaagcggccgaggggcaggcaggggtggttatggcaggtcccacctgcatggtaggtggtgagcttccagggactcatggcatgagcaaaaataactagcacaccctttaacttttttgcatagttgggaattagctgtctccacacctgtgtggcctgccttccaaggaattcccagcccaggagttttaaattagtgctgcctgtggcattatgtttcaggtattggaattactctgtgtttgacaaggggaaggcaggtgttctgtgtctagaaaaggaaaaggtgaatggagtgatcttttatgcagcggatgcggtgagatttcaggtgccaccagcaacctgcattccacgggccgaggagctgtgggggtctcctctggggctctgcagatgagatgggattgactggccatgatcaatatgacagcgtcctcaaaggaggggcagacgcagcctgcggccctttcacggggagctttgtgaatccaattccttccaagacaggagcaaaagatcctatttatttgcctgaatctggaaagagataaaagcttttttcttttcttgtaattccagccagggtcgattctacatggacatatttttctgcatttttgtaaattccttacagctgaggtgtgtgaagtgcgattctcattaaactcacagggccaaagctgagcctctcgactgatgccactttaaatattgggtatgggaagagctgggaggtgggagtttgacagaagaatgaagagaacgtaatgtttcctttgataacttttccttggagttacatgaagaattgggtgacagtaagaaaggatataaacaattcattgtaagctgcaaaatttagttgtatttaaataatttaatatgatttaagagtcactaggatgcagtgggatggtcctattatcg

SEQ ID NO: 34538 - DNA, 1014 bp, Homo sapiens
agcaagactccatctgtctctctctgtgtgtgtgtatatatatgtgtgtgtgtatatatatgtgtgtgtatatatatacacacgtaacttttcagattccataatttccatttggttcctttaaaataatttctatattcatttgatgcagccttattatatcattgttttctttctactacccactagtattccagctatgatgttgctcctcagggtgtgtagctttgcgtatgcccacagtcaccctgggatgacagtcattttggtagagttctcttcctctttccctgaccacattcattaaaccactaattgccaattctattgttttcaacaatgccctggggcaccatgctctacaaacaaatccaatcaaattctgactcctttgaagagagagtttctgggaacactgtgtgatattccttctgacccctggatgccttctcccagctcttttcttcagttacctcctgcaaactatctggcctgtagctgagcctgcatcttgtctctcttcccagggtttcatggcctccactgtttctgagtgccttcaggcttgaacctcttcattctttgttgcaaacaaagtcagtttctttgggaagagattaggagctatctgttttactgcctgtttctctacccaggcaaaatctctgagcagggctcagagctgagggtgcagaaaacagtaagcttctcaatacaactgttcactgttaaagtttcctttctaactattgttattgtttcatttcatgactattacaggttgagtatgcctaacccgaaaggttccaaaattcaaatccttttgagtgttaagatgatgctccaaggaaatgctcattggagcattttggatttcagatttttggattagaaatgctcaattggtaagcatgatgtaaatactccaaatccaaaaaagtctgaaactggacacacttctggtactgaggatgccagataagggataagggatactcaccctgtgctactgtg

SEQ ID NO: 34539 - DNA, 1837 bp, Homo sapiens
aggaaaggaagaggctgatccacaaacacaagcgtgaatttaaaggggccgttcgagaaatccgcaaggacaatcagttcctggcgaggatgcaactctcagaaatcatggaacggtgagggggacgtgtgtgtgcgacacgattgtggtgtcactcagctttggtgctgtgtggccctgggcagagcaccgggcacctggcatcccacagccttggctctggctgggggttggagccaggcaggttcacttccccctgtttgaactgaacgtggccacggtggctaatgtggttctgatgtgggagagagagggcaagatgctctccaagaactaatccaaaaatgggcatttgccttttgtttcttttagggatgcggaaagaaagcggaaagtaaagcagctttttaacagcctggctacacaggaaggcgaatggaaggctctgaagaggaaaaagttcaaaaaataaattacattttataaataaggcaaggaactggacattacctcacatctgcaattccaaccctctgggaggccaaggcaggaagattgcttcagcccaggagttcgagaccagcctgggcaacacaggaagaccccgtctctaccaaaaaaacataaaaattagccaagtgtggtggcacgcacctgtagtcccaactactcgggaggctgaagcaggaggactgcttgagctgagtccaaggttacagtgagccgtgattgagccactgcactccagcctcggccacagtgcaagactgtgtcgcttaaaaaaaaatttttttttttgagacggagttttgctcttgttgcccaggctggagtgcaatggcacaacctccacctcctgggttcaagcgattctcctgcctcagcctcccgagtagctgggattacagacatgtgccaccacgcccagctaattttgtatttttagtagagacggggtttctccatgttggtcaggctggtctcgaattcccgacctcaggtaatccacctgccttggccccccaattataggtgtgagccacagcacccagccaaaaaagtaattttttttagagtaataatgctataatgttggtgtgattccaacctccagctccccccacccgctgcctgcggttttgtttctgttaaaacgtcacctgatgaaatagaatgaatcctgaaatgcacctctgggatcgggaatggtctgtgtgttatcagctgcgactggttcactgcgtctggacaagcctcatggggactggggattctggccagtgtaatttctgtcaaccacggacgtttgccttcatgtgtagaatttactgttgttatgcaaattatattttcaattataaatgaaacaagtttgcagatattttagaaatcagagaagggaaacatcacccacagtccctctgctggaacagccacagttggccttgtcctacttacgtccttcagtggatgcttctgggtgctggggttctccattcaggacactgcactctcggaggtgggaggagactgggttgcgtctgtgccgacctgggatgcagtttcaggtcagaatcagaagatgtgcaagttacgcatgacacagctttttaaagtgcttttcccctgcactaatcaagagggaggtcagccctcaggtgtgctggacccgggagggactgtgagctgtaagaagtaacgagccccttgaacttcacaagctggccagggagccatatcccgaatgccactgccacttcctcgtggtgcaaggcttgttgggacctgccaccttgctgagggaggtgctgaagtaggtggtttccctgttccaatg

SEQ ID NO: 34540 - DNA, 1035 bp, Homo sapiens
tttccaaggatggtctcactatcctgcacaaggtgacaggaagccccaagggacagtctcagctggacccaagaacaagtctttgatggcacatcctgtcctctacaggctgctccaaattcacctatggcctacccgcctccctgcctttcaccctgaccctgacaggctgtaccctgcatccacttcctgcttgacatggctgtggcttgtgcctttcatcctgccccaaccctgccccttattggcccgcaccagcccaggatgctgctggagccgaaggcatcagtgccatctccgcagctacccccacaggaccgtcccgcaccaccagcacagccctggcagccttgcctcgtgccttcccctcatgcgctccggcctcctcgcaggcctggcttcgtctctggagtagttctctgcacctagaactccccacagccatgctgctcgcgcccacacccttgggaagccaggccttccctggcccacactgtgccgtgctccctgcgttttgtctgtggtgctgacccccgggcacgttacaccgtccttgtctctgccccactaggatgagagttccatgaggacagcaactcggctcgttccggccaggtccctggagcatagagcagataagctagctatcacagactccgtcgcctggtcaaaggctgatgaggatgagatgtgagccctgccccttatcctgtatccacttcctgctggtgtggctgtggcttgtgccttttatttaaaagaatttgggttggcctggccgaggggcacagcaggtctcatggtctcggtagactgggccagtcaggcccttgagtttggtctccatggagacgaggcattccggcactcgaaggttacatccacatgggcccaggagtggctgtatctgtgggtgcagccagggttccaggacacacctgtgcaggagaaagcgggtaggaccaacctcagtgaactacctttcgggagattcctcagaagccaccagccaactcttctggaagccaaggtctt

SEQ ID NO: 34541 - DNA, 1030 bp, Homo sapiens
cctccacctcactgcaacctccacctcctgggttcaagtgattctcttgcctcagcctcccgggtagctgggattacaggcgcgtgccaccatgcttgactaatttttgtatttttagtaaagacagggtttcaccatgttgggccaggctgatctcaaactcctgacctcacgtgatctgcccaccttggcctcccaaagtgctgggattacaggcgtgagccactgcacctggcctgttttcgttaaagcagatgtattctgagaatttttctaggggtaaacaaattctttgtgaccgaatgtccactgatttcgcaatcctcagggcttatcagaacagttttctctctagaagaaaagacgtagatgtggcttagctacttcaataacattatctagccattactagaatgtgccaggaagctagatcttttctttttgtaaaataagaaataaatatatttttaaaatgaagaatttcttctttctaccttagcccgatgcatatgacatgatggttcgcgagcttggctttgaaatgaaggcgcagccctctaacaggatgaagacggaggcagaattggcaaaggaagagcaggagcacctcaggaagctggaggtagggtggcagcacctcaggagcagggctgtgctgctgtccgtccacagccccttctgctccattttgcaggatgggctgaagagaatactctgtttgatcagtggaatattttagtctatttaaagtttatatttattcatgaatacctttttttttttttttctttgagacagagtttcgctctgtcacccagctagagtacagtggcacaatcttggctcactgcaaactccacctcctgggttcaagtgattctcctgcctcagcctcctgagtagctaggattacaggcgcctgccaccacgcccggctaatttttgtatttttagtagagataggatttcgccatgttggccaggcggtcttgaactcctgacctcaggtgatccagtcacctcggcctcc

SEQ ID NO: 34542 - DNA, 1029 bp, Homo sapiens
ctgctcttcttagagactagagaaagttattgcatgaaagttttactgatcattaacctctctacaaatttcacaagtgacagtttttatgtatttttgttttttttttaagttttcagaactttaagatggtgtgtagatagatgcttttatgggccaagaaagcatgttgatatccattattttatttgaacctcaaaatagctcgttctacccatgagctcagagaaataaggtgttttgcccgatgccagagtcagagctgtggggagaacccacctcactgactccaggtgcctcactgaatgcactactttgctccccctactttatcaattccagcctaatatttgtaccagtggcattgatgtagttcctttagcttttacctactgtggaattatagcagtttgaggaaaatcatattgagcctcatatctgtagataacaacatgaaacagataaattttggccttaaataatgttaacagagtttaagattcagttcgggtctgactgtcttgaaccctatttataaggttgcagtcatgacatcaattacttgacatttcttgtaagttaaagtaggtcccatttccagcatcttcagaacaaaggtgtacaaatctaaaactgactctcaaagctttgtcttgtcagtgtgtgaaagttaaggcgttaaagcctggggctgccttctgatatttggctaatccagggggtaaaaggcttaggaattagggcagcaagcatgtggtgcagaacccgccatctgcggcacaccaggaggccccgccactgctcggcttcacgggcgtgaagagaatggccagttattttaacccctctgtgcctttgtctttgctcttttcattgttcaagacttctcgtggacccttagctataaaacgcattccctggggagatcctaattccccgagactggaggtaactgccttggtgtgagttgggcgagtggccttcccctcattgccaggaggcgctgtggcgcaggtgactagagggggc

SEQ ID NO: 34543 - DNA, 1048 bp, Homo sapiens
ggagccattcatgccttgagcttgactagtgtgttcttttttacccttccttttggcaccggtagactctaaagaagaaaagaaagtgattgccccattatccttgaaagttgttttgctcttctcaaaattctgtgattagtagagaaagcctatcgtgcatgaaagcagattgggtgtgaactttgacatcactgtgcatagccctgaactttaaagtatgcactgttctgatgtcccctgtagtggaaatcacaagaattttttgtgagattgtttctgacctgttttccagcgtacacagactttactaaaagagtacaaagaaagggataaatccaatgtattcagagataaacgcttcggagaatacaacagcaacatgagccccgaggagaagatgatgaagaggtttgctctggaacagcaggtatggaaagaaactggaggagggtttttgctgtacatttcacagggaagtcaaggccaaggagaaggctgactctgcatgttttgcatgttcctgggcactcggaaggtccaggggatagccctcgaatcctgtgccttatctggctaggccaaaggagaagcaacctcttctgcaaatgttagctgaatggataaatgccttaactctactacacggcagcagtgtgcacaggagttctcagctgagcagcattgctggagtggaaactggcccctgggcttatttaagaattcccctccatgaggccgggcgcggtggctcatgcctgtaatcccagcactttgggaggctgaggtgggtggatcatgaggtcaggagatcgagaccatcctggccaacgtgatgaaaccccgtctctactaaaaatacaaaaattagccaggcgtggtggcgcatgcctataatcccagctactcaggaggctgaggcaggagaatcacttgaaccagggagtcagaggttgcagtgagcccagatcactctaccgcactccagcctgggcaacagagcgagactctgtctgaaggaaaaaaaagaattaccctccatgagttt

SEQ ID NO: 34544 - DNA, 1074 bp, Homo sapiens
gggttcacgccattctcctgcctcagcctcctgagtagctgggactacaggcgcccgccaccacacccggctaatttttttgtatttttagtagagacggggtttcaccatgttacccaggatggtcttgatcttctaacctcgtgatccgcccgccttggcctcccagagtgctggaattacaggcgtgagccaccgcgcccggccccaaaggtgtttttaacaaacattgtttagcactgccacggtaggaagttactagaagttactagggattaataactcagcgtgtgtcagttgaaacaaattggttcttgaaatattcttgaagaaaatgacgaaaattgccttggcagtatttattgaactaatggatggtttcctactcttcaggtagcagaggggtttttcatgcattttaagtgtaataatagcactttcacatttcaaagtgagataagagaaatggttttttcacatccttttctcctgtccacatgattaatatttcggttgacctctccagatggaatgtgctctaaatggaaaggagggccaggtcgtgcttctgtccctgctggagcatcttctgctcttgcccagctgcttcttaaccccttccactctcttttcctcctcttccagctcctggttttgaccttaaatctgggtttcttagcctttaagttcatctccgaccctggggaagtgacctatgtctggagcaaaatctgacctgtcccctcctgaaacagaacttggaaccagagtggcagtgaccaagtcaccacacgctccctcctgccacacgcacgcattctttcaaagtgacttcacaaattagaggaatccctgaggaaggcaaggaacacttaagtcgggttagatgagaggtttcaaatgtctgccgaggcaccgatttgtggtgggtttgtaaaaccactgaattggatcattccaagggccttccatggcatcaagattttgccttgatgccatttcctttcggaattgctgtgtaaacaccagtgtaatggcagttccttagcaaatagaagaagttccgcagcaaga

SEQ ID NO: 34545 - DNA, 1065 bp, Homo sapiens
cacacccccgggccggggtgggagaataaggtagtgtggttccctagaagagacacatttgtcttcaccactgaagcctcagttttctcatttcaaaagtagagatgatagtatacatcctacccctcgtggtggtttgtgagaattaagtaagatagcacatagagcacacagcaagtgttctctaaatactgttattcttaaccttcttggcttgtcgttcgagtcccgcacagtctggctgttgtccttgcttcgcctcttgcaactcagtttgtccaaaaggtctgccttacctccgaaagtctctaaagggccagctcaggttcaccacccaagctatgtaacccaaataggacaggttgctcaaacttctggtattgagcagatccacctccctgccctgtgctgaaggcctgggacggggacgggaattgctgctcctttttggatctccaatgcttggcccttggaagaaacacaaatatttgaagaaatcaaagatggaacctgagtgccttaggagatcccggtcaggaaaaagtgtaatagttaggaaagtccaaaaattcttctagagggagttacagtcaagttttgcaaggggagtgagctgttcatgggcccagggtgggcagaggacacacatgcaaaggcacattgtcccggtatggtgaagtgtggcactcacagctgtctgagggacagcaggtcgtccagttgactccaagcttgataacgcgtgtaggggccgtgaggccggcgcaggaggcctgggtcttttcatgtgggttagtcccttagaagtaaacaggctgcctcagttggcttctcccctctggtcagttgtagcactctgaggcactcagtctggcaggaagagggcagcccccaggtgccagtctcaggacattgctttatagctgtgcctcagtttccttatttctgaaataatttataaaataagttatattaatgtagttcttaaatcagtaactatattaatatagttactatatattaatatactaactatattattaatatagttactatatattaata

SEQ ID NO: 34546 - DNA, 1043 bp, Homo sapiens
agagatggagtcggtagaagggggcagagagggagagagggccctgtgtggcctccctggacgtgtgtgagccacgtcatctcacaaccaggaggcaggtgggatgacaatgaggggctggcagaggtccccctaggaaggtggccttgctgtcctcaccacctgcagccgggagagccaggcaagcccggggtcaccgggctgctgccctgtccccctccttgggatcttctgctccccaccccagccagctcggtagctgtcccctgttgagcctggacacgtccaagagaagggtggttgcctgccggcagctcttctccggtttgttttttgttttcctgcccttcgtgaggccaagaacctggcctggcactcacgtaggcaagggcctgcctggccatgaggagtggttggctgaagagcggccctggccacacgagcccgcggcgggttcactccaggccttgtttccctcttaggcgaagacctctgggaaattctccggcgaagaactggacaagctctggcgggagttcctgcatcacaaagagaaagttcacgagtacaacgtcctgctggagaccctgagcaggaccgaaggtgccccccgcccccaccccctcctgccctctgccccaccccctcctgccccccacccctcctgcacctgaggctcgttgtgctcagtgggcagcctcagctcccctcaggaacacagcaggggcagggaggcggcaccagacgccctcccagggttccaccggacttgtgagtggggaggttgctgtgcaggcaggctctgggagtcgcctgcctgcattggatgaaccaagtctcaccggcgcctgcccccactatgggcacagctgctgcctttgtcagacctgagcttcgctgatgggtccttcattctggactcgtgaccctccccaaatgtgtgactttcccaccccacaaagctggagtaaaatggagggtgacccagcagagagggggcagggcaggggtccagagtcagcccccaggggacctggtgcccc

SEQ ID NO: 34547 - DNA, 1035 bp, Homo sapiens
cctactcggggccctctcggcccggaggggaaggcaggaccccattctgtgggaggcggggccctgggagaattcccccagcccccaggaaagggcgggcaggcaagcccaccgcccgctaaggaggcgggtgtggttgcatgggccccggattccaggggacctagtagagggcctgtcacacagagccacagcacaggacttggaagtgggaattggggcctggggagagctactgccgtggagggcgaggccagcccccaggctctgctctcacatcccaagtgcaggacttgtcctgttggcaccagggcccgcgtcgagcgcctgctttcatatcatgttggtggcagcgtgtggtgacagacacagcccacagatgccgagtcccccctagggaagcggggctaggggagcaccacgtgggcagatcctagagggctccccgagtggctgggccacagcacactgcagactatttattcctcctggctgctaccagtaactttttgttagaagctgctgacactgacgtttctcctttagaaactgtttttcctcccaataaatataagatgtgtgctgtcagaaagccctgccaccctgcacagtctgcaggtggcctctgtcctgtggtccttagagtttttgccctatggcagcaggtgaggctgcaaattttgttcttgaaaatctgtgcagctggtcgctaaagacgggccaatcggtaaccactcttacagcccagcccaccagctgctttcgacagctgcgtctcagggggacacagcttgatggaggactccagccggcgtgtccctggtaggaaagagggaggtcctgggggtgtcccgtgagtcgccagacccgttcctaagtgctgggagaccacagaccccacgcttgtttacattcttgttctccccagatctccagtggtcatccaggaaacaggtgaaaggaaactactggaaaatgagaggcaaacctgtctcacccaccgtggcaacccagatgtgttggcttttgactgtt

SEQ ID NO: 34548 - DNA, 1047 bp, Homo sapiens
ctggtgtccatgttgagttcttgtctaaacctgtggggtttgaatcctgctgacagtgaccctgactccacctcttcctggtctcccagaacctcccggtggccagcctcctccgaggtcagtttctcgctgtgtcctggtccgtcctgctcgtggctcacaggctcctccccttcgttcgcagctgcatcttcctcccgtgaggctggccgagctccacgctgatctgaagatacaggagagggacgaactcgcctggaagaaactaaagcttgacggcttggacgaagatggggagaaggaagcgagactcatacgcaacctcaatggtacgtttgtttctttcctaatgcaggtcgagtatccctcttcctaaatgcttgagagcggcagtgttttggatgtcggattttgtttttggatttgggaatatttgcattatgcttaatctggatatccaaaatgagcctttccccgagcatcctgagtgcccagaaagcttaggatttgtgttgggggctcaccctcatgagggaggtggccactggcttcagtgtttgggggggctaaccctcatgagggatggtggctgctcgcctcagtgctgtgggctacgcctctgactccttggcttttggccaaggggcccattgggcacagcctgcggggggctatcctccgagcacagatgcgcccttggccgtggtctcagtttgctgtcacagatgccattggcacgccagagggagggccaaggcaggggctctgggtgcaggaaggggccggaggacagcaggaggctctgtcacccagaggaggaagcaggtctgccctagcatcttgaagttttggggacatactccagatgtcatcagaatggacacttggttgtcatgcgcttagtgagtcctcgtccctgtgggtattcaagaagaggcaggacagtcgcctgcttggtaccagcatacggaagacaggtgtgtcctcagagccgggagggttttaaatgacagagttgcgactgttccttttggacccctctcctcc

SEQ ID NO: 34549 - DNA, 1050 bp, Homo sapiens
aaccttatctccctatgtggggaaacaagaaaaacaaaatgttgggtagaaagacgtgtccagggacagaaggaatcccagtagcaagcccgtgcttgttcatttgagcgagaaatgaggaggtgaggagatgggatcggtttagagcacataaaacgcgaccttgggaatgctgaaagtcagtcttaacagggcgctcacctgacctctccttcatttgagagatgagggtacggaggccccgaggggaaagggcacccccaaggtggctcggccggtggggccccccgggacaacagcttcctaattggtgcgtgaccctgggccagctgctctcttcattaagatacggttgcttcatttgttaggtgttcctgaaaacacctgaaatgggtgttttcgaactatgccgaccatctgggcctcattatctcatctcaaatgcaggagtcagattagatctctgtctcaatagtccagttttaagcattcctgagtctttgagagggaaagtaagtgatttgcagaataagaaggaacttttggaacgaaaagggagaggagaaacaggtgggggacagacagacgacagacggttataagactgcgtggggatggggattgacgcctgggcatcagctccacaggcccttcctgaactgctcctgggaccagcagtcaagccccaggcgtaatgttcagcctgcggaggtgggaggtgggagaacgctctgggctggagcggcagggcggcttcttggaggaagggattctggaggggctggggacacggctgggtttggatgtgttgatggcctcccagcagcagggaacaggtgtgaccaggagcagccgggatgcagtgctgcctccccgtgcccactgcactgggcatctgttgagtgggtggagtcccccctccccatgaggaatggggagcccgaaatagactccctgaccgattggaggtggcgctgaggaagtgcactcggacccaggaaccccagcggctcccttttgggtgctggcccaagtcttccacctgctctg

SEQ ID NO: 34550 - DNA, 1930 bp, Homo sapiens
tgtcattgcagcaggtaatgcccagccccgggcatcctgtgcaggcggtgtccttgcagctctacccagctcttggctctgggaaaagggaacaatggatgctgtcaggcatggacatgatggggcttccagaagagttactctgggcctccaggctgacatcaaaggacaggggtgcctcttaaggtgaccttcaagccacagccctcttgctggagacaggcatactcccgttccagttgtcaccacatggctctgtcccagagccatgccctgtgtccttcagagaccaccggaggaaaacaaccacttctgggatgaggacagggcacttgagagaaggtggtgtttggctgggccaccgaaaacccctcgcccctgccagcacactcagtcccctctctgatggaacagagctctgcctgtggtcctgggtcccagccctgaaaaccacaggtccagcggtggccagggacacaggcccacccctgcaagccagcagacaaatcagcggatacctgaaacacgaagttcatggcagattcaggctttgtgtcattcaaagccctctagataggccgaaaaccagagctggttttttaaggaacaccagtgagtctggacatttttttcttttgcttcggtcttttgcagctttctctaagggttctcctttttcaccgtagtaattgcctttccatctaatggcccaaatgtttaaatggcatctaatagtctcatatgaccgctgcctctctggcctcgccctgctgctgtggtcagcatgacctggaactttccacttgtccctttcagtaacctgaagatttcaccgtagacgtgctgtattgcccagaagccatcgtgtcgctagtcggggtcctgcggaggctggctgcctgccgggagcaccagcgggctcctgaggtctacgtggcctttaccgtccacaacccacagacgtgccagctgttcaccactgagctagttgagtccccacgcccacccgggcctgcatggtccccgagctgtccctgcaggactccagtggaagtgaaagaactgggcgccggcgtaaagctagcatgccccacactcccacaccatgcggggaactcgggcagaggccggtgagcagggtgggcttggagcatggggggcttgaggcaggaggagggcagctcagcacaggaaggagggtctgagcctagcagccctactgtgtgcttcagagcagggttccctaagcccttgggcctctgttttctcatctataaaatggaggtggtgggaggggcagtcggggtcagggctggacacagctgtggccagcaggatgctggagcacaggctgtacaggcggatccaccacgccactgtcctgagcacccagtcggtggaagacaagcagagtgactgtagagaaggggaattggccctgtagtgggccagccactgtccttagacctaacatttgtcagcccccagcacctgtgagggtgtgctgtccttgtcccatctcagtgacaaatacactaggacacacggaggccaagtgacccccgagctcccgcacactgcagcccggccacctggctcgcaggtctccacactacatccaagccccccattgccaccagcctttgccccagctccccctgagcacagcccctcctggcagccatgtgcacagatgcacgcacagcagcctctgcctgcacacagagacacggacgacccagtgactgtccacgtggggcagcccgttaactacagagtaaacaaacaagccggcacacgaaggcgtactgggttccacgacagagtcctgcacaacctcgcacaggaggctggccgggtgcggggcccaggcctgtcatcccagcactttaggaggctaaggcaggaggactacttgaccccaggtgtt

SEQ ID NO: 34551 - DNA, 1037 bp, Homo sapiens
ccatcagcccttctgaaaagacaaagcaatagactccctcccagaaagaagtgcaccagaagaatacattttccatacaaactcaggggaggcagacatcctccaccctcacccacccagcccatcctaggagccccggggaagaattcctgtgctagaggtgaaccaagattatccacgtggaaaagatgcagccacagcagggaagactttcggggcaatacagtaggtcagggcttcaagcatggagatacctgaagttatctcgcaccctgctctgagtttcaccctgagcctcactctcgtaggtggtgaagcatgaaatgtggggagagctgctttaaaacccagcacaaggctgggtgcactggctcacacctgtaatcccaggactttgggaagctgaggtggacggatcacctaaggtcaggagttcgagaccactctagccaacatggcaaaaacccatctctactaaaaatacaaaaattagctgggtgtggttttgcacgcctatagtcccagctactcgggaggctgaggcaggagaatcgcttgaacccggggggtggaggctgccataagccaagatcgggccactgcactccagcctgggcaacacaacgagactgtgtcagaaaaaatgaaaaaccagcaccagcctgaagggcctgtgtattgcgtggggtacttttctgcccttgggcagaatctgcatccctcccagccagcaggtgctgcggaccatctcctccctctccctccagactcctgttttcccaccgtccccactcctgctgcaccagtccctctgccctcctttccatgtgctaggccgtggatacctcagagcttacaccggctgttcccactgcctggaacttgctcgtcctgcacttggcttctcttggctttagctggagtgtcaccctgagcgtcccttcccctccatcctgtccccagggacagatgctccaagagagcagttgctgagtgggccttcccgcctcttccatagagccagacagttggcgact

SEQ ID NO: 34552 - DNA, 1050 bp, Homo sapiens
aagtattctgactaaatagcatggtttcttttcatatcactaaagtaatttcttcccaaattgactctggactaaatcttatgatacctacttgttctgattatacttagtcacctgcaaataaggtgggggcagtggtaagaggagctgttgaatgaaattaaacatttgttgaatgcctactgaggataaagccctgtgctttgtgccaggaagattccagaataaatgaggcacagacctactctcaggaagcttttgcaaactaatggagaaaacacatctgcaggcaatgacttatggtataagaggaaatggggccaggtacggtgactcacacctgtaatcccagcactttgggaggccaaggtaggtggatcacttgaggtcagcagttcaagaccaacctggccaacatggcgaaaccctgtttctactaaaaatacaaaaaaaaaaaaaaatgagccaggcttgatggtgtgcacctgcaatcccagctacttcggaggctgaggcaaaagaatcacttaaacctgggaggtggagactatagtgagccgagatcccaccactgcacttcagcctaggagagagagtgagactctgtcaaaaaaaaaaaaaaaaaaaggaaataagattgatgttgaatgggaaatctaagcaggatggaatgacaggagagcgcccacttgcccagctccaataacacttttgacagccatgacgatattgcagggacgcccattcctcatggtgtctgaagccccatgaaggcttgtgtctggaggctgcttcagtcttgactttaagatcaggggatacaaggaatgattttcatctatcccaagccaatagtccagccaaaaatctagctctgagatgatgagaaaaagcaagtcatgaaccatgtcagccatttcatcatcatcatcatcatcatcatcatcatcatcaaaaataaaaagcagacctgtaaccgtcttgtgtgcctggctcttgtcttaattcaaaatatagaagtaaattctatggccagtgaacaatgaccaa

SEQ ID NO: 34553 - DNA, 1076 bp, Homo sapiens
aataacaaaattagcgggacatggtggcaggagcctgtaatcccagctactcaggaagctgaggcaagagaatcgtttgaacctggaggcagatgttgcagtgagccgagatcacaccattgcagtccagcctgagtgacagagcaagactatgtctcaaaaaaaaaaaaagaaaaaagagaagccagagttgatgccctgggaccagtcctcagccagtgacagatgggagccaggctataaatacttcaatatcttcgccccctggatggaacaactttgaaatgtattccacatcacctcccagaggtccccagtagggtcaaattctagttgcctggagtggtaagctgcttactgaagcccacagtgtggcctcctgccttttcatgaatcagttcctcactcccctattggtgttccctggaatcatctcctaaataatccacttgcaatcctgtccctctttcaggatctgcttgcggttggggttggggagtgcagaccaaaacatgatcccttttccactccacactagtaacatgagtttctgtcactggcaaccacaagtctgactattacctccttctgacataattttctaaaatgtatttgggaatttccccacctccaccccactgcatatgtcatcaatatgtagatttcttaacaaagtttaatggtattctttgatcaacctcaagtttcacaaagcacactgcactttaataagggttccccatgactgacagatcagccattcaaaagaagggaagtgtcagagatggctctgctagactcatgtatttttcagtagaacctgggtcaggatggtgtggttgggagatgcttctggagctctgggacccacaagcctgagtgtcccacggtggagtattagcacaacttgaaaacatagtggcaggaggaggcttcctctctcccccgcagttcatcctccaccgtacccaacgtgctcaatagatactggttaaatgaataatggggccgggagtggtggctcacacctgtactcccagcaatttgggaggctgaggcaggtggatcacctgagg

SEQ ID NO: 34554 - DNA, 1028 bp, Homo sapiens
gtccccaggcctaagtcaggccccttaaaactgcacctaagtcaggtgaagccattagattcattctttttgtctacctcacttatttgtttttgccagttacatcctctgtgccttcctactcctttctcctcacctctttcacaacaggacgtgtatttgcaaacaccacttagaaggtccgtacctccaaggaagtctcctttgcagttgatttatttgtactattcccaaagccagcccacacccacaaaaacaacaccatctgccagtcccaggagcaggaagtgtcgaccttgcagcaagattcagacactccaagagccaaactaattgcagaagctccaaaagtgcagaaaaaaagactccaaaatgttgacttttacctctgtcctagaaatcaccctgacgctagctgtcaagatgcttatcagtttttctgccctgattagacatgtgtaactttagccacctactctaaaagatcaaccagatcttcaactctttccataactcgtgcttctcatcctaaattatgtactagaaaaaactgtaatcctctaactgtccatgaccttaattcaactcaatagtatcatggcatgtcatgaacattaagattttatatcccaggatttaatgttaagtatatgttcaccatccaaaaaaaccctagtctcataaagcccacccaagtcaatcaggcctttaactgatctaagtaaccctatgttccaggaacaccctgacaaagttgatttaactgttcctccacctttcttagtcataaaagatacactccaaaaagtgcaagaaaatctagaaaagcgccaacaagaacaagaaagtaacatcccctagtatcaacgcatgttcaactagaacccatagctaaccactctaattactaagttagctggaccccctccccatcctactaataagtctaattttggggcattgtatattaagttagtttcttaattttgtaaaacaacgaatagcttctgtcaaacttatgtatctga

SEQ ID NO: 34555 - DNA, 1034 bp, Homo sapiens
ccgctgtgttacagaggctggattacacattgctcaggataaaattcaacagaccactcctgttcaatatttaggaatggtggtcgataaaaaatgtatacaacctcaaaaagttcaaattaggagagatcctttaaaaactttaaatgacttccaaaaacttttgggtaacattaattatttaagacctactttaggcattccgacctatgccctgtctaacttgttctctatgctgcggggagattctgatctctgcagccctaggactttgacccctgaggctttactagatctggaatttgtagaggaaaaaatccagactgcccagttatctagagtacagccatttcagcctcttcagcttctggtttttgcttcattacactcccctactgcactaatagttcaacataatgatttagtggagtggtgttttcttcctcattctgtgtcaaaaactttatctagaccaaatagccatattaattggacaggttcggtgcagaatacttcaaatttctggatttgatccaaatgtaattgtagttcctttaaatcagctcgaagttcaagctgcctttcaacattctgtactgtggcaaattcacttggctgattttattggtgttattgacaatcattatccaaaaaaacaaattgtttgattttataaaaataacgtcttgggtggttcctctattaaccaaaaatcaacccattcctgagaccgttacagtattcactgatggctctagtaaggcagtgctggctatataggtcctgcagacaaacttatttctacctcttatacttccgttcaaaaggcggagttaattgctgtgattactgccttacaagatttccccaaacctttaaatattgtctcttattctacttaacctgcggaagaggatatgcttgtgtttcaccaggagatcatcaatcccctgtctgggtacctaccagaagactcaagcttcttgtgaatactgacaaaaccacagtgaagagacgtctgtgtcagagactgc

SEQ ID NO: 34556 - DNA, 1037 bp, Homo sapiens
tgaagccatgacagaagaatgtggattatgaagattttatggacatttattagttccccaaattaatacttttgtaatttcctatgccttcctttactgcaatctctaaacataaattgtaaagatttcatggacacttatcacttccccaatcaatacccttgtgatttcctatgcctgtcattactttaatctcttaatcctgtcagcccagaaggatgtatatcgtctcaggacctgtaataattgcgttaggtacacaaattgtacagcatgtgtgtttgagcaatatgaaatgtgggcaccctgaaaaaagaacaggatcacagcaattgttcagggaataagagagataaccttaaactctgaccgccggtgagccgggcagaacagaaccatatttctcttctttcaaaagcaaatgggagaaatatcgctgaattccttttctcagcatggaacgcccctgagaaagagaatgcgcacctaggggtaggtctctgaactggccccgtggggcgtacctgtctcttatggtcgagattgcagagatgaaataaactccagtctcccatagcgctcccaggcttattaggaaaagaaaattcccacctaataaactttggtcagaccggttgatctcaaaaccctgtctcctgataagatgttatcaatgacaatggtgccaaaacttcattagcaattttaatttcacttcggtcctgtggtctcgccctgtctccacttgccttgagatattctattatcctgttaagtacttgatgtctgtcacccacacctatttgtatactccctccccttttgaaactccctaataaaaacttgctggtttttgtggcttgtgggacatcacggatcctaccaatgtgtgatgtctctcccggacgcccagctttaaaatttctctcttttgtactctgtccttttatttctcaagcaagtcgacgcttaggaaaatagaaaagaacctacgtgattatcggggcaggtctcccgatatctggcgcccacgtggt

SEQ ID NO: 34557 - DNA, 1050 bp, Homo sapiens
gcaggtcgaggctggaagatcacctaaggtcaggagttcgagaccagcctggccaacatggcgaaactgtctctactaaaaatacagaaattagccaggtgtgatggcacacacctctaatcccagctacttgggaggctgcggcaggagaatcgtttcaaactgggagagagaggttgcagtcagctgagatcgcaccactgcacttcagccagcctgggtgacagagcgagactctgtttcaaaaataaataaataaatacaatagaattctgaattttatttttaattatttttgtaaagagaatgtcatgttttttggagttgttgaatttattgaattgacaaaaattatgtacaagagggtatataacatgatgtgattgaagtatgtatacattacgaaatggctaaatcaagctaaataacatatcacctcccagacttatttttttgtggtgagaacacttaaaaaatctactctagtgatttccaagtgtatgatatgttgttattaactgtaggtaccatgttgtcccatggatctcctgaacttattcttctaaatgacattctgtgtcctttggcatctgcccacttccccaccctggcaaccatcattctactctgcttctgtgaattcaacttttttcttttctttttctttttcttttttttttttttttttttttttttttttgagacaatctcattctattgcccaggctgtagtgcaggggtgtgatcttggctcactgcagccttgacctcccaagctcaatcaatccttctacctcggcctcctgagtatctgggagtacaggcatgcaccaccacgctccactaatttttgtatttttatgtagagatggggtcttgctatgttatgcaggctggtctcgaactcctgggctcaagcaatctgccggcctcagcctcccaaagtgctgggattacaggcatgagccaccatgcctggccgagttcaacttttttagattccacatataagtgagatcatgtggtatttgtcgttctgtgcctggccta

SEQ ID NO: 34558 - DNA, 1084 bp, Homo sapiens
ttataagtggagcattgtcataggcatgaatgaatatttagggaaagacagtatatataggggttcagtaccattgtgatttcaggcatccactgggggtctgggaactgtcccctgcagatcaagggggacaactggaatggttatttttgttgttgttgttacattttttgttttgagatccttgtagactcacatgcagttgtaagaaataatggagactcaggcgtccttatgtatccgcgtaccctttaccttgttgccacccaggataacactttacacaactgtagtacagcatctcagccgggatgttgacatggatacgcttccatttccatcgccattgcgcaaggctgcctcctgctgccctcttgtagccacagccacttccctctcacccccaccccctccttagcctctggcaatcactaatctgttcttcatttctggaatctccgaatgttctatgaatggaatcatacagtatgtaaccttttgagactgactcttcgctcagcgtttttctctggagattcacccaggttgctgaactgaccaatattcatcttattggtgaggagtatcccgtgctgtgcgtgcatcacagtcctttcatcattcacctgtggagggacacctgggtggtttctagtctctggttattaatgaataaagctgcagtaaacattgatgtgcaggtttctgtgtgaactaagtcagtttttctgaagcgaatgttcaatgctgtgtcatacagtagttgcatattctttcttttctaagaaaccaccagctcaataactaatgctggcgaggatgtggagaaaaaggaacgctggtgcactgttggtgggaatgtaaattagtacaaccactatggagaaccgcttggaggttcctcagaaacctaagaatagagctcccgtccaatccagcagccccactgtttgggtatatattcagaagaaaggaaatccctgtgttgaagagatacctgcactcccgtgtttgttgcagcactatttacaataaccaagattggagcaacctatgtgtccagcagcagatgaatgggtaaaga

SEQ ID NO: 34559 - DNA, 1050 bp, Homo sapiens
tgtcctgggccctgccagcctccttaagtaatagtgaccttgtagttgtctgggaaataggccttttgttttttaaacacagaggcggctctccattaaaactcctggccgttggcaaacctctctcctcagcccttagcacctttgatccttgaggcacctgcttctcttcctctagggactaggtatttttcaggtggggtggaaggaaattagagccagcatctgatcccactcctgagtgcagtggagggcggacatggagctatcagaagttaacaattacgaagaggcctaagaggaggtgccgcacctaagtgccttataccacaggccctcaaattggggaggaaacaagaaaagctttgttcccaaggaacagtccaggaatgaatcaccccaaaccactagttaattttgtttaggaacagtttcaaagcataaaagggactgtggatttaaaaggtcagggccagggccatattttgtcattagaaaaattcaagaaaatgccgccacccagggaaagctgagtagtacctgaattagccaaagtgaattggcgcctgcatgttttagtaattacatgttttccttaaatactgtcctcttaagtaactgttgaagttaacagagcggatactttcaaactcaaaagtgaaagttttactctcttaaatagcctttgtcttgcctaattaaaggggccataagcaattctgtgtcagcagccagcacggccccctgctgtggatgagttggtcctgcagggagctttcctggcacttccgcccttcccagagctttgccccttccccgttttctggcccggtgggtctggagtgcagcagatgcctccttgtgttttgagtagccggggccgagaactggtgttctgtcatgtgtgaggccctgggctgggctcagtgtccaaaggaggacagctgccttccacagagagaagacaagccccctgaacaagtgtgagaaatgtccttgaagagccaagtacaggggaacttggtaacaagagtgagaaagtaagagaag

SEQ ID NO: 34560 - DNA, 1030 bp, Homo sapiens
tcattttcttcctgtgaagtatctgttcaagtcttttactcatttctgtattagaggattgtttggctgttgatttgtataggagttctttgtatattctgcatacatatccttatatacatgctgcaaatattttttcctattctgtggtttatttattttcttaatggtgtctcttggtgagcagaaatgcttaattttgaggaagttgaattttattaatttttactttgtctaccccaaggtcactaagatattattttatgttttcttctagaagctttatgattctgggtggtatgtttaggtctatcatctgtctcagaccaactttttgataggatgaaatggggttgaggtttattttattctatataataactggggttgaggtttattttattgtatataaatatctatttattatatcaatgtttgtttaaaacactttctttttctcattgaattgacctggcatcgtcatcaaaagtcagttgacccaaacatgtatatgtctgtttctggactctattcagtatcattggtctgattgtccttatgctactgccacactgtcttgattactgtggttttatcataagtcttggaatcagctagttgtaaatccttcaaatttctaaattttcagtattgtttttgctattttagattttttgtatatttccatatcaattttagaatcagcttttcggtttcttcagaaaatctgctagaatgtttatagggattatgttgaatttatagatcaatttggggagaatggacatcttaacatctatccacaaacatagtatatctttgcatttatttctgtcttccactttatttttaaatttctttttctcagcaatattttgttattttcagtgtagacatcttgctcatcttttgttagatttattcctggattttttttttattctattgtaaacgataccattttgttaatgttattttccagtttctcgttgctagtatatagaaatacaattaatttttgtatattgac

SEQ ID NO: 34561 - DNA, 1043 bp, Homo sapiens
ggcattagtgccactgcgcagccgcagcccctggagcacagacagcagggacaggcccctttgcaacataggagagagaggaacagagcggaacctctgctgtctctaagtaggtaaaagagaggagagaaaggtgtggtgactatatgcacaccccatgctttctgcgagggggccagagggaggaggctctgggaggaggcaaggtgtcatttggggaagttggttcccacagaaacatgaggattagggaataagcattccccccggtagcccaggttctgtccaggtggagaaagaccacccttattgtctctcatcaagttctccctcccaaaggtggtagactgcttaaagcctttcttttttactcttctgccctcccagtgcaatgtgctagccttggcctgctcctaggaacattttatgtggagtatgatcatggaattgaaagaatatgtgtagaaatactgccttcagacctatgaggctttgttagtttgacataattaggaagctgtaattttttccagaatgtagagctcagactttattgacccatttaatttttttttaataatgacattttactagagcagaacagcatgtaacctagatagcctgtggctagatctctgaatgattttaattaaaaataatgtctccacttctggtagatggactttttccacaatatcctggcaacaaaacaatctgggagaaaaaacttccttggtttctgttgttcttactaatagaataaccatactgtcaattttcaatttagaaggttaatgtatatatataatgtttcctaaaggaacattaccttttaattaaataatcagttttatcaaattaacctttagaccttttcaatttcactgagctgagtttccattaaatcaaaatatagagtaggaggatgttaatcgaatgttcttggaactagtcatttctaggtctgttctgtctgcagggtacatattcactgagttggtacctttctgactcatttgtccctgaccccgttagcctctatt

SEQ ID NO: 34562 - DNA, 1044 bp, Homo sapiens
catagttcctcacccatatttggcactcagtaaatacttgttgaatgaatgatttcctcctagtcctaaagtccatgactagcccagcagcactcaactgtggtgattttgcaccccaggggacatttggcaatgtctggagacatttttgtttttcccaactaggaagaggagtattgcgcatttagtgggtagaggccaagaatgtgcacaactcaggacaactctccacaacagggacttacccggcccaaaactgaggaggtgctgacattgagatcccctgctgcagcctgacccctcacttcagattaaacttcctggttcgtcacaggtttattgaattctagatgcttagggcacatctgggggtaaaatacaaatattcctgccctcatggcgtttgcattctcgtgggctggcaaagacaagcactacgtgtatagtacattaggtcataggtcctatggaaagaaaaggaagagtagaaccaaggtaacagggatcgggagtgctgggaaagcttgtgattcttacacagagtagtcaggaaggccccatcgaggtggcatcagagcctactcctcggtaaagtttggaacctctaatagggtctctcagtttcctcctcacctcatcaccttctttccacctgtcatagagaaacccctctctttgtttttaaggatactgtcctacttgtgtataaactaaagggaagaaaaaagccagacgaccaaaaatagctgggaatcatgaatgcagcagtacctgagaagtggtgcgagtgcatcctttatgtcatcactcacaccgcctctcaggtaccgctgtgctcatgattcctggccagttttcatcatctggctcttttcttccctttagtttatacattcagcggtacaagcatatcctttatctcatccctcacaccgcttctcaggtactgctgtattcatgattcccagctatttttggtcatccggttcttttcttccttttagtttatacatttgaccttgcttgctccttaagccaacaggc

SEQ ID NO: 34563 - DNA, 1100 bp, Homo sapiens
cctcacgcataggagtgagtcagaagacaggattgggaagcagggagggctttgcgtctggagacagcagcagagcgtagggcactggcgggccttgggcatgaggatgtgggcttatcctgggttaaaggggaaggtaatgtacagttttagtcaaggaagtatgtgggaagattcaccctttttgattgtttaataacatgttttatctgattataaggattttacgtagtaactgtagaaaaattttaaagtgcaaaaagtatgaagaagaaagcagtctccaaatcttaccacctacaatcattgataccttgccgagcagtcttttagattcccctctatgtatgtatacagctctaggtgtgcatttcctatgtttcacgcatatgggtcacaccatacatgctttgggcaacctctgttttgtctcagtttttccccactaggtaatatgcttatgggactttcatccatgttagtagttcctggtgttgagtccatgtcaactgtgtagatccactgataggaccagctctcacaggagacctgtttgcctattgggatgctgtgttgttttgtttggtgtttcctagtaaaacctttatgtgtataagagcagataatgtaagagagtctttttttccccctgtcaaatgcatctcatgtagggaccatactgctgttttataatgaatttggttttatggtagatgggttttatggagaatttcaatgtcttgatgatctaggaaattagcgtcattaaaatatagctagttaaaaagtaaacttgatttatctttggagaaagaatgggatgagtcagatgaatgcctgtagttttagaatggagtttaaataacttgtttggttaagtattagcctaatgaaggagccagagcctggctgatcctggattgtggctgttagttctgtgctggcccatagctatagacagtgcctttcacctgaacaagttagatctcactatgtcccttctacaggtctggtaaatgcgacctgcagtgacttaattgtactcagatgggacagcagagtcatctttgtgggtagacttgcagaagctaaaagcacac

SEQ ID NO: 34564 - DNA, 1031 bp, Homo sapiens
atattgagtaaactgtcaagatttttctctttgtcatctttttgtcagctttatcatgcttaattttcaagaaaataatgtgtttgttactgtggtcacaccgtgattttgcattggcttatgtatgatattttattgtctctgtcctagaaaattatagcagtttttatgaggagtggtttgtgggttcacacaacccacttggagtgccatttactacaattctcttctaaaagaaccataaaacatcatgtaaattgtttaaaaagggaaagacctttttcgagaaaggctaagaagaaatctttccaggctttcttttgtttcttatagtcagttttatgattttaagctcccaatttatttagagcgttaatgtcataaaataaagtgcacgtgtgtataagtaaaccgttgtgagctagagctaggctagaactgggtgttgttgatgcagataatatcaaattcattattttataatcttttaagatatgttttctgtgactttggaaatgaaattaaagaaattaaggaagaaaggaaaagagagaggaaggaattaatttatagcttgtatatcttttttttaaaaacccttatgttttcttaagtagtgatgtgtttataatctacattaaggcacaatttttggtaaccagtcctgtgaaactcacatttaaattcacaaatagatttacttagagaaactttcctcccttaggagttttaccatttagattggcttgttgcactcagtttgtatacaccctttcgaagaaagaattaaacagcacaataacaaggccaaagttctgtcatagttttctatacaaatgccttattctgatattatcttggctttgtgcatgagctctcaggagagtaaggacgaacattgttaataattttctacaacatttacatggttctctgtgcttttagtcacttaatacaggtatatcttacgtttaacaaaccgttataagaaaatccacatatatctgaaatataaattggggcagttgttc

SEQ ID NO: 34565 - DNA, 1047 bp, Homo sapiens
aaaaggcagtgccctgtctgggaatagggagtaaggaatgttgggcaagcaaaagcaacaaaaacatccctcacagtgcctgggacagtgcctgatgtgccttcaccttgcctgcctggctgtcttcaactctgtggggaatgagaaactagaaaatgcaggagtttataatgacaggttctggggtgaggataggcctagagatgcctcatagtggcagctcttctattctcttactgacttataaaggttacaggagccagggggggctaccacacaggtaagcaagaaacccgtaagcaccgaactgctgtgcagaggcagcaggggctactgaagagcaccgcacaggaaagcaggaacccatgttctagccgcaggtctgccagtaagtgggctgctcatgtgatttctctgggcctcagtttccacattagtaaaactgaaagcttcgattagataactgcagagatttcttgtagaataaggacactttgattctaaataaggtaataatgatcctgaattgctgggaactctattttcagattaggcatgcagatgagattttgttcttgataatacattcttttgtggaagctaaacttcgttttttatttacttatttttaggaattgattatcttgaatctttggctgaaattcagagttcttggagtggcccaaagccagatgatctggccctgctccctctctggcctcacctcctctccccctccttttgctcactctactccagctattctggcctctttcattttctcacatgcatcaggcacatttcccgcttagaacctttgcatccctctacctggaacacttttctcctagattccatatggcttgatctctcagttcctcaggtctctggttaaatgttgcctccgtgaggccttccttgaatgccctgcgtaaagtggcctcctttttctgtcccttcccctagcagatcatatatccatttatttgttgtttgtctactcgaatatatgttttctgaaaatgaagaactttgtgttgttagcac

SEQ ID NO: 34566 - DNA, 1068 bp, Homo sapiens
ggccagtgttctgcagctagtaaaaaaaattcaccaagacagttgtcggtaaagaaagtcagatgtattagaaaaagtatgaaagggtacagtgggtaggtcagcaagaaaggagccgactgcaaggaaacaaaggcttgctggagattttataggatggtgcttgtgctgtgtgccgaagagggctttgtgcagtactgataatgctgtggttgcagtgagctaacttacttacgtttttctgttagctgaggatctggtgataagttgagtacaggaaggctgtgttgtagaccatgaagaaaggcagacttacagcttatttgctttctctttttgattttcctcagttccgccggctcaacttcccctccctgataaggactctatccttcccacctttcagcattatccacccttcatgatttactcatttaataaatatttgttgagctccaggcactgggtttgctgctagaattttacatctttatgcaagagaataggtaaaagtagaatggatggttggttttgaaagattaaaattaagaacctctgcacaccacccccccccccttcagatccacctatcgccaatgagggaagtaaatccagcttgcggagttcacatgcacatgcacacacatatgcacatgcatatacaaatgtgtacacacacaatatgtaaaatacctttggagtgtgggacagtgtgcctaagatcatgggctttgaaaaccaaccagtttgggcttcaatcctggcttccccacccaacacctgtgtcccgcaagacacgtggcctgaacctcaaattgctcacccgtaagttgggagtacaaacacccccttcatagtatgattgtgtgccctaaatgcagtaacatgttaaagcaccaaatgtgcgcctgcacacagtaggcactcagtaagtgtttgatcacctgtctcaggaatgtcggattttactggggattttgacaagaacaccacaaggtggtcagggctgaaggtggggggagcccagggactgaggggcacagaagagggagcagtggactctgtgga

SEQ ID NO: 34567 - DNA, 1026 bp, Homo sapiens
aggccaaggtgggcagatcacttaaggtcaagagtttgagaccagcctggccaacatggtgaaaccctgtctctactaaaaatacaaaaattagccaggcatggtggcgggcacctgtaatcccagctattcgggaggctgaggcaggagaaattgcttgaacctgggaggcagaggttgcagtgagctgagatcatgccactgcacttcagcctgggcgacagaatgagactctctcaaacaaaaaagaagaaagaaagagaaagatagaaagacaggaagggagggagggagggaggaaggaaggaaggaaggaaggaaggaaagcaggcaggctgcggaacagggcacaggtgtcagaggaattcagagaagagatgactcagccctggcagaagcaacaagagatggcttcttggggtttggaggatgacatcagccaggtgttgagggacttgattggttgagggaagggaagggcatgcaaggtgggtggaatatttcacacaggtgaatcagaggacgcagaagtggaaatacatgtgaatgggtggggctatggggggattctataaagctttggaaatcagggagaatgcacccaaggggatggaaataacacgtgggttctaagtgtgtcttagatatgaatgggttatttgatgttgagcaagtcactttctctccctgggcctcggattccttttctggacagggagagttggattagataattcagttccaagttctaggccactctgatcttcttctttggttaataggaaggcactggaagttcttgaggtaagatgctgttattatgaaagcagcttgtaggaatgtggattctgaactcagactatctggctttgaatcctggctgttttacttactagctatgtaattggacaagtcacttattctttctatgcatcaattttatctgtacagatttatgtttggaaatcagaatgatatttcctaagattttttccccatagaattaaatgacttaatatgtgtaag

SEQ ID NO: 34568 - DNA, 1057 bp, Homo sapiens
ccctaatagctgggattacaggcatgcaccacctcacctggctaatttttgtatttttaggagagacagagtttcaccatgttggccaggttggtctcagactcctgaccccaggtgattcgcctgcctcggcctcccaaagtgctgggattacaggtgtcctcttcttttaaggatgccagtcagtgggtttagggtccaccctaacgtggtataacctcatcttaatttgcatcttcatttcatctgcaaaggccctatttcgaagtaaggtgacattctgattttcggggtagatgtgacattttgggggacattattcatcccactacaggtaccaagaatgagaattgatgttgaggtagtggcctctgcttcagtctttgattcccccaaactttgcaataaagtggagctcaccaaatcagtcatgggtcagtgggcttgttttcactaagatacatttcctggtggacttgactgcttagaaacaaccggactctgttcctttggggcagaggggacagggagggcttggagagtacaatctgcacttgagtcatggttctgctgctaactagagtgttagcacattcccctttctgggcctcaagtttgtgtgtaacttggggtaaatgatgtccactttgaggatcttttaaagactcagagagtgtctcttaagtacaaatgagtacctagctcacgctagcattaagagaggagtgatagccaacatcaagtttgtcgttcttccctgaactctgttgattgtgattcttttggtcgcaagtgacagaaattccatcaaaccagcttaggccatgggtgtctgttggctcccccaactgaagtcatgggatttgctgtaggtgcagctccaggtgcactaacgatgtcatccaggatcccaggttcttgggctctgctctgcctcctgctgtgtcattcccaggctgtgggctctcatgctgtgctggggggatgccaccactgtgccaggtcccacattctcacaccacacagcccagagtccctttcttagctcctaaagaaa

SEQ ID NO: 34569 - DNA, 1034 bp, Homo sapiens
aaataaaatcaataaagaaaatcaacaaattcaagagttaattaaaactgataaattgacaaacatttagcaatattgataaagcaaaacagagacaataaattactaatatcaaaaatgtaaagggggaaataccacagctcctacagtcaataaaaccacagcaaacagcatataccaataaacttgaaacctcgataaaatgaacatattccttgaataagcacaatgtaccaaaactgacatgaaacaaatagaaaatctaagtagtcctaaagctcctaaataaattaaatctgtaatgaataattttcctatgaagaaaggcccaggcctagatggcttcacaagtaaattctttcaagtgtttaagaaagaagtaaaactaattctagccaaagtcttccagaaaatagagaattaggaacacattttaactaacttatgaagccagtgtaactctgattccaaaagcaataacattacaggataagaaaacttttggattaccttttatgaacatagatacaagagtacgagcaagatattaacatatcaaatccagcaatacataggaaggctaataagtcataacccagctgggtttattctgaaaatataaagattggcttcatattctaaaatcactgaatataattcaacataataatatgataaaaaagaaaaacgtggtcagtcatcttaatagatgcagaaaaatctgttggtaaaattcaacttcatgatataaactctccgaaaaccaggaaaagaatggaatttctctaatatgataaatggttctatcaaaaatcttttacaagtaacatacataatgatgaaatattgaacatttcccacccaagttcaaggtcaaaacaagatgttgactattaccacttctagtcaacattgcattggccaggatgtcaaatataaaataaaataaaataaataaaagtttcattgggaggccgaggcaggcagatcacgagtttaggagattgagaccatcctggctaacacagtgaaac

SEQ ID NO: 34570 - DNA, 1059 bp, Homo sapiens
tatcctttccagggcttgcaagcatcctcaggacccactgcacatcctaaaactcccaactggcctgggaggacctgggtacaggctgcctgctctcctgtctcccaccgtggcttagactggctgaagggccactttaaggaatgaaaggggttctgtgtgcaccagccagggactgccagtgggtgctcattgtggcagaaatacccttatgcctgccaggtcagagggaggcgctggctcggtgtgctggcctctgagcttctcccttggctgcattttgagtcaggagcctggactgacccgggtccctccacagcactggagggggtgggacacatcactacagggtttccttccatgaggactctgaggagttgacagtggaggcaaggagtgagctggtaagtagctttccactatcttttacccttggagcttctgtctcctgtcttctctcaccctatcctgttgcatctggtggctggtcacccctctctgcttgttctgacatgggactgtattgaatgagatcacaacctgtgtcttccattgaagcaattctttttccccttctttttcttaaaaaaattgaggtgaaattcatttactgtaaaccgttttcaatggtacaattcggtggcatttactgcattcacgatgttgtgcaactgtcacctcaatctagctgcaaaacattttcctccctccggaacaaaccctgtgcccatgggcagtcattcctcacttcccctctcccagccccggcatccatccatctgccctctgtctccttggatttgcctgttctggatatttcacagatgtagaaccagatcgtatgtggctggcttcttccacttagcctgatattttcagggttcacccatgttatagcaagtgtcatcaagtgtcattgcttccttcttcttcatggcggagtagtattccatggtgcgtatacaacacaatggtctattcatctgtggatggacattggggtcgttctcacctttgcggctggtgttggaagcagtgctcagggtgttaacattttct

SEQ ID NO: 34571 - DNA, 1315 bp, Homo sapiens
agtgtacatttaaaagtggtgaatttcatgttatgtatattgtacctcaactttagaaatgctaaaatagaaacaacaaaatcatcatgatgcaacgcctttcctcatagacctggagcgaggcctgagagagaagccatataaggcagatgaggggtgggatggagagcttcctttcattcgctgcctgcccagtgagggtctgcttcctctggcacttacttaacaaacccgagagtcacccatgtgtgaggcatgggctgggcacagaagggtccacgcccacccctgaaagtgctcgtccatgctagaaagacagaaggatggggtggtcattgaacctaagtcagaccgtggcttcccagctcatgcagaataaaatgctcaggcctctcccggcctgctgggtgcaggaccccggcccagcccacctctctgagctctgagctcatgtcctgccccatccctctcacacgcacactggcctccttgctggcctgcaacagatcaaactcaccctacctcagggcctttgctcgtgctggtcacctgatatctgtgaggctccctctctcacatccttcaggtctctgctcaaatgcgtctcccccaggaagtcttccctggcctccccagctaaaacagcccctcccacccctcccatgccatttaccatactatagttttcatcttagcccttatatctccctccaagagctatttattgacatgaaaatttgcttattggctgtctctcccattcgagagtgggctttctctggggagtgtgcactgctgaatttccagtgtatgcaacagtgctgaggagagggtaggtgctcagttaatgctttttaattaaattttctattgtggtagaatatacatgacatagaatttaccatctgaaccatttttaaatgtacaatcaatgtcattaagtatattcacgttgctgtgcacctgtcaccaccatccatttctgggactttctcatcatcccagacagagactctgtacctgttaaacaagaactcgccattcattaatattcttttgaatgactaattgaatgactaagtgtatttcctgtgtgtcggtcacaagctaggtgatgagccagtaaacctggcgcctcggagggtgtgtgttcccgtatctgtctcggagatggacagatcgactcagagaggtgtgaagggctttgcccaaggtcacacagctggtcagggtgggattcaaacgcaggtctttccccctttccacacagtggcagttctgggggatcactgcatgcaaagggcatagccatggc

SEQ ID NO: 34572 - DNA, 1062 bp, Homo sapiens
cctctgagatgatcaatcctcccatttcagccagatgagaattgctgtgggccctgccttttcttaatattttgcatgagagcgacagcccggccagcggcagtaatctcccacccacgtggggaggcacccactgtcctgccatgtgcataattgaagtcttcagactgctcagtggttctaattagcccaaagtggccccttctggcctcagtggaaattactgccctcctgccgcctggtcttactagctgatctttgaaggtgtgagtgagccgggagacgtgcagagcctagcactccctctgctgcattggtctttcttggcaggccttcatggctttgcagagggcgggcagttgaggcctctgtctgccgttgaggtcctgcctccctcctctctgccaccactctccatgggacaggtgctccagctgggcgcatgcatgcccctctcacctgaatgcctcccactagcagtgtctctgctctttctgacccttcaggttatgcagtgcctcctcctccaggaagtcatccctgatccccaggctgggccctcagaatccccatgtctccctccatcgcagccctggccatgccatgtggtgcttgtttacatccatgactgccccatgagactgggagcccctagggggcagaagccgctccatgtcccacctactcctggcctagcgcggtcccataggacatgtctacggaaatggagggcgtgagggtgggaggaaggaaggaaggcaagaaggaaagaaggaaggagaaggaaaaaggagaagagagaaaagagggagggtgggcaggtagcaccatgcccattttgcaggtgagaacactgaggagacataaccgggaagtggcagggccaagcacacccttggcagctcattatactttcccttcagcctagcaaagctactgttcgatttggggaaatggggccgcttgtatgaagagccgcaggcaaagtggaaagtgccgagggctggaagtcagatgggtgtgggtgcgcagccttcctgtgtacctgtgggcaccacttac

SEQ ID NO: 34573 - DNA, 1032 bp, Homo sapiens
agccctcctcaggcacatcgaggagaaccagctgcccaagctcttggctgctgcccttctgaggcctgcctggtaggtggcgtaggaggaggcttggtaagcagatgatgggacatcatctaccacatcccatcagtaacatccaacaagtgtgtgtgccagcacagacctgggcactggcatgtcccagccgtcattccatgtcaaatacttatctgtgccgtcatcgtcgaggtctggtttccaactctatggctccattgtctcatgtttaaccagtcctcttactgggcatcagcttttccatttttgctctgtgagaggttgttgagttagttggaggaccaagcccataatttcctggatgacagttcgtgtcccgcagatagagcttaaccaacagtggttccctttccagacctaagcaggtgggagtcagagatgagcatagagaaagggtgaaggggtgcctctggattcccaaggcagggacatagctgggggagctgcctccggactcgcaaggcgggggtgtggcagacactttgcagaaaaagtacatctgtccttggggcgagaggccgcacatgcagccccaagtccctggacctgtgagatcctggctgcctgctgttgatagaacgggacaggtggggggatgcttttgattcatgtacggtgaatgatcttattctcacctttatcactggtggcacattctgatggaaggagacattggcagtgggactgggcaagaaacaggtcatttgtcatggctgtgtgccagcctcctgtcgttgcacagcctgtccttgggaagtcttgctcacctgtcatgtggagtagttgtatgtgtgtgagtgtgtgtgtgactgagagagacatacacatatgcacacacacgcagaagtgtctgtacctctgagaatatagttctccagaggatgcagaaaaattggggattgcagactgtcgtgcgtttaaatgtgtccttctctcaagaataatgtccacttggaacctcagaatgtg

SEQ ID NO: 34574 - DNA, 1034 bp, Homo sapiens
ctgtgaaccaagttagtcaaagacaactgggcatttggacctcagctttatagtctatataagggttggtaaactatggcccacatgctaatctgacccacctcctgtttttgtgaataaagtttaaatgaagatgcagtcacacctatgtgtttaggtattgcctgtggctactttcacactacaacagcagggttgagtagttgtgacggtagttgagacagtgtggccctgtatttattctctggacctttatggaaaaaggttgctgacccttggttcatgtcaatgactcatatggagcagcaggaaacattctgaatttggagctgaatgaccagggtttgacgcctggctcagggaactctagtaacagagtagagagtgtttctcttttctccttttggaaatgatcctgaagcaacaaatggaacaaatggaaatgcaaatgccatctttgatggaaccatagcttctggaacctcatatgtggggaagtgcagtaaaggtcaaaaatgggtgcaggatgtctccaaagggaaataaaatgcccatggctgtaaagctcagacagagcaaacaaagcagaattttctacaccttctgtggtgggctcagatggcaagacctatagttcctctcatggagcaataagaacaagtgcattggctggtgtcttagtctgttcatgctgctatagcagaataccatagattgggtggcttgtaagcagcatacttttatctctcacagttctggaggctgggaagtctgatacccaggtgtaacagatttggtgtctgctgaggacctgttttcttgttcatagatggtgccttcttgctgtgtgcttgcgtggcagaaggggctagggagctctctgagatctcttttataagggtactaatcccattcatgagcactccaccctctaagacctaatcagttctgaaagacgttacttcctaagaccatcacattgggggctaagatttctatatatgaatttcggggggacacacattcagaccata

SEQ ID NO: 34575 - DNA, 1050 bp, Homo sapiens
gctgcctccttgccttcctgctatgatctgaatgtttaagtaccccctccaaattcacaggttgaaatccagacccccaatgtgagggtatttaaaaggtggggactttgggagtgatgaggttgtgagggtggagccctcatgggtgggattagtgcccttataaaagaccttagagagctcccttgcccttctgtcatgtgaggacgcagcgagaaggcactgtttgagagtcaggaagttggacctcagtggacaccaaatctgctgtgccttgatcttggacttccagcctccagaattgtgaggaataaatgcttgttgtttataagccacccggtctatgatattttgttatagcagcctgaacagactaagccactcccagtgatgagcctgcatgatgttttacacaaacagatcactgaaagaaggaattggccagcaaagatgatgctcagcagagatgtgaaagatgttaatgctggaagtgaaatttaaattggaggtaaatggagtcatagaagaaatccatgatcttgggaagctgaagctacccttcaagaagctcttatatgcagccagaggagttgagtgaaggtgaacacactgatgtaaaccaggaaaggagttgtgccccaaagcatggagatgtcccagaggaagcgaggctgggaaaaacgttaaaggaactcttgaagatatttcacagtgttgaaagtgcaaaggataaaatcttggaagctggtctggagaaagataattctgcaaagcatagaaagggtgcttttttggtatcgtaaggtatacaataacagtagcgagcactgtgcaaactctctccatatgtcttttacaaagaaataaagcacttgacatctcaatgtttctgatgctttaaattacattgtaccaaataaatattagttgtactattttaaaaaaactttcccggttgggcattgtggctcacacctgtaatccaagcactttgggaggctgaggtgggaggatcgcttgagcccaggagttcgagaccagcctgggcaa

SEQ ID NO: 34576 - DNA, 1032 bp, Homo sapiens
ccatcctcaccccaggggaccctgcctatccagtgggttgcagtgccagctactgggccaggcagggtcatgcagaactgcagaggtgagggtgttaattattaacttttaatcatggtgaagtacatataacatacaatttaccaccttaataatttgtgagtgtatagttaagtagtgttactacattcacactgttatacaaccaccaccaccatccctttccagaatgttctcctcttcccaagttgaagctcttggcctcattaaacactaactccctatgcccctcccccagcccctagcacccccattctactccctgactgcatgaatttgatgcctgtagatatcagcggaatcacacagcatcagtccttctgtgactggcgtatttcactctgcgtaatgtccttaaggttcctgcatgttacagcacgtgcaggggtgaggatttttgtgtgaacttggatagagcactgattttgatgatgctatggaggtcttggacatcaccaacaataaaaggttaaaggtgaacttcaaacctaagtgtgcggtggttcaaaagacgtccaaggccagcaatgtggctcacgcctgtcatcctggcactttgggaggctgaggtgggaggatcgcttgagcccaggagtttgagaccagcctgggcaatatagtgagaccccatctctacacatgcacacaaaatttaaaaaattagccaggcgtggtggtggcacatgcctgtagtcccaggtacttgggaggtggaggtgggaggatcacttgagctcaggaggttgaggctgcagtgagccatgatcctgccactgcacttcagcctgggtgacagagtgagactctgtctcaaaaaaaaaaaaaccacaagaaaagatgtccataaattattgctgcgtcttcaacaggtgaggcttagggcctagagggtggccagactcagtgactcacttctaacaaacacagtgaagcagaagtacctgtgtacccttgaggagagaaggtgaaggg

SEQ ID NO: 34577 - DNA, 1063 bp, Homo sapiens
ctatgggccaccaccctggccaatttttaaaaatttttttgtagagacagggtctcacaggctagtcttaaactcctgggcttaagagatcctcccgtcttgccctcccgaagtgctgggattacaagtgtgagccaccatgtccggccagaaccctgttttctactcaagatctgggatgccagttccacccctgttttgtcatctactggtctctctgctcagaaggcacctcagcccctactcctttcaggtctagatgttcagctggagctaccatcttcttacaataccccaggccatgctgattggtccaggcatgggccacctgaccccagtaggaccaatcagaatctttccctaggacttttgcacttggaactggaaagtccaagtcttaggtccttttgagtggggaagacagagctgctctttgagagcagccccagagctgttcagagtcacatcccaggtgggaggtgaaggaaagtctgcagacagagagaagtgcaggtgagagacgaacaaggacagcctcacgagggctccaggccctgaggcccaattacaccctgcccttcccttggttatgtgggcctcaccatacactctccctgggggctcagctagttcaagttgggtttccgttacttgcaaccaacagagaccagagtgaggccaggtgggatggagctgacaacagccatggggctttctcagacatggcctcatctccctttgcaggaaaagccccagctacacagaaggaaccactgactggtctgggagcagaacctgaccctgctaggccaatcagatttcctcttctgggaatctgaagcaagggaaccagaggtggctcaatggccgtcctgggagacatggctgtgagcctctgctcctgatatgcctagagctgccctgccccatgcctgtctggaccttgtatccagctcctccttagattccatgagcttctccaggctctgcccaaatagctgccccttcaggctctgttacttccaaagaaccttaattgacaccccctggacctgatccctga

SEQ ID NO: 34578 - DNA, 1041 bp, Homo sapiens
gtgcaggtaccatagtggctttgccagagttctcaaggaagaaccacaatatgtttactgtatccattgtccttgcagaacctgaatcctgtggacacccacatttgaagccacgtctttaatattcaccgggctgaattcaccttccacatgcccttcatttcctcctgaagatttgggtgttcagtcactttcatttccttttaccccaaagaagttattaaaacaaaattttaagaaacctttttttatacagcgaatcttctggaagtcaactctcggagccttgactgtctggaagggtcttcatttctccctcgctcggatgagacgtcacccgccctttgtgcccattggtcctccgggtgtggagtgtcctttcccgccttcctcctcttaagatttgttctccacatctggttttcagcagctgactgcgatgtgtctcagtgcggtggtgtgggtttttctctttctcagggttggttgtgcttctttgttctatgggttggtgtctctcaaaagcttcacttggggaagcttttggccgtcctctcttgcctcatttttctctcctctccctttttttttttttttttttttggagacagagtttcactcttgttcatgctggagtgcaatggcactatctctgctcaccgcaacctccacctcccgggttcaagcgattctcctgcctcagcctcccaagtagctgggattacaggcgtgtgccaccacctgcagctaattttgtatttttagtagagacggggtttctctatgttggtcaggctggtctcgaactcctgacctcaggtgatccgcctgcctcagcctcccaaagtgctgggatgacaggcatgagccaccgtgcccggcctctcctctccttttgaagttgcatctgtaggtatgttgggtcctctgatacttcccgtagattgtggatactccgttgtggtttccttcactccttccgtgcctcagcttgggtggacgcttctatttacctgtactcgggcttacgggtcctcttct

SEQ ID NO: 34579 - DNA, 1006 bp, Homo sapiens
tatttagcttttgacaagttaatactgtaattatgtactatttagtccctctcctagcctataaaccttttctgtagaagatatttttcaggtttagggaatttttttcttgagagtctgggacagacctgtaaacagtttagattatgaaacaatatacatttctgttttttagtctcaaacatatcgaaattgtctttcgacttttcagacctttcaaaatagagattcgaaggaagaagcccaggctatttgtcttttagggattgcagtttctttggtaagagaaaggttggtagctttgttagtaaccctttgaccttgtgaatgtcttttgtgtttagttaattatattttccgtataactttgaagattggggaagcaagtgtagtttagcagttagctctcttccttgataattatctttccttctttcatttattatagttacagcattaaaaactgcccataaggccactagtttttgtcgtcaccagagaaagatgaccccaaatacggacctttgcattagaagttacaaattttatccaaaaagttagcgcacaataatttggatattgttaaactttccagatagagtatatgggttgaatatgaattgtgtgtgtatataaatatatttatgatctaggaattaacaccattcaattcaaaatggccaaattcaaatactgttggtgggaatgtaaattagttcaactgttgtggaagacagtgtggcgattcctcaaagatctagaaccagaaataccatttgactcagcaatcccattaccgggtatatatccaaaggaatacaagtcattatgttacaaagatacatgtacgcgtatgttcattgcagcactgttcacagtagcaaagacagggaatcaacccaaacgcccatcaatgatagactaaagaaaatgtggtacatacacaccatggaatactattcacccatcaaaaggaacaagatcatgtcctttgcagggacatgga

SEQ ID NO: 34580 - DNA, 1034 bp, Homo sapiens
tctcataaccagccctaatactcctgaacagctttttgtaggatggggtggggcagggcagaggttcattttgactcataggtaccttttccacttttactgctgataactgcgttacggattaaagttttgtttttgatgctgaagagggcttaagagagttagatattatggcacatgtaagtctgctaaaatagaactgtggggtagtgtaggagaatctcctcttaattatggatcatatattgtgagcattagaagccatgtgtacctaagttgaaaaatcaaaacatatcttgtatttgggtgaccccggtaagtcaggataccactgcgccttgtgtgaacacaggatgctaaggtgtagggatcaacagcctttttctcgacattttgcgcttctccctcggggtaaagtggggcggcagtaggaactcacagctgttgggcagctaatatttgtcagctattttacatgtgggattccatttaatgcaatcttggaggtaaaattattttattaaagatgaagatagaggcttagagaagttaagaaaattgttcaagttcacatcattgctttctttctttctttctttttttttttgagacagagtttcgctcttattgcctaggctggagtgcatgggcacgatctccactcaccataacctctgcttcccaggttcaagcgattctcctgcctcagcctgccaagtagctgggattacaggcatgcgccaccatgcctggctaattttgtatttttagtagggacggagttttccttgttggtcaggctggtcttgaactcccaacctcaggtaatccgcctgactcggccacccaaagtgctgggattacaggcgtgagccaccacgcctagctaattttgtatttttagtaagaatggggtttttccttgttggtcaggctggtcttgaactcccaacctcaggtaatccacctgactcggcctcccaaagtgctgggattacaggtgtgagccaccatgcccagccaaggccacgtaa

SEQ ID NO: 34581 - DNA, 1031 bp, Homo sapiens
acccacggaatgaggccaaggcagttacagttagaggtcagatttatgaggggagagcgagggtgaggtccgtgggtggggagactccgacctcagcttgatgggaagacctgatgctgcccctcagacgctgtatttctcagccaccaaagaaagtggaatcactccttagtgaatgctttcatcaaacttttgaaaaacctgttatgtcccaggaagcaaaatcgaactggacagttttccccttttaggagagttaaagatcccggagacaaacagcagaaggctcaaggagtccaaatacccaacctgaagttctttctgaacaagagatggtgtttaagtaacaggcatacaagacaaaactgagctaattaccgcagctgtggctcctagccctctagcgtgtcatgcgggcccttttgctttctctgccctccgctgccccagacccccactctacgccgcacctccagtcatcagctcatgccgacccattgctatggactctgttgaggtggctcccttctctctgaagctttgcttgttctcctgaagtcctggtctttaagagcttatgatctgccaggacagattggctttgggtaatacatggttaactgtagcacagcttgaaaaatgctctgatagaggtgggcaggcgcagtttgtgcatgcgggtaaatgcgagctcctttttcaataccatgaatccaagtattcatgctattttaaatctgcaattctttgactctccagagggtttttagattaatctttttctattacttcctaatgtttgttgcatagtgcagagtacttgattaaaacttagcaggtcggccgggcgcggtggctcacgcctgtaatcccagaactttgggaggtcgaggcaggcggatcatttgaggtcaggagttcgagaccagcctggccaacatggtgaaaccccgtctctactaaaaatacaaaaattagccgggcatggtggtgggtgcctgtaatcgcagctactcatgaggctgaggcag

SEQ ID NO: 34582 - DNA, 1029 bp, Homo sapiens
ggttgaggctgcagtgagctgagactgcgccactgcactccagcctggttgacagagcgagaccctgcctcaggagaagaaaaaagattcccagagatcacggaatgatgaggactctgctgtctgggtcgtgagagctggttcgctggacagaaagaggagtttgcccccctgcctatgcccttttggcctggcatgtccctcttcctgtgcctgtcacgctggtgtggtgctgaatggcacacctctctccccagtacctgacagtgcgtctgctcccgtgtctgttgaacaagtgaacacatggtttgcagcccagcaggtgatggaaggggtgggaggaggagcctcggacacacctgagctgggcctcagtctcttagccgtgtgaccatctcctagccttggcatcctcatccgtgagatgaggatgactgaccattcctgtggggcatggtatggaacaaacaagagaatgtcgagggctgggaccgtggctgttgtgttcactgtggtgtccctggggcctacactgtatttactgtcttgccttttcctgaaaatgcttgtggactcccgctctggactgggaaacctcgagtagacctcagagtcatcgtttttcctctttctgatagccacccctgatctgacccctccatcctgcggcctgcaagtctggtctctgagccttggagaggattcagctaacagctactgttcacggccacctgtcagaccttgcacgtggagctttctctacttcaatggacatttaaaacatcctcctaagatcaagccctgatttacagatgtgaaaactgaggctttgcagagttaaatccattcaccaaggtcacaccgctgcccctggatggtgggtccaaaccggaccctgctggctcccattctggctggctggtggcagaccaggagttcagcctggagggggaggcagggggatttcctgagagagccacgtccctttgttgtgaaggttgtgtgttaacgacaccagcaatcattttt

SEQ ID NO: 34583 - DNA, 1050 bp, Homo sapiens
ggggacacgtttgatgacctatttctgatgtttgcaagtcactttctttttttttttttttttgagacggagtctcgctctgtcgcccaggctggagtgcagtggtatgatctcggctcactgcaagctccacctcccaggttctcgccattctcctgcctcagcctccggagtagctgggactacaggagcccacaaccacacccggctaattttttgtatttttagtagagacggagtttcaccgtgttaggcaggatggtctcgatatcctgacctcgtgatccgcccaccttggcctcccgaagtgctgggatcacaggcatgagccaccacgcccggccgcaagtcactttctaagcttcccaaatgttgccacagaaagaactagaaaatgacctaatcattgtggtaacttcaacccaaccaatacctttttcctaaaaccatcactccttatattaataaaatcaaaacataaatgggacagccagcttctccatgtgcccatcacgctctgctcttccctccccttcccctgagactgaaagcaaaagcaattttacagtctctccatcatcaggaaagacaccaaagtcatctgcttttctgcaactgctctaatatttacaagatgcaacaaagtgaaaacgttttccggagtaacaaaggcaaatggctttcacttgttcaaagtggtatgggagagagaccgccattatccctcacgccgcagggaagcttgtgggttctgccagccccatcgtctcaagggcatttggtcacagatcccaggtctcagggctgactgcagcctgcgtcatgtggatctttggtaaaagctgtttaagtgatgtggggccctcaggctctgcaggactggagagacacaggccccttccggggttgcgcttgcctgtgaggaagggtggaggatttgccaagccaatggcgggtccttcaggggttcgattctgacttgggtaggggaggctgggttttctgttgagttcctctgatttttgcacaggcatttttgcactgagctga

SEQ ID NO: 34584 - DNA, 1114 bp, Homo sapiens
aagggtgaccaggctgattctttctgaaactcagtggtttaacccaggcagaggagggcctcagctcagccccttatgtgaagttgaaaacactcataaaatgggtcactggacttagcatgcgtgtgtgtgtgtgtgtgtgtgtgcgtgtgtgtgtgtgtgtgtgtgcgtgtgtgtgtcttcctcttaattgtttttcctttttaattgtctttcttttttaaaattaaaaattcttcttttactctgaatcagtctcttaagtttttgtttgtttgtttgtttgtttgtttttgagacggagtctcgctctgttgcccaggctggagtgcagtggtgcgatcttggctcactgcaatttctgcctcctgggttcaagcaattctcttgcctcagcctcccagactagctgggactacaggtgcccgccaccacacctggctaattttttttatttttcagtagagacagggtgtcaccatgttgcccaggctgttctcagactcctgagctcaactgatctgcccgcctcggcctctcaaagtgctggcattataggcgtgagccactgtgcctggcccagcctcttaagttttcatcattagatatcaagcagaagcaaaggagtcttctttcttttttttttccccttaaaaaaaagcctgcagcacctgctattcccaggcggtctcccatccaaatactaaccacgcccgaccctgcttagcttcacgagatcaggctcattcagggtagtttggccatggacagcaaaggagtctcaataaaacatgttaggcctgagggaggcacggtgagcccccacacagagcagaccatcagttaccgaggcgcttgcagccttctgggaatggactggtcccggcccttccctgtcctgggagcgagcactgtctgcggtgctgagtctggttccctggcctttcttcatggtttcgctgcaaacaattgcaaccttccatggtgtgtcattcactttgacgtttgtgaactttatataaagtgggccatgacgcacattcttctgcagtttgcttctgggacccgtgttagggccctgagagctatttgctgtgtagagctgtgttttcat

SEQ ID NO: 34585 - DNA, 1001 bp, Homo sapiens
gaccaaatgttggtagaattaagtaaaaggcaaatgagacgtatcctcccagacacactggctcaccctagcccattcagtgtttgatcacatacagtaattgatttttatgctatcttagttttccagggcttccataacaaattaccgtaagtttggtggcttaaaacaacacgcatttattctctcatagttctaaaggctctgagaatccattcatctctcctagtttgtagtggttgccagcaatcattggcattccttgacctgtgcctccagcacttcaatctctgcctccgtggttacgtggtgttcttgtttctccagatctcttttcttcttctaataagggcaacattcatattggattagggccaaccctaatccagtataatctcatagtgaataactgctgaatgaaacagtcactgagattagggagcgtgtcaggagaatggtgcagatggcagaactatctcagactgtttccctttggggaagcaggccccagccagaggctgctgggtccagggagcagggagaaagctggagatatccaggcttaggtcaaggatctgacccactgcctggggctggaaatagtgtctacatagcactgtcctgtaggactttctgtgataatggcaatgttctatgtctgcactgtccaataccgtagttacttttggctactgacccacacttgagtgcagctagtgcaactagggaactgatttaaattagatttatgggaaattgaatgtatttaactgctgcacatttaagtagccacatgaggctaggggctactgttgaacaatgcagcactagagacactcacctgggacccttaaagcccctccattctgagttgtcagcgtctaagtgctggaagctgggtggaactcgagaagcagcagtggaggctccaaccggaagtccctggctgctctgagcgccctgagtggcagccctgttgtgctgatcagaatgatggctcc

SEQ ID NO: 34586 - DNA, 1050 bp, Homo sapiens
gcctccagcaagtccttctctcagctgagcccagcgctctcatctgtgatgtgccggcatggagaggtgcaggcagggcccagagcatgtgtgcctggtctggcgggtacccctcaggacacacagtggcatatgcccattatattgctcctgtgcagcctccccaagggcaaatttagcagataaagatgtacacgcttcaagtcgggctccagagaaaccacagatacaattgtagtatcagtccaccccatgcgggttcttgtaagcatatcccacgcattggaacatccttacattgtcctaaaaacaattcctcacggtctctctggaattccaatttaactggaagtccagcatttcatctggcaactccacttccctaatgtcacaaaggtattggtcatgggtgaaaccgtgacatttgagtgttcatgaaataaactacaggagccacgggcctgggtcctccacaacagtcacacgacagcttttcatcaagacagaaacaaaactcacgccagcctcctctccaccaggtgaggcatcgccctgtcttccgggctctccagctggatcccagcagcagaccgtggagttacgccttgcccctgccccacccagcccctgcaccccccaccccccgcccagtcccgccctgcggaagccgcacctcccgtgaagctgtaccagtccgccccgttgatgatgctccccctcttcaggaaattgcctccacacctattctccgacctgtccatcatcatggggtggacgtcagcgtaggctctggacagcagcttgaacatctggaaaagaaacctggctcagataaggaaagggtcccctgcaggacgtcctgtgagctggggtcaatgaggggaggagctgcgcgtgcaaacacctgcattgcagataggagaggggaatggtgtctgcaggtaggagaggggaacggtgtcctgcagaggacacagtgtatgtgaaggcccagaggtgggtcacaggcggtctggcactgctggagttcggggccaggtcccatgggta

SEQ ID NO: 34587 - DNA, 1066 bp, Homo sapiens
ggagtttgagaccagcctagccaatatgttgaaattccatctctactaaaaaaaaaaaaaaaaaaatacaaaaagtagccgggtgtggtggcaggtacctgtaatcccagctacttgggaggctgaggcaggagaatcacttgaactcaggaggtggaggttgcagtgagccgagatcgcgccactgcactccagcctgggcgagagagtgagactcggtctcaaaacaaaccaacaaaaaaggacatggaagtgcagaagggccccccgctggctggatccggggtggtgtgtgaagagaatgctatctcctcgtctccacctccccggcccccactcttgccacggcccccctgcacagccttccccaaggctccctgacccactcctcggcccagtttctatgccgggggcctggcccttggcccctgacacgaactgggctctggaatgagtccttccaccccacacacccactgcagcaggctcttccctagacagcgtgaacgggtggggacagaatgaagtgcagggaaggcctcgtgcaggtgccccacggggggactgagactgagcggccacctgcacaccccgagtcctgggcaccttgcgcctgctgtttccacacccacttcagcaaagcacgaagcagaggtctgctccacgggcctcccgggatttcagaggacccctgcacggtgccctgtatgcagtggagccaaataaatgtaaacttacaagtcactaggcgcatgggtgaatgtaggatgcaggggctcaggaggctgtgagatgttccccaaacactccagatcattcttgctccgcaaaccaagcgctgttgtgccagtgtaagacttgagggctgtaggctgcctgagccctccccatgccttcccccgagagcacgccacccagcgccgggggtgtgcctgctcctctgggcttcagctgggaaccccgaggccttcgcctcagggcatagctgccaggaggcaatggaacgaggctgagggtgctggtggggaccatgctgtcattcagttgaggtcaaggcactgctcag

SEQ ID NO: 34588 - DNA, 1079 bp, Homo sapiens
caaatgggctgtaccttgtagcattccaaggacaggcctgaattctgagaagggaaagtggtaaaagtattgtccagtcctttttacgttggtggctgagcttggtaagatgtgtttttaaaagaccattagtctgttctactttcctgaggactgaggactgtaagggatataaaggtttcactgaatactagaagcctgaaaaaatgcttggctgacttgattaataaaggccggtctgctatcacactgtatagaggtgggaaggctaaactgaggaattatgtctgacagaagggaagaaatgaccttggtggccttcttacaccctgtgggaaaggcccttacctatccagtgaaagtgtctacctagaccaagaggtattttagtttcctgactcggggcacgttgagtaaagctaatttgccagtcctgggtgggggcaaatccttgagcttgatgtgcagggaagggagggggcctgaagaatccctgaggagtagtagaatagctgatggaacactgagaagttatttctttgaggatagatttccacgatggaaaggaaatgagaggttctaagaggcgggctagtggcttgtactatagcatagcctgcttttgttggtgtgtggcgattaggcctggtggagctgccatcaataaactaagtgtgatcagggtgagaaacagagaagaaggaaatgtggggaaatggggtgaatgtcagatggaccagagagatgcagtcatgagggtcaggtgtggtatcaggaataatgtgggtggccggattgaagtccgggccaggaacaatggtaattgtgggagactcaacaaagagtgagtacagctgaaggagccagggagcagaaagtatatgtggcaggtgtgaggaagaaaatagattttggaagttatgagagctgtagagagtgagttgaccatagcttgtgattttaagggcctttaaaagtattagggtggcagcagctgctgcacggagacataatggccaacctaaaacagtaaggtcaagttgtttggacaaaaaggctacaggatgcgatcctggtcc

SEQ ID NO: 34589 - DNA, 1050 bp, Homo sapiens
ttcagactatcacatggggagaaaccttggacaaaaccctgctttcaagggcagggctccctgcggctctccactgtgcattgtgcccctggtttattgtgactagagaatggcaatgacttttaccaactttactgcttgtaaacatttggttaacaaggcacgtcctgcacagccctagatcccttaaaccttgattttagacaacacatgtttttgtgaactccaagttgggtcaaagtgactggggcaaagtggctggggcaaagctacaaatgaacaacatctcagcaaagcaattgttagagtacaggtctttttcaaagtggagtctcttatgtcttccctttctacatagacacagtgacagtctgatctctctcttttccctacatttcccccttttctttttaacaaaaccgccatcgtcatcatggccccttctcactggtcgctgtctctccggagctgctggatacacctgtagactaacaatagagaggacagacatacaaaaattaatacaaaatttgcaatagtggaatttccaatggttttaacccaagtgacagggttaagatttgtgaggctatcaacagcttttaccattgcctccgtttctgacaccagatttaactgggcttttgaggtttcaaaaatttgttctttcaatttagaaatatctaaggtaagattatcttctcttccttgtagatggcgtctaaccatgtcccagtgatgttcaggttcattataggctcaaggtttaatacaaaaatctgacgtattccagtcacactgtaactgaaaaagatattctaagctcatgagcctatctcccatccaaataacagtttgtctaagatcattaatttgatttgccaatttttgatctatttgagtctgagaattccacaattttgaggaattcttttgccaattattcacatattctgcagtttgaacagaggagtgtaaagaaattccagcagccgcagcagtagctgtgactgcaataagacccacaatcactgcaatcaaagtaaaaat

SEQ ID NO: 34590 - DNA, 1025 bp, Homo sapiens
caattgcacacttttttttttttttttttgagacaaggtctagctggagtacagtgatgcagtcatagcccactgcagcctcagattcctgggctcaagcaatccacccacatcagtttcccaagtagttgggactacaggcccacactactatgcccagctaattattttaatttttgtagagatggcaggtggcggtggggggggggggttgtctcgctatgttgcccagggtggtctcgaacacttgacctcaagtgaacctcctgcctcagccccacaaatctctgcaattataggtgtgagccactgtggctggctacaatactatttatttatattttagaccaacagatattctagtatataagaaatgtgatgctctctgtacattgaagagttgggctaatatttgtcctggtggatacagaaattgcctgtctgctccgctctggttgaagaaaccagtccgactgtctctgaggctatggagcagtccatgaagaatgaaagccctctgccaggcatgttggctcacacctgtaataccagcactttgggaggccgaggcaggtggatcacttgaagtcaggagttcgacaccagcatggtcaacatggtgaaaccctgtctctacaaaaaatagaaaaattagctgggcctggtgatgcgtgcctgtaatcccagctactcaggaggctgaggcaagagagtcacttgaacttgggaagcagaggttacagtggggagctgagatcacaccactgcattccagcctgagcgacagagcgagactctctccaaaaaaaaaaaaaaaaaaaaaaagaaagaatgaatgtcctcatgatggcctcaagcacattggtccctgaagagggtcaaagaaggcccactttactctgcactgcaaagcaggcaggtggacaggatgagaagtggattcagtgagaggcattgacccagaggattttctgcctaatggttcagcagaagattaaactgagcacagcatcctgttccctgaa

SEQ ID NO: 34591 - DNA, 1028 bp, Homo sapiens
gcgtaatcctaagaaccttcgagtatgttaacttacagggcaaatggggcttggctgatgtgattaaagtaaggatcttgagtttgggtcattaacgtggatgactgggtaaacccaatgtcctcataaggacacaaaggtccttataaaagggaggtggcagagtcagagtcagaaaggaagtgatactagaagaagagatgagagagagagaaaaagatttgaagatgctgcactgctggccttgaagacggaggaaggggtcatgagccaaggatagcaggcagcttgtagaagctggaaaaggaaaagaaatgtattatcccctaaagattccaaggtgttgcgtctctatgaacactttgattttaggatttttgatccccagaactgtaagataataaatttttgttgttttaagccactaagagggtgtatgtgcgtgtcatcgttttttttttaatttttaactttttgtgttgaaatactttcacacttacagaaaacttatgaaaagagaaaatcacccagatttccattttttcagctacattgaagtataatcaactgagtcacaagggctagacatttaagatgtagaactcgtatatctgaaattgcatacatctaagatgtagaactcaatgttttgatattagtatatgttatgaaaccatcaccacaatcaagctaattaacatatcatcacctcatgtatttaccattttcctttctttttatgtgtggtgagaacacttaaaatctaccctcttggcaaatttcaggtatacagtacctgaaactgtagtcaccatgctgttcatgagatctccagaacttattcatgctgcataactgaaactttgtaccctttgactatcatctttccatttctccccttccctcatctcctgaaaaccaccgttctcctctctgtcgagccataagtttttagaaattagttacagcagcagcagaaaactattacagacagcctagagcagttgtctccagagcaggtaatgagt

SEQ ID NO: 34592 - DNA, 1033 bp, Homo sapiens
agtataaaaaggaaggcacgcacagcatggggccgaggaggttgttgcctgggggagctgagggctcttgtcgagaccatgctccagtgggcctccaagtgggatggtgagaaattgtacacgggtgagtaaggcttcgctactgcccagaaaaacagtttcccatgagccatccccgacagtgttctccaggtgtcagccctcaggtctgccgtcccgtttctgttggcagggctgccctgagagtgctcttcctaataccactgctgccaactgtctggggccagtgcacccggcctgccaccgtggctaaacttatgtcccaaaaaagcaaccagcatcccacccttccaccaaaaccccaagggccagttgtcaaaacccccatgtcccaactctcaaatgccacacctgtgtgagtcacgcagatgctgatgttcggtgctgatctgggctgcagtgggatggagcagcaggtatcagcccaggctgcgtgttagaaccacctgggagctctaaaaagcgctggctgctgacgcccccagaggcactaagtttacagggaagtctcagggcagcaggagcttgcaggcctccagaaggaacacccgtgggcatctgggcatggctaggagtgtttctggtaagttcaaggcattgagcctgcacacaagtctcttggcctcttgccgagtgcacgttctgatttggcaggaaggtgggcctgagccctgctggtgggggctgtgctggtctgaggtccgcgctgtaagggactggtgggatgccacattggaaggaggccgcccagctcagtgtctcttactggggcatgtgatgatttttccccacgtctctgtggaaaagatgaaagtagctgcattcgttgcccattctccagtcccactggtaactgtgtacctgtctccaaggagacctgcatccaaagatctatgccatattgtggcaacatgtggcataccacagagatcaagaattcctgcggaaaagccctgagctcagaggagagggg

SEQ ID NO: 34593 - DNA, 1033 bp, Homo sapiens
gggaggttccccaatccctctccctctttgttcactggccgggcctccgtgtggaaagggctatttttagccctcgctttttttggttaatgggcttttcgcggcttctctctttgaaggggctatttcaggagcagacatcagtgtctgcatttggactccttggctcgaggtgcaggaaaaggtgatggggatgagctactcgaggggcatctgtgtccctggactgtgccgggcccctcccttgcccctgctgggttctggggccagggagggacacatgacaccaccctgccagagcctgtgggaggcgtcggcagaggtgaaccacagacttggatttggggtcctggggtttgcgcgagcaggaatgtcctcgcttctgggacctggaactggagtaggaatgtccatgttttgacctcagggagccactgaaatgggcacttgtgacaggttggaattgaacagtggctgattagtttcctccattttgtagcaagagccatcagcgtccactgtcccacccactcatctgggcttgggtgattcgggcatttggggtgagctcttttctcttagttcttaactcattcgtcagaaggacccaggggtcagccaggcccagccatctccctggcccactgcacttcaaggaagctcaggctggcttggaggagccagtgcgaagtcagcggcaaggcgaggctgtgctggccaaggaagcggagttcggcagcgagagaactcgatgtgctggtcagaggtctaggattcgagctgtggttatgtcatggtcaaggttgtgtggcctcatctggaaggagtagtggtgcatacacccctgtccaccccccgcccaacagggggtctagaagtgctttgcctcaggccctcccaccactgccttcactgcagccggctccttcctgcagctctctcgggaactgccctgtgaggccctttgacacagggaatgtggaccctatggactgacatggacaagggaccgtgggccatgttgacacagata

SEQ ID NO: 34594 - DNA, 1114 bp, Homo sapiens
tttgacgcagagcttttcctgtacacagatgggaacaagaggtacaggagtgagagtggtaccccttctagaatggtggcccactcattcattcactcactcattcattcataagctcaacagatacttactgcctgccttgcctagccatctgcagcccagggaggccaagtgagtaagctgatgtgggcctcatcagcctctctggagagtgacagctatgaccaaattgctgagagagctaagcaccagtaggggagggcgggactcatgcacgccgtggccctatgcttgtaccatcctgcgtgtgcacagcagcctgtcctgaagggtgtatgggagatggtaggccttggggttggggaagacctgggttcggctctgtcttactctgctttgtgctcacaggctgggtaatttacgactaacacaaatgtattggctcatagttcttggggctgggcagttggacagcaggggccgttgcacagcaggggccggtatctgtcaagggccttttgctgtgtcagtccatggcagaagaacaaagagaaggtgagagaagaagaggggctgggcttgtccttttattgggaagctgctcatgtcataatacccattcctgagggcagagccctcctggcctaatcacctctccataggccgcctctgatgcattggggattaagtttccagcacatggttttcgaggtcacactcagaccatggcagcctcttactggtggcgtagccttagttgagtaactcaccttcctgggcccaaattttctcttccaaactggggctgctagtgcctgcctcttagggtgtgaaggagccagtaaggcatggatatgcccagcatggctgttgcactaatgggtacttacccctgggtgacccgttacctgtcacaaaactggggctctgttctgatcgagccaggcggctgggtgagctggctgactgctgttggcggtcagctgaggtcacggtgaagggttgggcccggagtctggctcatagtaggcatttaatggtttttgtgtttagatcttctccagctccatctgtaaaacatgctctcatttacatcccatgatttatttagctc

SEQ ID NO: 34595 - DNA, 1067 bp, Homo sapiens
gacctctgtgcaaagactgggaagggtcacccccaatggctgtgaacgaacctgtttgtgattctaaacagggcacgggaccatcctacaataaaaattacccagcctaaaatgccagtagtgccagtagtccctgtttagaaaaagaaaaaaaaaaagcaacttttgcctcacaacagaggccctcttgtgtgctgccaggcagccagcagatttgctatgcaggcaagtttggggcctggtttttaaagtatccagttcctagattccagaactaaaatacacatttggaaaaatgatgtctataaaattgagtttccgggagtgcaaggtttatagcaatttgacactgctgggaacccaggcgcagtatcagtggacttttctccttgaacagggggcagaccaagtggggggttggggagggtattgggctcactcttggtttcccttggtgtgagctgccaccattcacatgcagaggactcacctgtgtttcctgcgggttgggggtaatggtggcatgacagagggcttgaggactgacctagctgcttctccggaattggacgcctgctgactacctgcgtgtatccagatggccattggcctgtgggggtgcaggatggaggccctgcccacatggagctcactgtcctgggtgggagtgaaataaactctaggtggcagaaggaagtggtgcgttggattatcacctgggtgcaaacgagctggcagcagcgcctgccaggtgcagagccaggaacctctaggccttcagtctgaccacctgatggcaggggaagcagagggtggtggggggccttcatctcaggagaatctgagtggctgcaggtgccagtcaggacgctgggcttctgcagatgggaccacatctgggaggaccgaagggccgggtgcttatgggctgttactgtggcactgagcgtgaggggagtggacaggacccaggctgagaagtgctggtgtgcagtggtggcaggtggctcacacagccctaccatagcgcagccctgctctgaaggccactggagccattcagaggt

SEQ ID NO: 34596 - DNA, 1034 bp, Homo sapiens
atggccattcttttactccctccctggttttgtaatactcccgagtgttccgtatagcacaaagagttttgcttttactggccattttaaagaatgttttcaactgcttgcctgaatttactcctttcacagcaagtgttagaagaaagataacattttcaaatacttagcttttgctttctttaaaatacattggtttatgacatatgggaagggaacgtacctttttgcaaagacaaaaagagattacaaaaggaaaatatctaaaactattttctctttgcccttaccactcccagaaacataagtgaccaatttaaaatgctagggaacaggcttacaacataggtaaaactcgcaaacacagttcaaggtaggctcataaagttgtgaaaagggtttcatatgccctttagttttcatttgggattcatccaaagaccatgggtggatgctgtcttctctcttcttgatccctttgattcatggacactagactccctttgccatttcttctgaaccggccctcctgtggactagcacaacttccttgcccactgtttcttcctttctgtgcctttgagaccccttaaggttttccctcatgcgattactagaaaatggcaggaatcaacaaaatggagacctcccactgtttttgctaaagttacaggaacacgatccctagttttcattgatagtaacgctgtttctaatttgtcttaaccacattcatgcttaccctgctgctcagctttctcagggaagcaactccaggaacactccttccactcccctctctaccaacagatgtcaggactgtcatttatctacacatttgtgttctttagaaaaaggcccaccccctgcacaagcacagcctcttgggcagataggtggctgggtcagtgcttaagacaggattctagtcttcacttgcctgtgcagctgggcgctgaccttccaggtagagcacagatggcacaaccccgaggcagccccaacttgcatttccctccctccaggggctattc

SEQ ID NO: 34597 - DNA, 1028 bp, Homo sapiens
cagccccccactgcaaccctgcaggcctccatctgcttgatgtctaagtgttgtatgcatacttaagatagagcaagtctgactgagggcttgatttcatgctggaaattgcttttgaagaaggtgactatctttcgcaaaagtagagtaggaaaagacgacactgccaaagaaaatacagcttgtcatcagatatgatgtgttattttggtgctttccaaagggcaggttttacaccagatctgagtgcgttactgttgcatctcttgagcccctgtggaggggcttttttaaactccccgacgtcggtctttcagactacctttatatggctcttggcctgttagcattgtgccagaaggaagctacctgtgttgccacccatcattgtcattgaacaaacactgactgagtccctctgggtgcctcttgacacttggagaaggactcaaaaatttcaaaagtcttctcttatactctagtgttcttatactctagcattctaatcatcatggcggctctgggaggaattggataattgttcctaattctagttgctagatgaaaaactgaggttcagaagatctaagtgactttcttaagtcatgaaagaaaggcttttagcagattccaaactagaatggattttgttatgctcctagtttgccatattctgggaaaataagtgtctttaaagattgtataaaagagtcactgtggccaggtgcggtggctcacgcctgtaatcccagcactttgggaggctgaggcaggcagatcacctgaggtcaggggttaaagaccagcctggccaacatggagaaaccctgtctctactaaaaatacaaaattagctgggcatggtggtgcaaacctgtaatcccagctactcgggaggctgaggcaggagaattgcttgaaccctggaggcagaggttgcagtgagccaagattgcaccattgcactccagcctgggcaacaagagtgaaacactgtctcaaaaaaaaaaaaaaaaaaaggtcactct

SEQ ID NO: 34598 - DNA, 1053 bp, Homo sapiens
gtcccagaaggagatgaaaaatagtgtgcagagaaaatatttgaagaaataatagtaagaaagcctctcaaatttgacaaaacccataaacttacagatttaagaggttgaacaaactccaaacagaaaacaaacgaacaaacaaacaaacaaattcacacttggagacattataatcaagctgctggaaagtaaagaaaaaatattgaagacgacagagaaaatgatgcattacttaggagagcaacaatttcaatgactgtagatttctcatcagaaaccatggtagccagaaagaagtaaaaaaagcatttttaaagggcctaaagaaaaacacagtcaaactccatcgagtgaaaaattcctgcagaaatgacagtgaaataaagctgtctcagataaagaagaactaagagaatttgttgccagcagacttcctctaaaataactgttaaagaattttgttttcagaacaaagcttttcttttaaaaagaaaactatcgttaacatttagctatattagtatcagacaaagtagacttcagagcaaagaacaatagggataaagtgagacataacataatgataaggtcaatttctcaagaagccataaaagtcctcaatgtgtaaaataagtactgacaatagaatttcaaaacatatgaaacaaaatttgacagaactgaaagaagtatacaaatccaccattatatttagatgtattacctctgctctcagtaattcaacctccgttctcagtaattgatagattcagtggatactgagtctgcaaggatatagaaaaactgaacaacatcatcaaagctggatgttttcacactgacgttttacatatcaaccaacaaccgaagaatgtacatccttgtcttcaagtggacagagatcattcaccaagatagaatgtattccaggtcacaaaacaaatttaaaaattaaaatcacttgaaatcatacaaatgttactctttcattctaatagattaaactaaaatcaataacaaagattacaggagactctcaaacacttgaaa

SEQ ID NO: 34599 - DNA, 1040 bp, Homo sapiens
tgtgcttgtttctgtttttatttgctgtgtggaaccatcaactaaaacagttggcaatgtactttgattgcagggcacacaacggtagctggataagcttccttcttggatagcttagaagcttccgagggcagccattatgtataagaatagtgaatgtttaatgtattattgtgattttcctcgatttggtcctgaaatatctctctggaaatagccttaagctatgataatcgctttctaggagagtcttgatgggggaaagttacgttgaggtatattgattaggtgcaaaacagagcaggcaacacaacaaaacagaaaataaaagaaacatttgatcactcacaggtccacgagagaagaggtgtgctcaggagggctgactggaagtctgaagacagcatggcatacaaccaatgggtggagagcaggagccagagatgacatatgggatgaggccttcattaaagtccatgggtattatccatcaggctttcctgtagggattgtggattggtcaatttaaagaaaacacttgtgaacaggagtacttatctacatgattctgacattgatcattgagttttatcatggacagtagctgtgggattttaggctagtgagataggaataagcaggccatattgcaaacaacaacaggggcaagaaaagttttaactagtccaaaggtgaaggaatataaacaggtttccaacagtggataccaggcctaaaaatggatgccaaggcaacaactatattaaacaactttatgacacatacatttgtcatataaatagtcagtcctcttgtatgtagagaaaaagaataatgattaatatgtaacatgttcagatttttgcctaatggatctgcttttaagtgaagaggttacatattctaatctgctctataagccacagtctctgtacttgctaactattatttcacctttataatggccctctgaggtcagttgtatcgtttttttttaacagttaagaaaatggaaactgaggctgcaagatgtaaagtga

SEQ ID NO: 34600 - DNA, 1047 bp, Homo sapiens
gtttaataaggtttgctgaatttgataatatattacaaaatattttcaacatggagatttttattttccatttcaaaaaagttttggaagaaatgtctatcaaattttgttgctcaaactccagcttcgttttcaaattgtgcacaaaatttaatccaagggactggcccttttattacaaaatattaagaggataataatgataattaaaatggaaatacgtatggtctatcatcagtaatattcttcagcagtaacttatttttcttcaatactccaatctagttaagtgttaataaaacttacctaataacatctgtaagtggctggtttggatgagagaccagcattccattgctgtatttgacacttctaaaaaatctactaaataaatgagatatttctttccagaatccatggaaacatgtcaatttagtcaattctatagtttttatatatctgatttttcatgatgtactgtcaagaataaatgatttaaaattagaagatgggctgtgagtctgtaatatttgacattcaatacttataaaacatagaggatgaagatgataatcatagtcatttatgctttgcctacttgaaaaaggtgctcatttcttattaaataagacattttttgccactgataaatatgtgtggcactcttatcatatgtcagaacttgtgatgataattcaaagataaaatgcaatagctgaactcaacaaatttacagacaggcaagaaagatttctaaagagaataatcaaagagtttaataagaactgcaagagaggtcctaaagtagcccagtgaggagaaaacttaaaaatcagattcaaggattgagggatcatggacattttaataaagaaagtaacagtgatttaccataagctttagattttcccctgatcaccaggttgtttacttgatttattagtttgtttttaagctgctgataaagacatacttgagactaagtaatttataaagaaaaagttgtttaatggactcacagttccatgtggctggggaggcctcaca

SEQ ID NO: 34601 - DNA, 1051 bp, Homo sapiens
gaaaatcacttctgacatatccaagacatcctagccagcaggaatgatattcgaggagatgagtgatttcaacaccaaatgacatcatttttggcatgttgtggtaatgtccataagacatcattcttgccttttaaaatatctttgtaagaaataaaaatgcaagatgactgaggtgatttttctacatgtacatatctgagcaagtgggaagaacaaaaacactctttgggcaaccttgcctgcctgttagaaattagttcaaattaagttttgatatactctctgctccaaagtgcttttagacatggtactttggagctaaaatgaaaatacaaccaactttgctttggattcttcaatgtgcgaggtgtttttacatttattatctcaccacgttctcataggcacactgtgatttcagtattataagccacatttttataaaagaggaaacaaaagctcagaggagcaaagggacctccctaatatcacatagctaaacagtgagtgacaaagtaaggacttcaatgcagattttttttgtctttgccccaaatccagtgctcttggaaccataagtcattgccttagagatcattcttgccaattctcctttttatagataaaaaattaaggttcaaagaggacgaataccttcctgatgctctcaatggtaagcacattgattccatagagattcagtttgcaaacctcaaagaagggttcagttcctgtttaccaaatacttgtatatgggctgctctaagtataaagtttcagcactcctataaaaatgcagaattttcaaagaaacaaaaaaaacaccagaaattgtgattcatttgtcttggaatgccaacagaatacttcctgaatacaacagtaatatgaaatgtttttgttacctggtacataaaaagtgacttatttgattctgcatactgttatcataaacattatacacttatcttagtttgcagggctttcataacaaagtgtcacagactggttgtcgtaaacaataggaatttattttctcacacttttg

SEQ ID NO: 34602 - DNA, 1624 bp, Homo sapiens
ctaatgaaaaatacaaaactgtcttcaagtatttaagcagaggatattattgcagagcattagttacgtaggcaatggagttgccaagagttgaacaagagattcacaacatcacaaagcactgtaacccctaggctgcctggcagacaaaggcaggaaatcttgtaaccagcaccaatgacctggggcctcttcagctcccttgtgaatctctggcttaatgttgagtcttgggttcagctctctcatctgtcctaaggacagaagaaacctgagggacagtgagaaagtagtgagttcaatagtttggaggtctagtgagggtaaagaactgacaggagggtcactagagcaaggacacccaagaatggaaatggggatcagaaaattcaatctttaaatgaaagattttgaatgaagtgcagctcctggtgacaacactgtgcttatgacccaagggagtgaatatgtaaagtcaagtggaaagaaaagtcactggagattaggaaagtgaggaatggagaggtgaacagggccactgtgttgtacaactccagggggagcccttcacatagtcagcctgaccctgtttaggctaagacacaaaggtcctctcccacatacacacaagtatgtgaaagtagaaatgtttcctttttttgttttgttcaacactgtatccctagcaactagaacatggtctgtcaacaggtactcaatgaatttttgtgggatgaatgaattaaggctgatgtcagtggcaatgagaacaagataattaaattcacagctaaaggctttaataaatgagggaggttgacttggaggtcagtagatgacagcaacaagttggcaatgatggagataaaacagaatggcctgacctttataagcaatgggagttcctttgcttttggtgtgtgtgaggtggatagtgacctagaagctgtaacgacaagccaaccctctcctaagccacatgagatgtgagataaaagatggttcacttgaaaacactgtaggagaaatgaactcgtaagttggagtcaggtagatttttagataagacagtagagtaaatgttctgggaggagaccaaggatcaagtagaatttactgattatagatgggtagttccaaggcaccacagacagcaataggagggaggatatgttggtcagagtccggacagaaaaacaaatttgactcaggtggttcaacttagagatttttaatgacggaagaccatttagccgtgtgtaggcagggttaaggaaaccagctagaaaagtgaaggtatcctgagactagcaatgattgacagccattactattcctgagtctgaagtggcaaggacaggaaactgtgaaagagcccggtgagagccagaatcatagaggcagaaatgcctaagggaacagaggtatagagccactgcctggagcacagcagagaaccagggaggaagcaggggagaataaggcccccctccattctgtctacctaacccatgattacctgcttcgatctttcaatggctgtactcacctgcaaattagagggcagggagcctggaagctgccattcataggagtttgcttctagggcaaaagtggggcaggt

SEQ ID NO: 34603 - DNA, 1027 bp, Homo sapiens
ataattcaggactggtagtgccccagtgtgaaaagatagggtaaaatacagtcatgacacagagataggtcaaggaagacagagacataaaaatgagatgaagaaatcatggtgataataatatgtaacattcactgagtatatttatgcaccaggcactgtgctagcactttacgtatgctgtggtaattaatcctcctaatgatgccacatgtcagaataacatttaaaatatttaagagcaagtagaacatagatagcatcaatgggtgaaaataaatgttgccttagtgctgggtctgggtcctggaagctctgtgccatggcagatactagccctattgtgtctggattgtggaggagagaatcagggtaagaaggagagtatgcttactgtgccaatcttctccgtttgctcccctctctgctcctcttatcccatcagttctttttctctacttcccattgccttctaatcaagcattctggagagtgagagaatggttctcccacacatggactatactagcagggacttccagctatgatcttgaaataaagaatctgaacctaacttaaagcaagctggattcaaagagcaggggaaaggagcataaaaggattatcaatgattttcagatcaacagctctcaaactgatctcaagattccttttagttttaaaaaatattgagtacctcaaaaagatgtttttaaatctttatttgttatatattagcagtgagagtttttgaaagtttattaacacatttaaaagcaacaagtatgatcacagttctattaaaaatcatcattttatatttttgcaagccttttactttgtttttttcattgcaaacatttgtaatacttgatttaaaagaagacagctcctctcctatctgcttctgcattcagtcagtgtgataaattgttttggttgaaatatatgtagaaaattcaatctctctcacacaaacacacacacatagttgaacttataatcagcttttcaaataattattgat

SEQ ID NO: 34604 - DNA, 1021 bp, Homo sapiens
aatcactacctcataccatattatgtttgcatagtggcttctagcaaaatacatgacacgtagaaattactctgttaatatttatttaacatgtggatccaggatctatgttgaaggttatcttttgagataagcacacattgcttcattttatagctgggtacactgaggctcagtttgcctaaataacttagaaaggccacagatatagtaagttgtggcgctgtgtcaggaaattgggtttcctgtattccagtccagagctgactctcttggttggtatgggagagcacctgaaaaaatatttctcatcatcagaaacagtcatttgggacactcgagattttgtgaggtactgccttcacttataattgcaaaaaaggtaagatagcattagttattaataatactacttttattacatgtgagtgccactttacagttcacaagatgtttttgcagacattttcatttaatcttcgtcattgcctgcactgaccctggactttaacactaggttgattctttgagaaacatacctctgtaaacaaacatccattacaaacaaatattcaatgctactaaacgtctgcagttcgaggcaataactttggtcctttcttctctttccgaactcctcacattacctgtagtttgattttaccttcttagtgcttacttttattccatctccatcccatccaaaaatacctcttttcctgactcagtgcttagcatttggacctccactctcctgcccgggttctagttgaatctgtactttgtgtctcagaagctcacatattaaaagaataaagtccctgattcaggcaccatctgtcccaaagctgatgatcagtcaggccagcctcagccccagtcgaggctgtggggttaaaattcatgtattcacagatgaagaaacaggctcagcaaggtcatgcaacttgcttgagattgtagcagagcttgttggttgtctctcaaaacccgtttttttttttttttcattattctttat

SEQ ID NO: 34605 - DNA, 1035 bp, Homo sapiens
tgtggcatttgcgaagaatactgagtcacatggatgtgaaaggtgatagaacattgccttcaataaaacaagctctgagttctgcgggtaaaattcctcattcaggagctttaacatttcccttttgacatactccaccacagaatactcataaatgaaatcttaattctacagttgagaattggtgtttttcctgggagttccacagcattgcagcaagggcctccaaaggaataggtggatttgagcaggaggcctggagcattccccacatattcaatcctgtctcatgttttacccagaatatctctgctttatctgtctcatatatatatatatgtctaattatatgtatataattagactaccacatagtacttcttttgaacaaaaaacgactcttaaagacaaccatttaggagttcctcattctttttggcctaaacctgtttgtactatatcttattttctcactcgcaaactcttgtctccataggctatctttgatcttaccttcagacagactcttaaaaatttaatacatgttctgattctgcctcttggctcttcacataggatttctcttagtaggcaatcgtcctcctctccctaccatctcccaaaggccaaatgtcttccgttatctataataagaacctacagaggccgggcatcgtggcttatacttgtaatcccagcagttcgggaggccagggtgggtggatcacttgaggtcaggagttcgagaccagcctggccaacatggcaaaaccctgtctctactaaaaatacaaaaaaattagccaggtgtggtggtgcacacctgtgatcccacctacttgggaggctgaggcatgagaattgcttaaacctgggaggcagaggttgtagtgagctgagatcgtgccactgcactccagcctgggcgacagagtgagactctgcctcaaaaaaaaaaaaaaaaaaaaaaagaacctaaagctttgattttcagctcagctctttttttccacaccttagctagttcctggtgac

SEQ ID NO: 34606 - DNA, 1063 bp, Homo sapiens
gatctcatcttaccttaattaattacatctgaagtgactctatttctaaataaagtcacattctgaggtcctggaggttaagatgtcaacatattgtttttaggaggacacagttgaagccataacacattgtaaaattaaaataatcttgataataaaatacatgtgatttaatttctatagcttcaatttatttatctacacaatggatataataatgcttgctctgctaacaacacgtattaaagatcaaactgaacaggaggtcatcaagaactccagtacactttgcaaataatgcaaatatatttatcgtgattatgaacatgatccctttcatttcttcacaagtgctgggctgtgcactctcagagacactgagctttccattcaagatgtgaaaggtactggccagggatcgcagtgtacaccaaggcgttgttttctccaaaatgccttggcagctccaggtttctcaactccacgttttccaagccagcaggtactactgagctgtgaaacaagatgagatttcatgcagaatggaagagcatattggaggaacagcagaaaggggagcagagggaccagggctttccttagtgggcctgagagccagggcccatgacaaagtgcagcatttgctgggctcccttcccactctaactgcttgtctcatagttggacaactttggtcagccagtctttgttctggtccctgggagagtcaggcctttggatagtcaaattagaagtgctttagggtatctgctcaggaacccacatcaagatagccttcctgactgtacctgcgataagccctgcctcattgctgttggaaggcagtgtgctttgcaggctctcagtaaacaggtctcctgcactcagaaccctcttgctatacttctttccaaaatttcctcccctgttagcctggctgtggtgcctgagttccaccattactcacactcaagttaaagcttcaagctcacatgtcaaacagcaagacagaatatgacatatcagtgactgagtccatcccttgctcacttcagctgctgaa

SEQ ID NO: 34607 - DNA, 1077 bp, Homo sapiens
gattcttccaatccatgagtatgggatgttttttccatttgtttgtgttatctatgatcttttttcatcagtgttttgtagttctcctggtagagatctttcacctccttgtttaaatgaattccttgctattttacttatttttttgtaggtattgtaaatgagaatgagttctaaatttgattcttagcttgattattattggtatatagacatgctactgatttttgtatgtcgattttgtatcctgaaactttactgaagtcatttattaaatccaggagttttttggagtcttgagggtttctaggtataagattatgttctcagcaaacaataatttgattttctcttttcttatttgaatgccttttattatttctcttgtctgattgctctagctggaacttccagtactatgttgaataggagtaatgaaagtgggaatccctatcttgttccagttcttaggaggaacactttcaactttttcccatttattatgatgttggctgtaggtttattgtattaggtcggtgcaaaagcaattgcggtttttgccattaaaagtaatggtaaaagtaatatttgtttcatgcatctgagtgctctagtgttggtgcatatatatttagtcttgttatatcttgttgttgaattggtcccattatcattacataataacctttttcaccttgtttttactgttgttgatttaagtcttgttttatctgatatcaatatagctactcctgttaactttggttttcattttcattaaaagtaatggcaaaaaccgcaattacttttgcaccgacctgatatatattgtttattgtacattattttgaagtatgttccttctatgcctagtttatcgaggacttttatcatgaggagatgctcaactttatgaaatgctttttctgcatttatcaagatgatcatacagtttttccttttaattctgtttggtgaattacattttttgatttgtgaatattgaaccatccttgtatccctgcaataaaatccacttgattacagggtattatctttttgatatgctttttgcta

SEQ ID NO: 34608 - DNA, 1010 bp, Homo sapiens
atggaagacaagatcttggaggagaagaggctagggaatggagagacattattagaaggactatttttggggataactgacaagaattatgacagtaatgctaggaaaacagcaagccagaagccaatctcatcaagaaatggttaggagtgggagagagtagtcccaagggtctccaaacgatgggatggggttggtgtgtgctgatggcgtacatttccaggcaatggtggggtgtaggggaagagaaggagacaatgatttgaagtagcaataaggaacaaataggacacctactcctcctttagccctagagggtttagtagagaaacagccaccattgagcagactgcagggaaagcaatgcggtgtccttagggaagagccaggccttagttagagcaaaagacgtatggaatgttcagagaagaagcacagttataggggatcctgctgatgacagactgtggcttgtgttgggctttgtagaactaaattctagtacggtgtctgacctgggctggcactcaaattatggtggaaggaagagtggggaggatttcagacccttgagcttccctgaacttcatatcttcaacctctggctcatcacttactggatggatgagtgaataaatgagtaaatggaggcctatgagctggctcaggtggagctaaagacaagtgatagtctgtctgcttctacttaaggtggggttgtcaaacacaatttttcctacctgacttgttcaaggttctttatattctagcccgttccaacctatcctttcttgtttcctatcatttccaaattcagatgacctaccagacagtttgggttcctggctgtcccattaaaacaccatactcattcctgactctcagccttagcttaggaatttccttctgctagagtagcctattgtagtctcgtttccccagccagctctttgctgtccttcaaggccgtggcaagtcaaactcacccatgaaaccttccttgatgtgaa

SEQ ID NO: 34609 - DNA, 1043 bp, Homo sapiens
ctaccctttactttagagtcacttcagttattttagagatgtgcaggcctgctcacaaagtgctgagaactgggatttggctttggatcaggaatcctggtgctatcagtgtgggctggggttggagccacagggccttccagagagtgactttctggaaagatgtggaggaaatttagcaagtcattaaggaaacgactggtgagcagttcgtgatctgtggccagcattggcttatttgcatgacggatggttgaaataggatcctacctgtagcttctcctccgatggctccaagccagcccctccgcagtctgttgtgactcaaaagcttcaaggtctccatgcatcccagattgctgggacaactacacattgggtgggccagagtctgagggcatcaaagaagaaaggatagacccaaagaaagatgtcctttgtggtttttctctctgacagatggaagtctggaaaatgctatgctaaactccatgtaaagcagtatcactgaatatagctcagtgactgggctgtgtgactctagacaaactactaaactcttctgagtttccaattcttcattataaaacaagaacaattgtatgcacttcacaagacggtttcaaattttacatgatagaaaactgacgtggcacttagcgtagagcctgctataaagaaaagcagtttttcttttcctccattatttggttctctgggacttcactctttattcaattaaaatggtgataaagacaataagtgaaggtgtcactggcttttgtgcttgaggacagtggctatatgtgaagtgtgtgtgcatgctggtgtatgtcctatgtgctcagatattacataggaatcatagaaatagatatgtttgaatttaggctgtatagtgttgtgtcttttccaactgtgacaaagagataagaaaatccttgcagtcaggacatgccaagctctgctcatttatttatttaaggaatccttgcatgtcttctccatgtcagccatcatgccaactgctgaggatgcacaca

SEQ ID NO: 34610 - DNA, 1033 bp, Homo sapiens
agccatctgtacaaaatgatgagcctgataagcctctaagacagctgtgggtgttagtatccctgacacctcccatgttgaattcctcaggtagggggcaggcagaggctattctcctaccacctggggacttgtgttgagatgtagcactgtttgtttaataaatgaatgaacctaccaattgatcattcaactctgtgaaaataaaattttgttttccttgatttatagcttcatagtgccttgtattctatggatgtgttccaagcatgtgtagtttttctgttgtggaaagttatcaactcctccctcccacttccttcccttccctcctattttttccttctatcttttgtttttccatacactttaatcaagcacctattaagcatagtttcaatgctatcgaaggacacatgatacaatgaggtcaatgtaccaggtttatcatctgggttcatattcctgctcctttaccttgtaagctgtcacttaatcctttatagtctttactgctctgaattctatcctgtggatgataatacttgattttaggatttgttggggaaaccgagcatgggagatacttaatgagcactgattaaattggttaaataataatgaaatgtttttaggccagtatttttaaatggtgtaaattggaaagatttttttaaggattaattctatgtagggtattctatatgtggtaaaatgtcaagttgaggtatttgaataattctattaaattctataataaatgaaaagaacctggaataatgcttggcacatagtcagtgatgatcaaattttaacttttattacatgattatccacagcagtaagttcacttgttcttgctctaatgaaaattgtgagttaggtgaattacctctcaaataatttttccctccaaaaatgtgcattccataaattggtcttatttgatccttaagtcaacaaaatgtgtgtgtatatacgtatgtgtgtatatctttaagtcaactaaatgtgtgtgtgtttgtgtgtgtgt

SEQ ID NO: 34611 - DNA, 1035 bp, Homo sapiens
aaataatgtaattttggaagacaaatgaaatatcaaatgtttagtaggaaacagcctggaattgtgtaactgactatcaactttatgtttataatggttgaaatctctgtgtgtgtgtgtgtgtatgtgtgtctctgtgagagtgtatatatgtgtgtatgtgagtgtgtatatggttgatgtatgtatgtgcatttgtgtgtgagtgtgcatgtgtgtatttgttgggtatgtatgtgtttacatatgtgtgtatgtgtgtgagcgtgtttgtgcatgtgtgaatgtgtatgtgcatatatgtgtgtgtgtgtatgtgtgtgtgtctactttcactagagacatcagggaagccctctctgagaagctgacactttgtatgaggaagacagccatgcaaagacagaggggttattaagatcaaagccctcaagctggaaataagtgtgccatgcacaggaatatactgaagggcagtggggctagaacagagtgttccaggtcgggggaggggaagagatcagaggagttgcaggcttagatcacacaggatcctataagaactttgactttgactaaggcttatgagacacctttggagaattttgagcaggaagataatatattctgacttaaaaaataccacttcagcttctgtaggaaggctagagagaaagcaggaaggccaattaggagactgctgctggagtcaagaagggatttgtgtaggaggaagtgctgaagatagtgggaagggcctagacttgcgttctactttggaggtcaataactatgctgatgaatcgaatgtgaggggtgagagaaagagaagaacaagagatcatgcctaggttttggtcagtagagcaaggtagtcagtgctacccttggcagatatggagaacactagaagcagaactagtttatggctggagggtggtggaaatcaagaaatctttagccaagttaactttgagaagcaccttcccttctattccctgccctccctccctaaactgatttcctcttttttct

SEQ ID NO: 34612 - DNA, 1030 bp, Homo sapiens
gttacagtcgtcagagtgagagatgaagggatgagaaattgagaggtggacggaagtggcaaaatgtagaggacttgctactggattggctattgggatgtaaaagaaaagaagaaaatctttattggctttcacgtgatgatgctctaggtattctaactattttaagaattgcatctgattaaagacacattcaaagatattagaaaagatttgcaaacttagcagacaaggctagaacctgagctgcaagagtttgatatattgccatgattaactactttcataagaaaagatgatgacgatttgatcacttcattttaagaagggggaggtgcgtaggtgtcagtaagggtccttctgtccaaataagcatgattaacttcaattatggcagcctttggggaactgtgccggtcttttagtgtgtttcaaagtatttcatttagacatttagaaaaacatacatctctattcatagtaatggttactgttctgatttataagttctgttccactgtaaatcattcaaaactcaaaaattaaattttatggcataacacttcgatggctgtatgcctgagcaaagggcaggaggaatgcaatttttcttactgccaattacgattggacttcttttcgttatgtctttaagaaaaaatagagcagatggtttaagtgccatgtataagagaggcacactaatgctctgttaagaaaaacattcaaaacttgacttttaaaaaatggtatgcttttcatcattggctcaatcttatttagttttagaattatgtatcctaagcatactaaaaatttaatataaattcccatgtctaaggcatagatggatgtctgtgggacttggccatttaattgctttgggtgcaaacatgaattattcagttatacctacatgagcaggaatgggtctttatacaaatgcgccctctctttcctgacattgcacaattctttcttcatacatatttttccctcctttataggaggatgggattagttgggcttc

SEQ ID NO: 34613 - DNA, 1034 bp, Homo sapiens
cataaccaaaacagcatagtactgccacaaaaatagatatatagaccaatggaataggttagagaacccagaaacaaagtcacacacctacaaccaactgatctttggcaaagttgacaaaaataaacaatgaggcaaggaaactctattcaatgaatggtgctggaataactagtgagtcatatgcagaagaataaaactagaccactacctctcatgatatacaaaaattaactcaagatggattaaagactcaaaggtaagtcctcaaactataaaaatcctaaaagaaaacctaggaataactcttcagaacattgggctaggcaaataatttataactaagacctcaaaaacgaattcaacaaaaacaaaaacaaaaacaaaaagacaattggagcctaattgagttaaagagcttctccacagcaaaagaagccatcaagagagtaaacagacatcctacataatgggagaaattatttgcaaactatgcatccaacaaataactaatatttagactctataaggaatataaacgactcaacaagaaaaaacaaatagtcccattaaaaaacgggcaaagagcgtgaatagacacttctcaaaacaagacatacaaatggcccacaaacatatgaataaatgctcagcattgctaatgatgagagaaatgtaaattaaaatcataatgagatatcatctcacactagtcagaatggctatcactaaaatgtcaaaaaataataaatgtttttgagaatatggagaaaagggaatgcttttacacttttgatggaaacgtaaattagttcaaacctgtggaaaacaatttgtagatttttcaaagaactaaaaatagaactaccatttgacccagcaatctcattactggttatctactgaaaggaaagtaagccattcaacagaaaggcacctgccctcatatatttattgcagcatgatagcaaagtcatgtattcaacctaggtgccccaaaatggtggattggataaagaaaatgtggtacatat

SEQ ID NO: 34614 - DNA, 1049 bp, Homo sapiens
ttcttgggatgcttgctcttggaatgctttattttggaattcatcttccatcagtggagcagcccaagcagccatgtggaaatgaccatggggagcagaactgaggccccagctcccatccctaactgagcttccactgaagcctccagatgactgtagccacctcaggggcttggccaacactacatggaacagaagaaccacccagtcaacgtgtaacttacaggaggtaatatgttattgctggaagccactcagttttgcagtggtttgttccttgcaatagaaaaataaaatagagccaaatgaccttccctagtgctgtcaacccatctctccccttcttcccatcctgtgctttagtcaatttgagtgacttgtcagtaatcaaatcagccactgggccttttcacttgttcctctcttggcccagaatgtcctatcctcccttctctacagagaaattttctatgcatcaagacaaatgtcacctcttctctgaagtccccttgacacattctttttccttccaggcagcattagtatccctactctgtgccccatggcagtttatgtgttctagaatgttatataacctatagttgaacctattatattttaaaaaatacattgaatggcttgtccatcctcctaggaagtgaataggagtcatgggtgtattagaaagtagcatgcgctctgggtaaagacatttctggatttgaattccagtttctaaactcagcagcaagagtttatttggatacctctttaagcttcagttttctaacctgtaaatcagggtaatatttgcctcctcttagggtcactgtgaagattaaattgtactgctgcatgtcaaacacctgtcacagcagctggcctatcagatgttaaggaattctagaaagattcccaccctgtcataattcaatgttaaggatgacaactcaccccaggcaccttctccggcctctccctcatcccacatacctccagttttaggtgtcctgccttgtgctcttgtaatccccctccttactgtggtc

SEQ ID NO: 34615 - DNA, 1041 bp, Homo sapiens
tgtgttaatttgtttaggataatcctgctgcatccatgttgctgcaaaggacataattttgttctttttttatggctgcatggtatttcgtggtgtatatgtaccacagtttttttatccagtccactgttgatgggcgtctagattgatttcatgtctttgctattgtgaatagaagagcacatgattttgagttaggatcttgttaaaattatacctcctccatatagtaattatgtgacgttgagactcagtttcctcacctgtaaattggaaataattgcaccatttactttatagggttgaaatcaggattattggaaataatgtctgtaagtaaaacacttaacacagggtgtggcatatagtaaggacttaatgcatagtagctgctgtcaatgaaatcaatgatttatgatatctgctcacatttttccctctacttcactaatccagttggaagagccatcatctgaaattcactgacagtttcactttagactgagctgatattacatgaccttttgcaagttttacagaccttgatgcaacttggcagacattatggaaaaagaaaactgggcaacttgtaaagcacatcatctgtatactttttaattgaggagccagaagctaggagagaggcatggagattctttctgacagctatcagaaggaaccaccctaacaacaccttaatgggttactcccacattggccagatcctgtcgaatggatcagttgaggtgggagctttagtttagttgttggatgagatgtgtttgttctaaaatagttactaggctgggccaccctttggaggatagaaaagttcaacctaagtcttaaacatgcatgcttagtctctgaggaataaagggctatgggtgaatgagagtttgaactcggttttcatggttttagggggagacctctccaggttaccctggtaatgggaggtttattttaaggaactcacagtggacagactttcacaggaatgctagtttagccaaataagcaagatgttcttgatcgcac

SEQ ID NO: 34616 - DNA, 1047 bp, Homo sapiens
ttccaagcacacagtttgggaaacactatccaagaatattattcccagagagaaccttagagatcttttaatttacaatcccttattatagggagactgaggctccaaaagggaaaaagacctttgtgaggttacctagcaagcaacttgcaggagcatcctggtcttctaatttttgagtcaaagttcaggtgcagtggctcactcctgtaatcccagcactttgggaggctgaggtaggagaatcacttggggccaggagtttgagaccagcctggacaacatagtgataccttttctctagaaaataaaaatcaaataattagccaggcatggtaatgtgtatctgtagtcccagctactcagtaggccgaggttgggaggatctcttaagcccaggaggttgaggctgcagtgagctatgaacatgccactatcctgcagcctgggcaacagagcaagatcctgtctcaaaaaaaaaattaaggtcaagaggaaaagttaccaaatttctctgagccttaactttcctatctgtaagatggttataataatgcctgttcttcctactacatgtgggataagtgacaataaaatgttattgtgaaagtgctttagaatatataaatatatggggggagagagaagagacatccacacacacacaagcacatttaaaaagactttatgcaaaagtacggctttgttaatgatttgattttgatttgttaattttgattttgatttgttgatttgttaatgatttgattttgatttgttaattaattaaccacagatttattgagcacctgtcagttactatttcagtgctggccataagtggagaacaagagagacatggtggctgccttcctgagctgataatctgaacgaggtggagctggatggcagagggagagacaaagaggacaaatatacaacagataaacaagagaacgttggaaagtgctgaatgcactgaagaagttaagtagggtgttgcaatcaagagagatgtggtgatttcagaccaggtggtcaggacgg

SEQ ID NO: 34617 - DNA, 1050 bp, Homo sapiens
cgaggtgggtgggtcacctgaggtcaggagtttgagaccagcctgaccaacatggtgaaaccccatctctactaaaattaaaaaaattagctgggcgtggtggcaggtacctgtaatcccagctacttgggaggctgaggcaggagaatcgcttaaacctgggaggcagatggaggttgcagtgagccgagatcatgccattgcactccagcctgagtgacagagtgagactccatctcaaaaaaaaaaaataaaataaataaataaataaataaaaataagcatggtcatcaaggtagaacttatagagaagatgacttttgaacaacgatttataagagataaaggaggaaatgatttgagtacctgagtaaagaccattccaggcagagggaaaagccagcgcaatgcccagaagaggaagagtggctggaatcttcaagcaacatcaaggagactgatgttgttggagtgcagtgaacaagagggagtatataagatgtagtcagataactgaaaggatgggtggacatcactgaagtggggcagatcatttagggattttgaggcctctagaaggtcttttttacttgaagtgaaatgaagagccattgaagagtcatgaccagaagagcgatgtgatctgacctatgaaattttagaggtatattttacctatagtaaaatgcacaggtttcagagtatcatttgatatattttgaaaaatgtgaaatctatgagaccattacctaagtcaagatatagagcatttccctctaaatttctctcattacccttcctatggtctgaatatttgtgtcaccttaaaattcatatgtggaggcctaatcacccaattagacaggaataataggttgggcctttaggaggtgatcaggtcttggggacggagttctgttgtaaaggattggtactttaaagaagaggctagagggagcttattcaccctttctgccttttgaggacataggaagtgccatttatgaggaatggaccctcaccagacaatctgctggtaccttaatctcc

SEQ ID NO: 34618 - DNA, 1050 bp, Homo sapiens
tcaacataaaataatcagtagcgtatctatacaccaataatgatctagctgaaaaagcaattaagaaagcaatcccatttacaatactacaaaaaagtctagtaataaatttaaccaaggaggtgaaatatttctataatgaaaactataaaacactggtgaaagaaattgaagaggacacacacacacacaaatggaaagatatcccatgcttatgaattggaagaattaatagtgtaaaaatgagcactgtacagattcaacgtaatcctattaaaatatggataacattcttcacagatatagaaaaaaatcttagaatttatatggaaacacagaaggctttatatagccaaagtaatcctgagcaaaaagaacaaggctggaggcatcacactacctgatttaaaaatatgctgttctacaaaactttaaatcacactacctgatttaaaaatatgctattctacaaagctatagtaaccaaaacagcatagtactggcattcaaaaagatacatagaccaacggaacagaatagagaacacagaaataagtccatgtatttacagccgcttgatttttgacaaattcaccaagaacatgcattagggataggccagtctcttcaataaatgatgctgggagaattggacatcacagaaaaataaaaatagactcatctttcaccataagcaaaaatcaactcaaaatggattaaaggcttaaattgaagacctgaaactgtgaaactactagaagaaaacataggagaaatgcttcaagacattggtctgggcaaaggtttttatggataagacctcaaaagggcagacaacaaaagtaaaaaatagacaaatggaattgtatcaaatgaaaacctgcacagcaaaagatacaataacagagtgaagaaataacctgcagaaagggagaaaatattcacaaactatgacaaaatattaataccaagaatacacaaggaactcaactccacaacaaaaaatcaaataatctgattaaaaaggcaaatgaactgaacagatattta

SEQ ID NO: 34619 - DNA, 1039 bp, Homo sapiens
tacagcccaccggatgcatgctaccgccaataaccttgcccccacaaccagtgtatccactgtgcctggcacaccccaactccaccagggcttgagaagtagcctgattgggagcccccagccccagcaaagccacaccgttgcttccacaaacacccacagtctaagccactgaggcatttgcagatactgctgacattgataacagtcaagaaatcacagggagactatgctactgcacccacccagaaccaaagccaaagtgccttacccaatcaacagtgtaggacacatctataggaaaaagtctttccctatgaaaactactccataaaattggaagaggcaacttccaccagatgtgcagatattgagagatataaaaaactatgaaaaatcaaggaaatataatacatccaaaggaacacaataattttctagtaccagaccccaaagaaaagaaaatcgataaaatgcctgaaaaggaattcaaatagtgatcttaaggaaactcagagacatacagagaaaataaatagacaattcaatgaaatcaggaaagcaatttatgatctgaatgaaaaattcaacaaagaggtagatatcatttaaaaaaccaaacagaaatcttgtggctaaataatatcagtgaataaaatagaaatacaattaagagcttaaacaatgactagatcacacagaagaaagaatttctgaactttaagacaggtctttttttatagctgcatagtattccaaggtgtatatgtgccacattttcttttttcaggctatcattgttgggcatttgggttgattccaagtctttgctattgtgaacagtgctgcaataaacatacatgtgcatgtgactgaagctggaaaccatcattctcagcaaactaatacaagaacagaaaaccaaacattgcatgttctcactcacaagtgggagttggacaatgagaacacatggacacagagaggggaacatcacacactggggcctgtcggtgggtgggagtctaggggagggata

SEQ ID NO: 34620 - DNA, 1034 bp, Homo sapiens
acattcctttgagcttcctctgaacagattctggatagtgccctcagaagtgcttctgagtcagattttactcagcaaccatttggatctgagatgagctttctttaattttcaaaagagtcctttctggcagagtgggttgtggtgggaagagtgtggattttggagttgggcaaacctggtgtccatcctgtcaatgtccttgcttagtcctgtgactttggggaagtcatttctcctccagctttattgaggtgtaattgacaaataaaaattgtatatatttaaggtgtacaatgtagtgacttgatatatgtatacattgtaaaataattatcagggtcaagctaattaacacatgtatcaccattttttgtgtgtgttatgataatgcttaagatctactctcctagcaaattatacgtgtacaatacaacattattaagtatagtcatgctgtacattatatttatgctgtacattagatgctcagaacttactcaatttatttctgcaagtaggaaagtcatttctgaatggacaactgtaatagagccttctggtgttatccatatctagttattagaccatggaggcgaaacaaaaactgagaagctttaaaaacacagtaatcagaagcacatgtttcttagcggtcctagtgctcatgccatcacatgtcatgtggctcctgggaaactccactatacccttgtgaggagatgagaatgaaaaaggcaaataacatgtcagtattattaagaaagaattttgaccttgcagactctgaaaggatcttcagcaccccaaggagtccccagatcacactgagaaccactgttgtaatatttcaaatccgtgttttaaatacagatacctccgagcctttgcacaggatgttctctctgtctgcaacactcttcctcagacattttcatctcccactcctttagcacctttgcataagaaaggtctttgctacctttcttaataaagcttatcctgaccaccccattcaagttgcagttactgcc

SEQ ID NO: 34621 - DNA, 1047 bp, Homo sapiens
cataggtggtagtcagccttcaagatggttccaatgatccttgcctcctggtattcacctttgtgaatcccctctcacattaaatcagaactaacctgccatccatagaaacggatgtggtatgtgattttcgaggcgagatcataaaaggcattgtcaacttcctccttggccccttcaattgccccttctgaggaaagccagacaccatgctgtgaggacactgaagcagcaatgtggagactgctatggagagaagacctcccaccaacagctaccaccaacttgccagtcctttgttaacagccagcttggaagcaaatcttccggccccagttaggccttcatgtgactgcagcctcaccaaagacccagaactagttgaactgccccccaaatttctgatccaaagaaactatgagataataaatgatcattgttgttgtaagcccctaagtctttgagtaatttgcttcacagcaatagataactaataccatgggtatttgtattatctctgacagatgaggaaaatgaggctcagagcaactgaatagcccatctgaggttgtgaactggtgagtgatgggaaagggatgcaaatccaggtctgcctgacttctcacccatcacgttatacgcctcatgctgcagtgaccctctgtcaggttcagagtaagtgcttattacacagtttcaagtgaacgaacaaactgttttcatgactgaatatataaatctgttacacaagtatatatttagaaaaggagcccataaaaataaagaatgaatattttcaatctcattaaatcaggttgaattttcctgttgcttaggactaatttcttcaaaaatgttagtctcctaaaatgaaaactttatgctcaagaataaaataaagaacaaaaaaattttagtctccaatgaaagtaatcctattatttgttctgattacataaatattgtaaaataatacacagaaaaataaattagaatcaccccctctcctgctcaatattactgacgttttggttaaaagccatcttc

SEQ ID NO: 34622 - DNA, 1084 bp, Homo sapiens
tattagtggttaactaatgagttaaggtgctgaccacattgtttggcacttctttatttaaatccttttggagcctctattcaattttaaaacatccttgactgtagtgatattagtttttgatgttattttattgtcagtttagtagtgttattaattagtaaggatttctatgttttttcactattcctagatagttttcttaggctaagaaaaaaacatgcatagcggcagccaagaaatttaaagtaccactataatttcccactaattcatatgtttgatagaatgaaaaatcagagtaagagcctataaagttatgcttcagaagtggtttggttagaagtaacaaactaattacatttttgctcaatttcttccaccccattcgcaccctgtgcaactaaaaaagtataattatcttttcccatccttaaatttttcttgaattcttttagagttagttctgtatctttttctcatggtctctctctctctctgtgtgtgtgtgtgtgtgtgtgtgtgttttaaaacaattgaagcaaatatttgaaattgttacactgatatggctgtttctaagacttgattaaaacatttgaaactctaaaagtttgctagttttaattcccatcattcaaagacatttgttttagcacttggtatggccaaatacagtgctaagatactttgtgatgtttaaatagctcccagacacagaaaaagtggttacttgttttgggcctaggagaatataggaaagagaagtcaccatgatttgcttgatcacacagaccttggatcccagaggtcaagtaatttgtttgctttttagcttctctgtctaaataatgtttgtctctgcttagttagagagtctatgattatcataagtgatttattggtcatacattgtaaactcagtatagtggtgggtctaaaaaagaattaaaagactttaaaatgtccctgcttttagtaaagaaaattaataggttatgtgccagggggactgtgttatctcagttatcctcataataactccctggatcaggtgaaattttatcattttatgatcaggaag

SEQ ID NO: 34623 - DNA, 1799 bp, Homo sapiens
atatgtgttagttgttattgtccttcccattcttgcttcaaatcctgtcttctcttatgggtaatgggaggaggtcctgctaaatatatatatttttctaatataaagatttaaaaataaaaaacttgacaaatattatgaaatatctatgaaatacataaataatgattaaaattttggttataattaatatttagaagccaagccttcatttaaattatagtttagaagttttttttttttggacatttgcttaaattctgctgatggaggtgatataatttgatatctaatctgaatggtgaaagctcttgtgctattgccatgaatttttatctcaagtttattttgctatgcagacacgtgtgtaataaaaaaaaaagatgctgcataaaccatcatttgagtttgaatgtgcttctgtttttggttgaggtacaaatgttatttctggctgtgtccttcatacttagctcttcttacaacaaatggaaagtccttaattgtacctgagggaatagttaatccacagtggacatatggtggacaaaagctgagtctactaaatgaaataaaattgtaaatggtgaacgtgaatgcctacaaagtcttgcagccatgtaggattgactatttgagattaccctgttttatgtataacatagttcttttttggtgagtttgtgtggtatatgtattataaatttgattttaaaacgtgctctcaagttatgtataaagcatatttatcttttttactgttcattgagttcgtgatgtgactgatgtcaacaatagaggacgatgagctcacatttttggaaagttactgctcttttgattgggggcagttaattagcattaacccagaacagctcttgggctttatggatttgggtgttatgtggttgcactgctccagctaaaggttaagtattaatggaaaatggtcacagcccttttacttaaagaaaacatgttacttgtaagttttcttttgattttacttttacagttacattgaatgtcttcattcatttagccatccataaagcaaatattgttgcacatgcaatggataataagtctttttaggattacttgtgtggtatgtcacagatcattaactgcaagtaaccacctgacttgagggaagcctggaagcatcattatagtgaaataagcttttatttaggtatcactgtagcacattgatttacagaattgtcaccagtggctactttgaaaatatattgtcattatcatttaaggaatggtagagattaattgctgtagactataacaaagttatgttgattacagtggaaaatataagaaatattgtggtctgtatttaattactttttaaaggatttttaggtaattaattaggctaaatcgagtgattctttaggatgctttcaactttgtgtatgattgaatatatgtattaaaggcatgttttcagttttccctactttgaaatgcctttaaattaagaagcatagcaagggcgtagcaaactttatgtaactatttaacacagttaatgcgtattaactttcctttgtgagtacatggcattatgttcatcttacttccacaacaagactttaagtctacaaaagaaagacaacatctaatttagtacttttgtatcacagcgagggaaaaaatcaaggattttttccttccttcccacttatgtattcaaaccctaccaattttgcaaagctcccatttgagttccacattcctaatcttaatccttattccacattcctaattgattggtttca

SEQ ID NO: 34624 - DNA, 1114 bp, Homo sapiens
caaaaaccttatccacagatcaacagcctcaaagagcaaaggtagataaatccacgaagatgaggaaaaaccaatgcagaaacggtgaaaattccagaagccagaatgcctcttttcctccaaatgatcgcaacacttctccagggcacagaatggggctaaagctgagacggatgaactgacagaattaggcttcagaaaatgggtaataatgaacttcgctgagctataacccaatgcaaagaagttatgaacattgatgaaaggttacaggagctgctgactagaataaccagtttagataggaacattaaagacctgatggagctgaaaaacacagcatgagaacttcgtgaagcatacacaagtatcaatggctgaatcgatcaagcagaagaaaggatttcagagtttgaagaccatcttgtggaaataaggcatgcagacaagattagagaaaaaagaaaaaaggaatgcacaaaacctccaagaaatatggtactatgtataaagactgaacctacgattgataggattacctgaaagagatggggagaatggaaccaagttgggaaaaacacttcaggatattatccaggagaccttccccacctagcaagacaggccgacattcaaattcaggaaatacagagaacaccaccaagatactccacaagaagatcaaccctaaggcacatgaggtctagagataaaagttggggaatatatttagagccactgggattggatgaccttaaggagtgagtttaaaaagagatgaggtctaaagattaagctttgggttacacccatgtcttattaaaaccacaattaaatatcaccacacacttcttagatggctgttatcaaaaagacaaaaggtaagtattggcaagaatgtgaagaaaaaggaacccttgtatactgttcgaaatgtaaattagtacagccattatgggaaatagtgtggaggttcctcaaaacatatgatccagcaattctagttctagttatatatttaaaggaaataaaatcagtgtgttgaagagaatctttactcccaagttcattgcagcattattcactatagccaagatatggagtctgcctatgt

SEQ ID NO: 34625 - DNA, 1032 bp, Homo sapiens
tatgtccagtttgaaaaccattggaatttatatgaaattacttgcctatactgtgactcttttgagtcttcaaaaattctttatctgtaaaatagacatgtgaaactattaaattggtaatatttaatttattttgaaggattcatatcaacttgtataaaatttatcacctataatattataccaaagtgaacaagtcattgttaccaatttgtttaagagagcttataatttatgaagcataaacagaaactttttcggggatttgaaaagttcattctctttatacattttaagctaaaacattctgcccttttaaccatttcttttagtactttgcttcttttttgttccagataatactaatcccaaagtatcagaaccaagtgtctttttcagatggagctaatatttctgtctctattgctgctgctgctgctgctgctttttctttttttaacttcttttcacatgtaaatttttcaaatagaagtgtgatcatttacttactggaacatactgagatcattctatatattgaaagagaaagtattttgttatatatacttaaagctgttccctcacatgatacttcacactccttattgtattttaaggacatgttgatagcatttcaagtttaattggctgagtagtatctccaaatcaaatgcataagcttgccttcagactgttgttgttactgacaactgttggggaataaaatagcaaatgagtgctgtttcataatatcaatcaaaaactgtttttcatctgacagttgttgtagtgatgttattttgttatttcatagttacttttttggatagcctgccccaaaccattttgacagtactgtaatttactttgtctaagcaatattatggtttttgtggttatgttttcattggttttggaggagttgtataagcattttgatataacaatttgtttatatgatatctctccatctttttgtcataatagagaagatttattaaatgctaataaaagcataattcatcttatttg

SEQ ID NO: 34626 - DNA, 1055 bp, Homo sapiens
tgatactgtgtcacttgttgtattgttacttaatttttttggtattcttatttttatattcattttttatattctaggaaacttgaatgttacccttcaaatttgggatataggagggcagacaataggaggcaaaatgttggataaatatatctatggagcacaggtatgatatgaattctgattattccagtattgaaagtataccacttacaagcacacatgcaaatctactcccaaatgcacacacacacacattctttctaactttttatctgatacgtagagagaataattttatatttgtgctagttctttggtttcatgctctcctaattatgtttggagtgatttgggtgagggaacaggaaaactctgaacagctttcgtatgttatttacattactaggtgttattgttagcagttcaataaatgcagtgataaatgatattttgatatgtattagctggttttgttatagtgactgctttcaaataaactgaatgaaaaacacagggatgaaaatttaacttcattttaagttacaaggactgaaagtatatctatatgtctatgtttttgtgcaatgaatattgatagcttttcagatttaatagacatgtctgtattttctatcagataactaaatatgacagtgtatatgtgaaacacatacaataatttactatgataatgctgtattttcagaagaaaatccatgtagagcaagaaaaatgaaaatgaaaaatgacctgaataattacataaatttcgcaacatgagcttatattctccatgagcttatactgatataatttataagattttaaataaagttattatacaaatagaaaatatgcagggtagtaatatactttaaaagttaatcatttctctctgagcatgttcagtgaagaattgtctttttaatatttggcagattgcttttgattaaatgacagactttagaaatgcagtaataccattgaaagtaatcatctgatgaagtagagaatatggtatatagccgaatattaagtaggttgtgcttact

SEQ ID NO: 34627 - DNA, 1064 bp, Homo sapiens
gcatgtgctgtaagtccctaggtgcaagctttttcttgttatgttttaaacagctttataaactattgttcatagaagatattatgtacatttatttcagataaaggacaataagtttactttgtatctgaactcaaaacaaagtagttgtatattttaacattcaaaattgggatttcccaatgtgacacatcatgaatgcaaacccctccagcccatcagacgccaggctgcctactggtaatctgtgtatagtatataaacatgtaaaaataggttgtattttactctatgtatgatgctaatcaatgaacactttatttattttacagagaaaacttatctgtgaactttactatatatctgtttattttactttattttttttttaaataaaaagggttttaaatgctatgcagtcattagtagaaaattttttaggactctgcctgctctgtaactatcttaatatgatctggcagaaactcgcatgtatccaagtaaagtagtttagctaaagaaaggttcttcattgcttttctgttcacagttgtggctctgttttttaagaatgtaacttgtttttagattatacttgcatctgtgactttactaccagccacgttgacacaaaacaggttctggttcaggtaaagttgcgtcagtcacctgcagcagaaatccctcttcattcctcttctctgtgttcattcctcttctgtgctgttctgaagcttctaccaatactctttccatattgtctttttcagtgaagagaaatgcattcaagattaggtccctcctgtctatccagtttcaggattttatgttgttttatacacagttatttcagtatagaaactggctttattgccaagtgtttttttaaacatgttttaactctcatatgagcaaactgtccaacttcagtttttcataagattaaacttcttacgatcaaatttgtctcttgcaatgatgtgatgagttgccaaataattgagattattttaaaatgttttgttcatattcttgttttataattaaaatttacattcagtgtg

SEQ ID NO: 34628 - DNA, 1044 bp, Homo sapiens
tcctcgggtgacttttagaggaaaaatcagtttctgagcctccatttcttgttgtataaaatggggataataagacgggatgataatacaaaggcaaacacgattccaaccctcatctgatcataggtttgcagtatttgtttgttcagtctgttagttcctttgaatcaaaggagcatgttatttttaactgagcttatttttcaggtgaaatgagtttctagtttagaatatatttgaaagtgaaaagaaacatttttccctgctgacagattttggacagtgctggtcttttagaaatagttaataactttcaaagatattatctcagtcatgccttataccgtccaacttcagatactttataccagtccagattggagaaaagtggacagtgacactttaaagcatgacaattgcatagactgggattaagcacaggatgctgtaggaacaaaagggtcctcatgggctggacttgaagggacagaggaattcttttccactctggctatataaattgtagcatcctggacttttaactgaaatagaccttagccatcatctaacccagtctcaggaagctgaggctaatagatttagtcttgttcattatagagacttaggagactttaagaaatgctccaagggttgaaacaagtaactttacaagtttctgttgaatttagcctggagtaaattgaatgctccagaagtttttatgactcaatcattgctacaattactcattcctccttttttcctgaagaagtgaaaatagaagggtttccacagaagcttctacacaatctaaagaaggatataagaggcaagaccagagtagaactgaatctctgcacctgagaaaattttttctttttgtctacctcacagtttaactttgtgttcaatttttctgtgttcagtgtgaagcaagtaaagtgaatctgttaataaatcacctttactgagaatagaccttagtgactcagaatatttttaaggacaaacttgatggagatcactgcagaaaaatacttggaa

SEQ ID NO: 34629 - DNA, 1709 bp, Homo sapiens
gaaattgattctgagccaggtgttgaaaatgtgtttgaagtatctaaaacccaagacaaccgcaataataattctcagcaagacattgactctgaaaatatgaaacaaaaaacttctgccactgttcaaaaggatgaattgagaacttgcacagcagattcaaaagcaacagctccagcttataagccaggccgtggaacaggagttaatagtaattctgaaaagcatgccgatcatagaagcaccttgaccaagaaaatgcatatacaaagtgctgtgtccaaaatgaaccctggggagaaagaacccattcatagaggaactactgaagtgaatatagattctgaaactgttcatagaatgttactgagtgccccatcagaaaatgatagggtacagaagaatttgaaaaacacagctgctgaagaacatgttgctcaaggagatgccactcttgaacattccacaaatttagactcctcaccatccttaagttcagtgactgttgtgcctctgagggaatcgtatgatccagatgtaattcctctgtttgacaaaagaactgttttggaaggtagcacagccagcacctcccctgcggatcactctgctctccctaaccaaagtctgactgttagggaatcagaagtccttaagacaagtgacagcaaagaaggtggtgaaggtttcacagtagatacaccagcaaaagcaagcatcactagcaaaagacacattccagaagctcaccaggctactttattggatggtaaacaaggaaaggtaatcatgcctcttggaagtaagttaacgggcgtgattgtggaaaatgagaatattaccaaagaaggtggcttagtggacatggccaagaaagaaaatgacttaaatgcagagcccaatttaaagcagacaattaaagcaacagtagagaatggcaagaaggatggcattgctgttgatcatgttgtaggcctgaatacagaaaaatatgctgaaactgtcaaacttaagcataaaagaagcccaggtaaagtaaaagacatatcaattgatgttgaaagaaggaatgaaaacagtgaggtagacaccagtgctggaagtggctctgcaccctctgttttacaccaaaggaacggacaaactgaggatgtggcaactgggcctaggagagcagaaaagacttctgttgccactagtactgaagggaaggacaaagatgtcaccttaagtccagtgaaggctgggcctgccacaaccacttcttcagaaacaagacaaagtgaggtggctttgccttgcaccagcattgaggcagatgaaggcctcataataggaacacattccagaaataatcctcttcatgttggtgcagaagccagtgaatgcactgtttttgctgcagctgaagaaggtggggctgttgtcacagagggatttgctgaaagtgaaaccttcctcacaagcactaaggaaggggaaagtggggagtgtgctgtggctgaatctgaggacagagcagcagacctactggctgtgcatgcagttaaaatcgaagccaatgtaaatagcgttgtgacagaggaaaaggatgatgctgtaaccagtgcaggctctgaagaaaaatgtgatggttctttaagtagagactcagaaatagttgaaggaactattacttttattagtgaagttgaaagtgatggagcagt

SEQ ID NO: 34630 - DNA, 1035 bp, Homo sapiens
aaaagttataaacacctacctatatatacttgatgttcatagatattttcacagctatcattttaattgaaacaaccagcttatttaatcacttttccccaaaattatacctttccctttctttaatggcattcttaaagagtaatggcaaattttcacatctgtttcttctattctggtagcttctagattgaaacatacacatacatatgtatgtatacacacagagataaatgtgtgtatatatatgtagtgtatgtgcattttttcagagcccgttaatttgtaagaacatctgaagggtaaactaaaactttaaaaaaaatacaatttttcagtgtgtttttgcctttgcctaataatctgttagggtattttgtggttttaggccaaagaaaaagaagagaggcttttaagaaggcaaatcaatagagaaaaacttgaagaaaaacgaaaacagaaagcagaaaagacaaagtcttcaaaaaccaagggtcaaggtatagatgtcaacttttaatattttaaactatctcatatatttcattattttctgggtactcttatattacttatgagacatgaatataaaataaaatgatctagtctcaaatgtggaagatttccttacgttttaatctcatgtgtttcatcatttttcttttttattaaattgctaaatctaaattaaacattttaccagaaaccagcttatgcaactcatttgttagcagtatatttttctgtaatgattgaatcactggaaagtagattgttaacacatgagttatcaacccttgctggtgattaatgaaattaatctatgcttatgttaactaaaatgtcaaacatttccctgtaatattgtgttgaacaaaattgtattccctctgggcactaatcctatgtaatatatgaaatcacacatacacacacttatgtgatcatttgaaataagagagataagacttcttcatccaaaatattatatctattccagcacaacttaagaatattaaagccattttggcttta

SEQ ID NO: 34631 - DNA, 1071 bp, Homo sapiens
gttaggttctgccaacaagaggtgcaggtgggagatgaaagggcagaagagggaggtctgttttcatccttttgctccgtcccatgcaggttagcaggctgcagtgtgtaaggtggaatccttctatcccaagccacagattctgtctgggctgtctcctagagttaacttctccttcttcctgcccctttggagtggtagaggtggtaatggctcccctccgtggctagccgtagttaatgcaccaaatcattgttttattttaacctcacccaaacctttggaaatatgtgtatcatttattaaatgtttctcagggacttcatcctaatatgctttctttgtcttgctgagtctctaacagatgcaatagatgtttaataagttttcgttacatgtattaaaatggaagaaggatcagatgaatttcataagagctccagggtggagaactgagatcactgggtagaaatcagtgaaacaggctagtggcatgtttgaaggagaagacatcagagaaatgtgaaggcaattgtcaaggaaggtgaatggctcttgtattgagattgcaatagatgcttgctgaatgaaatagttttagccattaccatgctgcatagatcttgttaaagtttgctttttaggtggcatctaaaagggtgtgtttggggatatagtttcctgaagcacgtagaagcggtgtttggattcaaactccatgaatggcactatcaaggccagttctggagaaggcagagctgccattggctccaaatggtagttgtcctgttctgacagcctgcctgatcttggtgtccaagtgagtctttggggctcatctacatacaatacaggtcagtttttccttctcccctgatgaaaaacaaaaaggctggactaagtaatttgcacaacctctttcaattctaaaattccccagttcagtgtttccatgatgtgaactgggtatggtgtgacttgggaattcttacaaaggaagacaagagtatcaggagtgtattttgccttgagtgggtggaggcatcttagtggctgctaaagctgacattt

SEQ ID NO: 34632 - DNA, 1038 bp, Homo sapiens
aaaagaaagaaaccctctacattaaaaaagaccagaaagaaatatcatgaaatgttacttgttttatgttatgatcacagatttgtttgttgttctctccctttctgtattttctgaaattcttaatgatcatgaatttttaaaataataaatggtttatttattcattcagcacatagcttccaatcattaagtttgagcttcaaggatgattaaactatttatctgccctgaagaagcatacagaactctaggagagacataaatcgacacaaagtgaatagctgccatgagtgaggaacgcttgaggtctaagtgtgaatcaaaaagatagtgcccattatacctgtgtgcagagtcaaaatttaaaaacaattaaatacacattgtgatgacaatgttccatatacatgaaagaaaaaatactgtttctttgactctaggttgctctctccagttacatttgtgtttgagaggattggaactaaaaactgagatgaccctctttgtaggggctgagtaaggatcacgcggtattgtggttgtcaacttgagaaatgcaatcagtcagtctctctgaatccttgtctccatccacagaggctgtaactttgctgatgcatttttgaatgctattgtatttgctgttaccttgcttctgtggctcatgtgttttagaaagttaatcttcctttttaattttaactacaactgaagcatattccttttagcaaaaagtacagcagtaaagagctcaacaaattggttagaaatcagtttttaaagagggaatacgagctctagattgggtctcacagggttttccaaagagattgtgcattaacttggactcattgctgtttattttggctgttaagaaatctttttggagagtttgccaatttttagcatctcatccatgttgcaagtggttgggtttattcccctcgattatctccgggtcaaaggagtgttatccatttcttacacaaccatttatttagtgcctactaggtgcctggcctctactcagagcta

SEQ ID NO: 34633 - DNA, 1070 bp, Homo sapiens
tacacacatacatacacacacactcacacaccatttttctaggtggtagaagtattttaaaaagaaggttctagctgatatgtaatgagcatgtacaacgtgctaagacatgacaagcatcactttctttaatcctcatcataacctcttgaggtgagtaattgtattatcctccttctacagatgagtaatttagacagtctgatccacaattgacacacctaactacttaccatatttcctccctaggttgttgctaactttaaaagaccatgtttttgcatccaaacaacttgcagttgcataccctctgtttcttcctcctcctctccatgggtgccctgggttctgttaggaattgaatcttctctttgtaacctcagtgccttgcttatatcatctccagtagctgcaagccattaccaaccatgtctcccctatgcctctttctccatctgttcacatttatcttctgtatgcatcactttctacagaaagtctccctgatattctcaagcaggcacaaccctgtcttctcctgaacccttctagcacgtaatttggatctgccatgcactttagctcactggctcttaactagatctactgaatgagcatatcagtagattaagttaggcattaatattttttaaaagctctatgggtgattccaatgggcagccaggctctaggaatctttgccttatctactcttgctcaaatgatgccttatctgcttgtccttacaaaccggggagttgtagtgatacaaatctggtcttctttgtgtctcatcctgttcttttatttattacttcatcacttatttatttagctgctactatatgtcagatgctgaatgcttggtctgggtattcagtagagagcaaacaaagagaccttgtagagacaaaatctagtgaggaagagagatatttatgaaataatcacagaactgtgcttaacaggatatgaattgggaattcccatccacttggaatttcagctgagaacacaaagcagagaatgataggcaaccaatgctcatacatcgacttagaacttgttaa

SEQ ID NO: 34634 - DNA, 1076 bp, Homo sapiens
tcccatcaagctttgcaggaaaccacagagggattatctgataacgaaatgtcatttttactctaattgtttatgaattacagtgtatatgactaagtagctttaataaatgtatactaggcaatgggaggagatccacatggaagacagaagaccttgactctagtcccatcttagcgaccactgacaaggccctcatcgtttatggatctctgtttcctcttctggaatatgaggtgggcagagaaagttgatttctaaagtttctcctagcccgcacttggattttacataatctctggaaatggtctctaatagagtagttattgttgctggccactagaggtcagtaccttaaaaagtaaactggattctcctgccatcaaagtatgccttgaagcaaaagcaaaattactgttttcttatcttggttaggaagaaacattcccaaagaaacagttttctccttgacatattagagcttgtaagatgacatttccaaactctggctgagcattcactgcagagttcactaacaatcttagtgtgagagatgaaggagcagaaggtctggccctagctagtgaagaacgtatggtttctgcacagacctgaatgcattgatagctgtgtaacaggaggaaagaggaactgaaaatgactcttctgtagagcaagcccctcactgtatccagtggtgcacttgcccctatctggtcactgagaattaaaaggtaaatatgtttttagatcagctcttttctcatagatgtggtagggaaggcacaatttttgttcctttccctgagttcctgctgctctgaaagataggaacttccactctcttaataattagtggcttacctctccatggctccttctggtggagggaggaggagggatttctctgattggtgagatggcaagagtctggtaccccctgggctctgtgttgggagtgggctgtgtgtaaaaagtcacttgcacatgtggcctctcttgggttctatgagcttgatttgaggggagggagacctctgttctctttgaggctgaatggaaaagtttctgttgtg

SEQ ID NO: 34635 - DNA, 1052 bp, Homo sapiens
ttctgtattcttgatgctctggcatttggagccttgatcctggagaaactgattctcctatgttagctaatttctagagatagcaaatgattcccctgaaatatgcaaagtctcctttgatatacaagccaaccaatccagagcccacacaaccatctccattatcaaactctcacacactaagccaatattcctcctgtcctaagtcaccccaggtccagataccagaccactatagcccagagaacaccacgattattcaagctatccactcctaaatttatgcagcaccctaccctgcttcacctattccttcctgggaaaaccctagtaaaggctctgtgctgtactctgctgtctccgttctgccttctgaccaacattggttcttccctatgtggtcctgtgtggcatgccatgttctatgatttgaatgtgtcttcccaaaagcatgtattggaaacttaatccctaacacaatggtgtcgggaggtggcacctaatgagaggcaattaggctgtagggctctgccctcataaatgcattaatgccattattgcaggagtggattccttataaaagaatgaatttggcctcgttttctctctttctctttcttgctctcatgttttcttgccttgcaccataggatggtgcagcaagaagacccttgcaggatgccagccccttgatcttggacttcccagccaccagaactgtgaaaaataaatttctgttcattataaattgcccagtctgtgtattctgttacaacaacagaaaacgaaccaagacaccatgcttcttgtttctagggatctgttaagtataaacttcttcttttgtgccaatcatgtttgtgtctgtgtgtcttaccatacctaattaaaacaaatccagagtacattttttgacacagcctgcatgcatgtgtatgtgtcaatgtatttgtgtttgtgtctctgtacgtgtatgtatgtgtgtgtgtgtctgtgtatgatggggtgtgcacgtaggcatgaatatgaggaaatgagctgatttactgtgc

SEQ ID NO: 34636 - DNA, 1911 bp, Homo sapiens
gttcagcattggatagatcatttagagagaaaatcaacaaactaatattggacttaatctgcaaataaaacaaatgaaactaacagatttaaagaacatttcatccaacagctgcagaatacacatttttctcttcagcacatggaacatgctcaaggatagactatatctcaggccacaaaacaagtctcaaaaaattcaaaaaagttgaaatcatatcaggtatcttctctaaccacaataaaataaaactagaaatcaataacaagagaaactctgaaaactctacaaattcataaaaattaaacaatacactccagaacaacaattgggtcaatgatgaattaaaaaaataaaaaattgactggaacaaatgaaaatggaaacacaacatatgaaaacctatagggtatagcaaaagcattaccggaagggaattttatagcaataaatacctacgtcaaaaatgtagaaagattttaaataacctcacaatgcatcttaaagaaacagaaaatcaaaagcacatcaaaactcgaaattagtagaagaaaaataataaagatcagagcagaaataaatgaaagtgatacttaataaaaagtagaaaagatcaatgaaatgaaaagttgttttttgaaaagataaacaaaattgacaaaactttagccagattaagaaaaagagaagacccacagaaataaaatcagagacaaaaatggagacataacaactgataccacagaaaatcaaaggattattagagactattatgagcaactatatgccaatacatttcttctagaaagctagaagaaatggataaatttctagacatatacaacctaccaagattgaaacatgaagaaatataaaatctgaatagacaaaaaacaagtaatgagatagaagcagtaataaaaagtgtttctcttcaaagaaaagcccaggacctgatggctaccctgctgaattcaacaaaacatttaaagaactattattaatcctactcaaactattccaaaaatcagaggagggaatacttccaaacctatggtacaagggcagtattatcctgataccaaaaccagacaaagacataacaacaaaaaactttacaagccagtatctctgatgcacactgatgcaaaaatcatcaacaaaatactagccaactgtattcaataataaattaacaacatcattcttcatgatcaagtgggattcatctcagggatgcaaggatagttcaatatataaaatcaataaagtaatacatcatatcaacagaatgaaggaaaaaggacatgatcagttcagtagatgtgaaaaaatatttgcaaattactcctctgaaaggggactgatatccagaatatactaggaactcaaatatctcaacagataaaacataaataatctcattaaaaataggcaaaaaacattgatagacatttctcaaaagaagacatacaaatggccaacaggtatacgcaaaaatgctcaaattcactaatcatgagggatatgcaaattaaaccacaatgagatatcttactccagttaaaatggctttcatcaaaaagacaaaacagatgctggcaagaatgcagagaaaagggaatgcttgtatactgttagtgagaatgtaaatttgtacagctgttatggaaaacaatatgaagtttctcaaaaaactaaaaatagaactaccctatgatccagaaatgccactgctgggtatatatccaaaagaaaggaaagcagtatatcaaagagatatctgaactcctatttttactgcagcactattcacaacagctaagatacggaattaacctaagtatccatcaatggataaatggataaagaaagcatgctgcatatacacaatggaatattattcagcca

SEQ ID NO: 34637 - DNA, 1033 bp, Homo sapiens
aaagcacttactagataatgattctctaatccacaatgggaaaacggtcagatgcaaaatacctcctatcctggactagtcaggtgaaaaatgcttgattacttatttccaggttttagaggccagctcttttttgaatatttgaacagcaaaatgaaagactgggagttagaaaagaaaccatttcaatcttgctttcctaagtcttttaggtttcattacttgcctaagttgtagttctaatctttttcatgcagactaccttgtttcttggaatcttgggttttgtagctggtgaccttgaaattcttttactgggaggagcatagattctagttcaaaccgatcattatttggatcctggacataccccatgtatttacattttaaaacatgtggagaaggcttcattttgtagatagcagcaagggacatctacctaactgagcatcatgctggcactcagtcttcatggggaggagggatgttggtttgcaaaataagagtgggggctgtgcagctgagccaagtgtgtagaaaacagaaacagaagtctccaataggaatgtcttggatcgtttggtatataatgtatcagatacatctctttgcttttcttccttaaaatcctcaagatatttactttgattactacagctactgtgggtgggagctcaagggtggagaggagacatctttgattttgtgcctttattttttctcattataaagactgactatagtaaggatatggtggttgagacatcacttgatccttcctttttgcagagatgagctatttatctagaaaatgataatgtatgataatgataatgtggcataagtgaattatttacaaatcatgagcttaaaggaaaagtgtaaaaattctaatcagaaaagaagcttttattctccctaaattatgggtaacatgttcagcaaactcttcatttaattcttttgcatggtgttatgtaaacatgctagatctgggctaggagacttggattctaggcctggctctaccttg

SEQ ID NO: 34638 - DNA, 1028 bp, Homo sapiens
gccattcacacgtttttagatatttaatgctattttgagatttcatcatccagtaaactccccttggtgcctaaggtagttcaaaattggcttttatctcctgtgatcaaagtccaaactaatacagagaagaaccaaataaccaaccatattcttcaagaatagttttgccatgaaaaatcttcctggtactaattcctgatggctctccatttaccttgttaagtattaataaaagtgcatgtgtctacagctcatgaaaagcagggaaaaagaaaaaaaaagtgcatgcatctggtttcactggcctgccccacctacacaggcctgttacctgcagttcctcaaaggctcctccaccccacacctggaggtgcgatctgccctcctctgagtctttgttcctcctgctgcccttgaccaggatggatgcccagccctgttcctttacctccttcatgccccacccatcccatggctattcagatcctatccctctagttttccctgtagtgctttaccagtgtgctgagtacatgacacttagtacatactgcattaaaatggaattgaattcctgactaaggcattcaataattagccatgttaataattaactagccatattattagccatattaacctctaagatatttttcaaccctacaattctaattgtatgcagttcagttgactcagaatcctggttactgattagtttatatatcattatattgaggcagagagattatttaaatggtgaattcaagaaaaagcatggaaaggttatgtataaaagtgaaataaaagagaaaccgctattgctagtgacaacataacaaaaacaaaatacatatacagtagtatacctaacagcacagtaggtactttattattttattaacccctctatggcagtttcttacctggaataccttttccataatttctcggtcatagactggaacttgcttataatttcggaattctggcacctcttggcttctaagatgaagaagcctaaatcg

SEQ ID NO: 34639 - DNA, 1050 bp, Homo sapiens
aaattgaatcccttgtaatcatgacccattaaaaggtaactgctgataataaaccagaacatagcctggttgtttcatatatttgaaaggtgatgatagttgtcaatcaattatatatttgtgtttatgaggaaatttatgcaagctaagtggcttgcataagctcacatagatatttaaaagagtagaggactttccaccttagggtgctggctcttttctccctatgaagacagttttatatgatttttcttacctgctggaggtacttggctactatggccctatgggtgtctatgtgttccttggtttctattacatttctgtctcgtaaccgtttctcatagtcctaaaattaaaaagaggcaatgattttaaagcactctctggtgcttttcttaagatcaggtaattatttatcacatatgatttaagttataacttgtggttttaaatatttcttccaccttcttcctaacttttggttcagaattggtctttgatagagtaaccaggattctgagacaggtggctgaaatgccttactagtagaagagaattctgtatagtagttacaagttaaaacgttaagtcaggaagaaatagaggccacagagaagctcttccaagcaatttagccaaagctcctgcttaagttttgccttttctgttttaagtaaagtttcagttaacacattaccataatcatataacatctggctgtagctgagccaggtcatctgcttggaggagagtgatgcatacatctggctttgtctgctcaggcctctccccttttctgtcaacaaaattatgtgtgtgccctgggaactgctatgttctcctctaatcccactctttggtcacagttgaatgcctggtagtggtacctaactcaggctcgggggacacacctctgctggctgaagatactagatgtgaacttgtatgatgttggtgaccatgtggtcaagtagagaaaacctgtctgcaaaggaggagcatgatgccaacacatcaaagaagcctagagaggatggagaagggtcc

SEQ ID NO: 34640 - DNA, 1025 bp, Homo sapiens
tttattgtaattgctcaatactgacttctttagctgatcgattatagttagggctgttttttgcctttattacatttctagggaggatgttcagattataagaatctttttataagttagcttggcaatcttgcttctgtggattgtctcatttccattttggatttttatattgtaagttgttgctaaaaattatttttttcccttcttccacttaccttttggaccatgaaggatatattaattaaagtcaagctgctattgagttttgtgtctgaataatttcttatacacttatcatgagatttacttctatcatataagtactgctagtaaaaccaatgaatgtttaactccttcataagcaaaattatttttatgtgatctctaagaaattcctcctttcacatttttctgttttcatacaggtcctcatgctgataccgccagtggatgccagaatttgcagtgtggttttcgagcctgctgccgctctggcgaatgacccttgacttctgatctttgtctacttcatttagctgagcaggctttctttcatgcactttactcatagcacatttcttgtgttaaccatccctttttgagcgtgacttgttttggccccatttcttacaacttcagaaatcttaatttaccagtgaattgtaatgttgtttctcttgcaaattatacttttggtttagaaagggattaggtcttttcaaaagggtgagaacagtcttacatttttcttttaaatgaaatgctttaaagaatgttggtaatgccatgtcatttaaagtatttcatagataattttgagttttaaagtccatggaggtgattggttctctttacacattaacactgtaccaagctttgcagatcttttccgacacacatgtctgaagacttattttcaaagacagcacatttttggaaactaatctcttttccgtaatatttcctttatttcaatgattctcagaaggccaattcaaacaaacccacatttaaggttcttt

SEQ ID NO: 34641 - DNA, 1034 bp, Homo sapiens
actggtgcaggcctgcaggatttggtttcagcatgtccttctctgaatgatgaatacttttactactgtgacaacattaacggtaatgccttttaacagtgcgataattttgaaggaattaatttaaaattttttttagcagttctaataatttttccatttagttttctagatttctaattcccagactatcttactttcagatttagttaaatttgataaaattttaaaattacattttcattaattaacatcttgaaaggtaagtttttcttgcagatgtatattctaaatatccattgtgtcagatttttgagggatgtaatagtgtaatcaaaaatggtaagttaatagaaatactaaaattcttgttaaaagttttaggtattcctctagagttttgtagcactcattaagaatttagaactatttatgttctagatacactgatttcttagggataatagagtcttatttcttgtaagacagctttatcaaatgtagaaaaatgaggactttggtaatgtggacttccagagtttctggatctgatgacaactcttagcaaagattgaggggagaggacagtatgtagtattgagaagagtctgagatgctttagacatgactagaattcctgtagtattttggaaattgattcctgaacctactttcaaaaatcacaagaaatacttcttgattttgttcttttaaacatattctaccctacagtggtcttattgaacatgctttttcaaagtatgttcagtgcctttttgcacatttgatagtcactggtagagactgaatttcccagaagcataaaaagctgctcttctgttattagtaagcaaatcaacctcctgtatttataactggagaaaattttagatggctcagactactatgtacctgtctttttatactgcgccctattgtctttgagtgcccagttcaccttaagatgacaggaaaatcaacaaaatttttctcaggcagaacaattgacaggagtcaggaagaccagagggagt

SEQ ID NO: 34642 - DNA, 1032 bp, Homo sapiens
tttagtagagatggagtttcaccgtgttgcccagtctggtccagaactcctgagctcaggcagtccacctgcctcggcctcccgaagtgctgggattacaggcatgagccactgtgcccggccttgtaccacattttctttatccattctatgacttatgggtatttaggttgagtccatgtctttgctattgtgaatagtgctgaaataaaaataggcatgcatatgtctttataatagaatgatttatagtcctttggttatatacctagtaatgggattgctgggttgaattgctgcttcttggtctttgagaaattgctatactgtcctccacaatggttgaactaatttacactcccaacagtgtaaaaacattgctttttctccacaacctcgccagcatctgttgtttttttgactttttaacaatagccatcttgggaaagaggcagcttgccactgcaggctctgtgagacagctgaaaaactgagtgcccaaagtgtgacagggaaatgtctgcctctgaacacaacatcctcactggggaacctgaaggtctagataacgggagaaggatttgagcttacctggagctgagatgaatttagagagccgggcaaaatacaggggtagaggaagcagtggggagatccctgtgggcattcttggtccccagggaagtcatttctgactttttcttgcagaggtccttggggagggctgtcactggaattggggaaagaccatagggagaaggaaacgtccagctgaactttgttgtaacagtttcaattgaatgggatgtttcctggacagaatctgagggaagggatgaaaggggagttcagatacgagcacagaagccatggcagatgggcaggcatgaaacttgaaagccctgcttgctttctcagtggggaggcttgtagtctgggcaagatcttagccctgctcaccagttgcctggttgagggggcatggtgctgttgggggtgagacctgccttttgggctgtgtgggaactgggt

SEQ ID NO: 34643 - DNA, 1035 bp, Homo sapiens
cttaaaaatgtaaaaatcctggtttagtctcataactgctaaaacagatacttgggcgggtgcggtggctcatgcctgtaatcccagcactttgggagaccgaggtgggtggatcatgaggtcaggagttcaagaccagcctggccaatatggtgaaaccccatctctactaaaaatgcaaaaattagccagatgtagtggcgtgtgcctgtagtctcagctactcaggaggctgaggcagaagaatcgcttgaacccggaaggcggaggttgcagtgagccaagatactgccactgccctccagcctgggtgacagagcgagactctgtctcaaaaaaaaaaaaaaaaaaaaagagattctcagggatttgagcccagaatattttattatacttttttcaagtattcaagtgatttttttttatattcacaaaagtttgtgaactagattatgtttactaatagtcatctgttacttagctaactgaagttctgcagatctttacagtgacaatttcttgccttttaggttaggcagattttagagctttgtcctaacctggagcatctggatcttacccagactgacatttcagattctgcatttgacaggttagttattttaaacaatttaaatataatgaaaaactattttataaggtttcatttatgtaattgcagtttaatcatactattattttttactatcaaatctcagtcatgtctgagtataatttgatagcaccctccagttcttcacttcttactcataggtcccagctgatccaaaaatcccatctgtattatcttgcaatctctgtagtcctatattttgtctaggcccttgagccctgctgtgcaaccatgtagattggtattatatgtttttaagaagttttagttttagttgggctctaagtgccatttggcaaagctccctcttagattcttcacagttactctgaaatagtatagtgtaactttcttcaagccaccttcttcccagagtatatctccttgaccaccaattctct

SEQ ID NO: 34644 - DNA, 1041 bp, Homo sapiens
aattttatttctgtagtcataggtatctaggtatcctaaggaaatacagatttaatgtgttttcttaatcagaaactttttagtagaagcaaaatattgaaaataatctaaatatccagaaataggagttgtttggggctttgttatttgataacccatatagtgatgttataaggccatttaaaataatgtcactgaggaacattaactgatatggaacaaattcatgatacagtgttatataaataacaacaataataacaaaattgcttgccatttctgtgtgccaagcactgctctaagcaccttacctgttgctctcctttccagattagctgattaagtagcttgcccaggtgcacacaggttctaagcagtggactcaggactccacacagacacacttcaccccagagtccatgctctgcctcctgactccactcgcctactgccttgtaaaatagaccatttctatacagcaagaaagtacaaatagaggtgtactcagagaaagcgacggaaagataacatactaaatgtcacagtgattatcataagggtgtggaatcatgtaattttattatgttcttttttgttcaactgcatgtgctaaatgtatttgttgtgtaataaaagaataaatgttataatatttaataccaggaaaaatttctaaatggtataatttcttacaagagaactaaggaggccaggcatggtggctcacacctgtaatcccagcactttgggaggccgaggcaggtggatcacaaggtcaggagtttgagaccatcctggccaacatggtgaaaccctgtctctactaaaaatacaaaaatagccgggggtggtggcggatgcctgtaatcccagctacttgggaggctgaggccaagaattgcatgaacccaggaggcggaggttgcagtgagccaagattgtgccactgcactccagcctgggtgacagagtgagactctgtctcaaaaaaaaaaaaaaaaaaaaagagaactaaggaattccgaagtttttctttgtgac

SEQ ID NO: 34645 - DNA, 1050 bp, Homo sapiens
taatgctaagtgagctaagtgggaaatgatcaatttctcaggtatctcaagtaatttagagtttttgtttgaatgtctgacgtttttgttggaatctcattcttaaaggatgcaaccatgttttggatttcatttattactcccagtattatatatgttataggcatttattaacttcttaatttattttaattcattggtaattttcaagtaactgtgaaaaatcaaaaacatataaaatgagagatacggtcttggagatacattttcagaagtttttttcatagagaaaccataagattaaatgacatctcacagcagctcgagcaggctacctggcttgtggtggaaaagcctcttcctccacacacacagctagattctttgtgtacccaaatttgttttagtgaatggtggtatatttctttataactaagtcacctaacagggtgtccatgaagggcagagggggtatgtgtcactggttccggtagagtacatgtaagatcagcaattcccaaagctgagtggttaaaccaaaagacaaatagtctttatgcctcctagacagctggatatttgaagtcatattctcatttatactgtgacttttaataaattatcttgcctcctttgttagtactatggcagataatatgataaatggagcacttgcttttattgatgaattcaccattttcactcttgttttaggttttcactctttttttaggtttattaaaatttcttaaaaaaaaaaaccaacaaagtgccatttatggaaggttgctctaagttctcagggtcatgaggaacataaaaacagcactagccattttgtatgccaggcacattgctgtgcaccattatctcatttagttctcataataattaagtgtagacacttactatccttaaccttgtggttgaggaagctggaatttagctcattaagaaacttgccctttgctagtgatgtggattaaaaaaaaaacttgtccaaggtcatatagcagttagtagcagagcttatcggcgaaagaggtccct

SEQ ID NO: 34646 - DNA, 1051 bp, Homo sapiens
gctttttaaaattgaaaatgattgtgcagtaatgtgtttctgtatctctttaacccagatggcattcttgtgggctgcgtaatttctttccttgcacttagtgtggacaatgaggatctccttattcccaaacccagggcactcactggctgtgactgcatcatggtaccctgttccctcagggggtttgaggttcaggtacccgttgggttacctttacagtcacttagctacacatacagagtagaggctcctgaatcagcagcagctgctaccttgagtgaagcttttcactccttccctgctaactccccaagtctcagaacaattctgtcacaatcacaagttcttttctcaagtatctggaatgctcttcttttgtcatgtctgatttttgttttatattggtacgttgttatttattaagcaattccattactattgaacattttgattaattccagttttgttttcatatagatcatctttcaatagagaaattcagcggtaaagaaaaatgagaaaataccagaaattatcatatcagaagggacaaatcacccacatgaaagtttagctcagtttgctgttcacatcacttcctcaattctttgtcggttctgttctttgctgcctgactcctaaagagactaatttggccactccgttttatgtctaattctttcttttcttagtcacttccctttccatttcatttttagcttctcactgtctgattctgtttttgttctctatgatttttcttcttctcctctgacctgtatattgttttagcaaagatttgttgagtacctgttatgtgctgggtcccagtgatgcaaaggtgaatgagaaaaccagacaagaaaatgaatgtagtatactgcagaaaatcataggcaggtgcaggtactgtggaagccgagtaggggaaaggacagactctgcctgagaaacttagggaagtcttcacagagagggtaccgtctgggcatgttcactcctggaaaattggtaggggattctcagaccaaggagcagtgtgaaccca

SEQ ID NO: 34647 - DNA, 1040 bp, Homo sapiens
ccgcccggggcagccgccatcgctgtgctcccgtaagtgcttggggttccctggctgctgcccacctctgccccactgctgcaggtgaccgtttgtctgactgtagctttccacaggcgacctgggtgtgctctcacctctggttctgaaacacaccaaagtctcttaagatacttattatcttaatctgtttgaattgctctaacaaaataccttagactgggtgatttataaacagcagaaatgtattgctcacagttctggaggctgggaagtccaagatgaaggcaccagcagatttggtgcctggcgagggctcattcctcatagatggcgccttctatatgtgctcacacggtggaaggggcaaatgggctccctccagcttcctttataagcatgctaatcccctcctaaaggcccccacttgtctcctgcagaccccacctcttaatactattatgttgcagtttgtgttttgtatgtgagtttgagggggatacattcagaccatagcaatacttccagttttgggttctcctgggctgtccagaatgtttgattggctggttggatgggtctgtcttttttgcctctttttttcctctccctttcttttctcccttcatttcttcctttaaaattagactacacattttacttttttatatgtagttctgtctttcaagtcattatatggggtatgtatgtgtgagagagagagaatatgggaaactgttggaggtgtttctgttggtcatcgggggactgtcccccatcagctgtcccaggcagaggcagctgctttggagggaggctactccttctcgctggaaggcttccagcaccagcaggcttgcctcttgcctgtggtcctataaagggatgctgagactgtagggactgcactgattgactttctggttcccttttagttgtgaggttctgtgattctgtgacatgattcccacagctgttttgaatgattcgaatgattcctgaggccttgatgttcttgggagattcatgcatatctgaat

SEQ ID NO: 34648 - DNA, 1079 bp, Homo sapiens
ctacttttggctccagtgttagagaatatgtcttttggagcagcctgttagttttaaatatctcttgttagaaatttagccattcatccaatattgctatggagaagtgcctactctagtgcagacactgggaatgcaaaactaaataagattactacacataggaaattagttttaaaatatatgaacctatatgttaccccaagccatttctgctgtctagggtcatattaaataaacctaaaccctaatccatatgttggcccttcacatattgaaaatagcttatagtggagaatcatataaaagaattgaatggagcagccatccaagtataatgaagattcatctggagggcagacttcaattaaacccccacaacggatactcagccaaggaaatggagaaaatatatagatattttgtatccagatttaaattatatctgctaatcacaaggtagtggcacaaagatcagggccaaaagtgttttgctcaggtagctaggacatatagaacagcctgagaagtatggataacttctcagacttcatgagttaactgtgcaagctggtaacgtatctgtccgccagtgatacccattggactgagggagttacattagctggaccaaccaccagtacttctatgtcaacttgctgttgctaaaagaaaaatgtctatgatgtgtctcaaataattttaaatacagttgagttaatgactacatatttgagtctgctaattccatgcagtttgccaagctcttcctttcaattagcagccgcagtgagacttaagtttgcaactgagaccaagaaatggaaaggatgaggatataccacagtgacctgacacttgctggcttcccatcttctgtgagagctatgaccagctattctcaatgagctctggaaaatgaatgcctggttttcttttattattattattatttttttatttttttgacacagggtttcgctcttgcctaggctggagtgcaggggcataatcttggctcaccgcagcctcgacctcctgggctcaagccatcctcccacctcagcctcatcagtagc

SEQ ID NO: 34649 - DNA, 1033 bp, Homo sapiens
aagtgccgtttacaaagtggcatcaaaaaattgaagcaggccaggcatggtggctcatgcctgtaatcccaacagtttgggaggctgagggcaggtggatcacttgagatcaggagttcgtgaccagcctggccaacatggtgaaagcccatctctactaaaaatataaaaattagccgggcgtggtggcatgtgcctgtaatcgcagctacttgggaggctaagacaggagaattgcttgaacctgggaggtggaggttgcaatgagctgagatcgcgccactgcactccagcctgggcaacagtgagacaccgtctcaaaaaaaaaaaaggttaggaatcacaaattgtgtaaatatatagcaactttaagaagagagaagaatgcttataacctagtgaatatttctgctgagccttagttgtcttgtctaaaggaaaaaagagggaattgtagaataaaagtatttgttagtggaaattattgacctgaaaccatatcatattgttagtgtaactgaatgtatcagaaattgttcctatgtaggtattctgtgaaactggtttctaaaatgttacaggaaactgtttcctttttttttgtttgtttgtttaagtggaggtgggaggaggtagggaagaggtctgaatattaaaatatgtttatgttcatgtgttcataatacgttcctttttctctctgtgtgtgtataaaagtgccttgctcatgaatgcatttttgctattcacttcgaaaggaagcctttccccagcttggcagctgaataaaccaatagctttgtacatgctgaacagagtatggtcatttgtcctcaacaaatgaaatagatcctactttgcttaaggcatattctacattcactaagtactgaatagagttaatagatacagtacctgaatctatatagtatgtctgacaggagatgacttggcgtctctagagaagaaacacacttgaagaagaaaatgtctgatattcagtcaagattcaaagtgagcttatttgtttatg

SEQ ID NO: 34650 - DNA, 1173 bp, Homo sapiens
ttttattctttctatataaactttaaggtttgtttatagagttccttaaaaatttgattggaattgtataaattaatagggagaaagttgatatctttatgatatttgttccatccaagagcatggaatgtctgtattttaaattatcatctatattgtttattaggtcttacatattcatgattagttcctaggttctttataggattaggtttttgttgtttgtttttccttctgtgaaatgtctttatatatggtctagttagtattgctggtataaaagttagtattgctggtataaaagttaacagtgcctgagttgaaacactggccccgtgacttactagatgaatggctttgatcacgtaacttaatccacaggtaagatggggacaataaaagtaccaacttttagggttgttagaagaattttaaaatagttaacatttgtgcagttactagagtagtacatggcaaatagtgttatatgagtaattaaattaatgaatattcataggttaatttcagatcaggaacattgttgaactctaatagtttgtatggttttttaaattggatgatatcatctgtaagctaatagttttatctcttccaattcttaacgtatctttttccaaaaagagaaaaatgttgattagaactttcagtactgtgtcagacagtatcagtctcagtcaacatggttatctttagctaatttcactttttgctgttgttgttgttgtagagaagagtctcattctgtcacccagactggagtacagtggtgtgatcatagctcaccacacagcctccaactcctgggctcaagcagtccgcctgcctcagcctcccaagtagctagaactaaaggcacacaccaccacgcctggctaaatttttaaaatttttttgtagagacagggtcttgccatattgcccaggctggtcttgaactcctgatctcaagtgatcctccacccttggcctcccaaaatgctaggattacaagcatgagccactgtgtcctgcccctgacttcacttttaaaggaaatgtatctcatcttattcaggataatgtttgcttaaagattttggtagataacctttaccaagttgagaaagttacattctctttctagtttggtaaaaatgttttgtcttttaaata

SEQ ID NO: 34651 - DNA, 1032 bp, Homo sapiens
ctccctggagtaaaatagaacatgcttgtggtagttacttactgcaggcctttgccattctctgactcttttatttactgagccactcatatatgccagacactgtgctaggagtgtgtgaaagccagagaaatactcattagaggaaaattgctgacctgaagccataccatatgaccttattagcacaactcagtgtattcgataatgaaaatgttcactgactttgattttggaaatcccccctacagagtagcataaacgagacattgatattgtctcttttctcatttaaagctatgcctttaaaggccacccatgttgctgtatatacttggaatgtgtttccacattttaccagtccgcttctccagcgataggaacctagaatgcttctaattcctgtcatcacagatgtagcttcagggtatatcttcatacatgttgttcatacgggaatttctttgctatctatgcccaaaagtaggattgctagatcatgagatgtgcaaatagtttgcctaagtagtgctgccggactgttcttccgaacagttactccactctgcaatcccaccagcagtgccagttccaaaaaagaactcactgacacttggtgttatccagctttcttattctaccaaactgatagcataatgtgatcatattgttcatgccttgggattttctcttctataatttggatatctttgtccattgctcatttctttattgaagttgctttcttaaaaattgatttaactttgtccttggtatctttagttcagtccagaaatgattaattgtgatgtgattaaattcattttttggtctggtgctttatgcttttttgtttaagaagtctttccctggcctcatttcacaaagatattctgtattatatttaactaactatatagttttaccatccccatttaggtctttaatccatcatgaatcctcccttatacatgtcattatatgtatatgtattaaatggttttacttttcatttttttcttaaccttgttc

SEQ ID NO: 34652 - DNA, 1062 bp, Homo sapiens
gagaagggagacgacgctgctgggtccgctgagcggggcgacccgaggttagtggagacggatgctgtcttttgaaggccttagtccctgccctggtgaagccgactgcgaggttccacagggcgtgcaggcagtccggggatcgttgcgaaggggggtgcgggctaacttagctgctgccgtttctagatgtgcagctgtgtaggccctgtttacaagtgtgcataaggacagtgtattaagggagaactcaagagaatggaaaggtctttcgggtagtggttaaaataaagaagagtaggaactaggtttttaaattttaaatgaaattatatcagacagaacttctgttggatctcaggatgcaccatccaaaaataggactgtaggagaccaaaatatgccaccctacaatatacttctagagtatattttgagctggtattctgataaaatgcagacacaggagtcgctctgaaaatctgtcctgttgtaaaagaaattgacatctacagaggaaatatacatcagtaaaggatctgtatcagaaagagggcagctctgcgataatttttgttacctgggagatcttatctgcataccaagacaacttttattcaccgtatatttcctcccctcacctttccacaactttgtggccaccatcccccagaaagccgcaagcccccatttcttgagtagcgtaggatgctgtataatattcaatcatctgaccatggtgggactcctctgcgtatgtaattaagtacgggttttttttcttgttaatgtctatgtcaggttaatttgtaacccagccaaagaacctaggaggatggagggaagccgtttttccctctcctacacctcagtaacctactgccagctgaagaaatagaacattactaaagccacctgtacatctttctccttttgaattacctgccctccgaagaagtaatggattttctgaatttactgttaacttttaccatgcagctttctatatcttaatgacatattttaatatattaatgacatgaataaatccctgaatgagga

SEQ ID NO: 34653 - DNA, 1050 bp, Homo sapiens
ctcattcgcaagaaaattagtttttttctacttgtagaaataaaaagtgaagataggcctccatatattctagacatgcatgacatacctttcagagtcggcttcagcagtctgacacctcctgttcgtcctagctgaaactgtcacttttctctgtccttgaagatagtataattcattatcaggatttattatcagttgctttttgtttttaatctagtttctaggctaactaaatcctttgtcttcaacacaacaatcctttcaacacatgtatctcctacttgttctagccatcttggtaccagttatcactgccacagaaaaaggaacccaagcaagattaaaacttaatttattttgtaagcactaataatgagtaagggaaaataaggaaatttcaagcaagttaaaagaaggcaaattttagttcaatgtatttgaggacagtatatgaaaaatgtgttataatgaagtacctctattattgctatagcacaaagtctgtggagactcatgaaaattaagggttagaaaggtaggttaggtgcataaacaggtgctaaagaaacaacttttttttttcttggaaggtgataaaacatagtaaggtaataatggcttcttgtaaaataacatacatgaccaattcaaatgtgttctaaaatatatttcaatgtaaaaactagaacctttatatactggggattataagattctacttactagaaatttacaaggttaaggagtaagacaaagtttggcttgtgatgtttctcatttataaggaataaaacaatatgaatatatgaagtttggtctattaaaaaggatggtgttctcatggtgtgatataccacaaaaaaaatctgatcaaaaccaaactgttcaatgtgacagtctgaaaattatatactctacttcattcatgttacacttttttctactccttacctgcttttactaatgcatttatccccaagaaaacatccaacaatatgggactaatttggaacaatatccagcaattggtatttaaataatttactg

SEQ ID NO: 34654 - DNA, 1050 bp, Homo sapiens
ttctagtcacctgggacttcgtgaactccagtcactgtctccccaactcaggaatatttccaagctctgttggggttctctccgtatcatgcagcctgaaaactctccaggcagtaagccacgtatctggtccctgctaccctgttacttcatcatggccagaagcagaaatcatattttttctttcagcaaatatttgtccagtttctatgtgccgagtactgcagataaaatgctgaacaagaacaacgaggatctctattctcaccagtctgtattttagtaagagagaaaaacaaacatagaaaacaaagcagtgataaattgtgttaatgaaattggatgatagaaaggagtttctagggggagctactttaggttgagttgtctgggaaatcctttctgaataagtaatgcataacctatgaatggagttgagacatctaggctatcattgatgactgaaactgtgagtagggatgaggacccccaaagagactgtgtagaataaaggagaaaagaaagactaggactcatccttgagaaattcgaacttttattatccaagtaaagtaggatgacttgggatggaagaggcaaaaggaaagtgtgttttgtctcaaaagccaaaagaaattagtttcatgaaagagggtgctttagtctccttgggctaccacaacaaaataacatagatggcatggcttaaaccacagaaaattattttctcaaagttttggaggctggaaggtccaagatcaaggtccagcaggtttggtttgcaagctgatagatagcttgcagatagccaccttcttgctgtgtcctcacatggcagagaggaccctctggtaccccttcctcctcttacaggaacaccagcgtcatcagattagagcttcactcttacgaccttaattacctcctaaaggtcctatccccaaatacagtcaccttcagggttagagcttcgacatatgaatttaggagaaactcaagtccatagcagaagaaatggtcagcaatattgaatgctgccaagggggcaaa

SEQ ID NO: 34655 - DNA, 1078 bp, Homo sapiens
ttggacttatagagtttaattaaaagagaaccataacttcacagaggaaaggcaagaagaagagccttttaagtgtgtgcgaaggacttaagtgtttatcagaacaaaggacaatttaggtagcttttgttaatatggactaggaatagtattgtcagtctttgaagccataagaaaaaagtcatcattaaatttgattccagaaggcagtgatgttagtttggggctcttaagaagaatatactagttaggccaggcgcgctggctcacgcctgtaatcccagcactttgggaggccgaggcaggtggatcacctgaggtcaggaattcaagaccagcctgaccaacatggagaaaccccatctctactaaaaatacaaaattagccgggcactgtggcacatgcctgtaataccagctagtcgagaggctgaggcgggagagttgcttgaatccaggaggcagaggttgccgtgagccgagatcataccattgcactccagcctgggcaacaagagcgaaactctgtctcttaaaaaaaaagaagaatatactagttagtgtttgaagatacagtcttttcagtgtgtaaatcagattaaaatttagaggggctgaaatatgggaataattattccttttttgttccctaatactaggttgcaagtatttatgtgacaatatctgacagattttaagataatagcttataagatagggaaagaaatgtcaaaagataactatgatatcgcatgggtgtccaaccttttggcttccccgggctacaatggaagaagaagagttgtgttgggccacacataaaatacactaacacactgactatagctgatgagctttaaaaagccggtgggggggttccctgtgttatttttatgatatctgccaccacagatgggtaaaaaaaatcctcacaatcaaagggttggacacctgtgaaggcttaaggaaaaaaatatcagtacttagaattttggaactcggaaaatagaggatttttagaattttttttatttgcttttccatgccttatattcccttatatctcctctccttttgg

SEQ ID NO: 34656 - DNA, 1054 bp, Homo sapiens
ggattaaaggcacccgccaccacacccggctaatttttgtgtttttagtagagatgggatttcaccatgttggccaggctggtctcgaactcctgacctcaaattatccgcctgccttggccttccaaagtgttgggattataggcatgagccactgtacctggccttgagcccatatttaatccatatttcagctaaccaagcaaataaactattagaaccttttttaactccccaagctgcaacattaaatgcagaattcctgcttagtgagcctaaatccataaattcagcctgatccaactttatgtttcttccaccattatctcacacccttaatattttcatttccatgcctgttctccagatttctgcttatataagttagaaaactcaagcagttattttggagtgtagcacacctcatcatggatcacactttgaacttcacctctaggggcctgccgggactttagttataggtctagaagcaaacaggggtgttggggttgggtcctgaggagaatcgtcactgtctttcctggaagctgccttgggggggccatcacttttgcctcaggcagtgcacgattaatctcctcagacaaaggtggaaatgctgatggctgcccaggttggggaagggatgtgttggggatgttgacaccactgggagtggggaggctgtttcctctgactaaaagctcatcagaatttaggagctcagtgttcccagcctcatcaggtttctcccacaagtccccattccaatttgcaaggccccattcttttacagtcactgccctcactttaacactagataccttgcgaggctgtgtgtgcaccttttgttgaaggtcagccactcgcatgataagagcttgtgtctgattttccacaatttcagctctttcttgacaggagataaaactgtcactcagggcaatcttagaagattgagactcagtatgttcctcttgagccgggagatagaatccctgagttcatagttttctttcatcactttctctagtgaacttaggagcaaccaacc

SEQ ID NO: 34657 - DNA, 1046 bp, Homo sapiens
ttatttttttccagatttcatcccctctcctggcttcaacacttcacctctgtttagatgaaccaccgcctctttcattattcttttctagacaccttcacatatatattatgggaagaattttaagtcactggatctaaaactaaacttactttgcttttaaaacttgttcttttttctgctgtgttctcctttaattagtgccattgacactttcctactcacccagagttaaattgcaagaataattttttattctttgtaccttcttactactttctctgaaaggagttataataaatagctagggattattaatgaggctgctatgaacattcttgtgtaagtctcttttttagacatctgttccatttctcatgggaaaatacctatgagtagaattgctgggttatgggatcaatgtatatttaaaatataaaacataaaacctatttatattatctaatatgaaagctatttatatcagaaactgccaaactgttgtagaaaatatattatttgagtcttactagcaatatgtaagaattacagttgctccacatgcctttgagcaattgatgttatcattccgttactagctgttctagtgggtgtgaaatggtatctcattttgctttaaattgcatatctttgatgactaatgatgttgtgcacattttcacgttcttacagacaattcatgtatcttcctttttaaaggatctgttcaagtcatttgctcatttttaattgggttgtttgctttctgttgatttgtaggtgtttgttataaattctggataaaagtcctttgtcagataattactaatgttttatgtttgttgaataatgctttagcctggttgaagtgcttttatagactttgtccctaattagttgggtagattaaccttgtgaggttgaagatgtgttagttctgatgccctccctagggtaggtaaagaaactagacatacaggagaaactaaattaagactaagacaactaagaaaataagaaaggggaactctgaaacagattgagag

SEQ ID NO: 34658 - DNA, 1031 bp, Homo sapiens
attctttatgactagtttggtttctacttgttgcataagtataaattagggaaatcagtggataattaaagtgttctttggatttttctcttttagtatctatttagatacattgatccggtttctttaatgctgagtttctcagccttggtgctattgacattttgggccggtgaattctcttttattgtgaattgttttggatatttagcagcacagttggcctcttcccacaagatgccagtagttccatttatatgtttgtgtttgggattaaggagaccaggaccttgtaatagcaacacctttattaatggagacactgtagtccttaagtcatagcagaaaatacatctgacatatgcctaaaaaaaatgactgaacagaatagtaaaaaaaaaaaaaaaatgcttaaaagaaaggtagtggttaccctgaaactaaataaattgaaaaagcactaaacaaagccagacaaaaaatgggttgtctttcttagaagaaagtaggatgtaagtaaatatggcactgtggctgtgaatttcagaaagctacctgatgtgaggaaagataattattaataataggcagtttttaacttgcaaattgggctgtattctaaaagttgttttgaggatgaatagctttggtttcagagtgacattttccctcaaacatttatacaacaaatatttgagtgcctagcatggaccaggcattgggctagcatagccagcaggatgacaggatccttgcttctttggagcttatagtattgtatggcatttatcaaataaaaaaatcacataaattaacatttatgtgattttttttttccctattactccccttctcccagtttgagttgagggcgcaactcttttctctttactcactgctgtatccccagagcacctggtaaacagggaaatctttgttaaatgaataattgattagttgaaagagacattaaaaaattacaggtgatgaagtagagttgtgatcagtgttccaaagggaataatacaggg

SEQ ID NO: 34659 - DNA, 1066 bp, Homo sapiens
cagttacttttgcaccaacctaatatgtaacatacctaaaagttaactcttgatctctctctaccaaatacaaagtctatttctctggtgttctttatctcaacgtaccttaaatttcacaagtcaaacacctgaaagtaatcttttacttatcttccttctcatctgctatgccaatccaccaattatgttttcaaatatatcttaaacccattcatttccctttattttcactccagttgaagtcagcctcatttcttacctagactgatgcaaaaaattcttatatggcttcctgtcttctccttttattctctctagtttagtcttccatggtgcaaagaaaaatctgtttaagtactttgctctgctctcaacctttaatgacttctgcaccaacgacaaaagcacggagatatggatatattctgttcttggaaaattatagcacccccaaatttgcagtgtggcagaaaccatggctgtacaaaagttggcttgaggtcagattgcgatttaaaaaaatatgtattgtcctgtggactttggttctttttctgttgctaattgggattaaattgatatttaagtttgtttttaagcagtgggattgatagagatgccactttccacattccgtttagtgaattcactggtgcagttctgttttataccaaccccatgcaaactctgattactctttctttggagaaatcaaaagctttcctgagagaataccttcccaagagaatatatgaagacttgggctgagttttaaaaattatcatggacaattttaaatatgtacaaaaataggagaaagcataatgaatctcaatgtttttgtgacctagctttaacaatataacaaattctggcttaatttttaatataaaaattatcaaaacattttatatgttggttgtctgatgtactgtaattcattccatgttctcatctgaataaacccaaattacacattttcttggagttgtaaatttacaacagaaagtgaaaagtattaacatcatgacatgttgtcttactgttgcttttagcttaatat

SEQ ID NO: 34660 - DNA, 1054 bp, Homo sapiens
attttgtattttgatgtaatttcaatcttaaaagttggaagaatagaactcctatgtacctacatttgttgttttacattttgctgtgtttatcattcttgctttatactgatctctctatattttttcagaacagtttgagagtaattcagagacatcaacctctttacccctaaattcttcagtgtatatttttaaaaaacaaggatactgtcttacctaattacagtgaggttattaaaaccagaagatttaatgctgatacactgttacccaatttatggtccatattcagattatatctgtttatctattttttctgttagctttttttcctcttattctgggatccacttcaggatcatgcattacatttggtaattatgtctccttagtcactttcaattgggaacacttcgtcaaccttactatttcttgaccttgacatttttaaaagtacagggcagctattttgtagaatgtccctcaatttgaatttatctgttgctttctcatgattagattggttatgcattttggcaggaataccacttaagagatgttctgcccttcttagtacatcatatcttgagattcatgatgttggtgtgtaccaatgttggtgatgttagctttgaaaattttgttaagctggtattcctcatatgtatccctgaaagttattatttatctcattgtaactaatatgcaatttgtggaaaaattattttggggaacagtatatttacatagtataatcaaagtttcacccacaagttttagcatcagttgatgattatctgacttcattccttctataattattagttgacattcagacataaggtaatctttcccatctccattatttactcagttgtttttatctgtatgaactcatggatttttaattttattcagtggttaaatccattgctgtcattattttgattcacaaattgtcccaggtttggccaatgggtgtctcatcaagctggttccagtgttatttctgcaaaaacaagatactccagcttaattttgtattttatct

SEQ ID NO: 34661 - DNA, 1068 bp, Homo sapiens
taaatatgctatatatctgtagatgattttcagattactcaagcaatgtataaagcacttatttaaaaacttaattgaaatcatacaactgagacaaatctatttcggcaattccacgtttcttcagatatctaacgaccacctacatattttcatagcaagttatatgcagttttgtaaatcatcaatataaatcagggcaattaactagttactgagcatcactctgctgagagtctaacagaaaatattctcaatatgatttcattctcactagacattggtaattctgctttggtagctgggccagtacaggagccaaggaatcttgatttttaattccctgacttacatgaaataatctttctctacaaggtaatcttatcaaaataatatttatatttgaaataatacccagaagtgttgttgttattgttttaattaggagaaatagcaattcagcaaaactaagaacattacatctttaaaatgtggagtagtgatcaagagtgtagaattggaactggacagcttagactcaaaattctcgtttcgccagtgtcaccttggccaaaatacttaacttctctgcgctttggttttcttatctgtagaatgataaaaataattgcacctttctcattgggctgttgtgatgattacataagttacatgtttgaaaacaaaagttaagtgtttaaagcccacatagtaagcactaaatagagtgaaaccattttattattattaatctgtttaataacctggcaagggtatgtctcaggccattaatgtttgttttctatgtatcttcctacccttttttttccctctcactagtatcttgagagttttttgcctacttcagccacaccaatgctgaaaaaaagattcaaagaaattattgacttaaatgctaaacagatttttgggtcatgttttgttttgtttcttttcccatagaccacaagattgagggcttggagctggagaaagggaaaagaaaaagcagactgtgactctctggggaaagaactgaaagatgacactaggaattctcaaagcgag

SEQ ID NO: 34662 - DNA, 1046 bp, Homo sapiens
aaacttagtgactctcctatgctctgcccgggttctttcttccagcatggattgtaaagtaccagcaggaagaaagccagagtgattgtattgtccattttgattatttatcttaacttagggatcatagttctttgaaatatatgttccaattagcaaaaacagttgtttcacatatgtagtccatttttctagttctttatgatgggtggacaagtctatcttagttactcctttacaactgggagtaatgtcctccactccattagattttaagataacttataacatggtttattaattcccccagaggtaaccaaggcatataaaactgtttgctcaaatatattttctattaataagatagaaattttatcactcttacaaattaaaggaaatgattgcaaaagatctagagaactgatggttgaaatagaggcttcagtagctaataagaatgtttctcaattagcaacataaaaccatgtaattaagcatcatttgatcagtcaagcatcgttgttgaggatctgtataatttcttactctcttctgaatttggcagaacattttttcattgtccatacatattataataatgtcattggtttttatcattttctaaagactgagtctgattatattttgaggaactattaattcttggcttacatggctcttagaaaacctttttttctgattcaatttgtccaatgcaaaatgatgtaaatttcttctctctcctctctttagccctaaagagtcttgggacattactttggaattattcattcatttagagaaatcaaagaaagctagctaagcatttggtttcttttcattttcattatggaaattccattttcacagattttgacaatattgggttcctaataagtaaatacttaaacgtcagagttatcggataaacaaagaagaatctttagaggtgaagtgtcccatattactacagatgcgaataaaacacataaacacaaaaacaaaaaggctaataagtatgccagattctatatttcctatcctgc

SEQ ID NO: 34663 - DNA, 1060 bp, Homo sapiens
atatttcttgtatcaaagtctatttgacttctattaatatagcctttccagttttcttttctttttttttttttttgacagagttctgtctgtcacccaggctggagtgcagtggcaggatctcggctcactgcagtgtctgtctcccggattcaagcgattcttctgcctcagcctcctaagtagctgagactataggcacatgccaccatgtctggctaatttttatatttttagtagagacgcggtttcacaatgttggccaggatggtctcaatctcttgaccttgtgatctgcccgcctcggcctcctaaagagctgggattacaggtgtgagccactgcacccggccccagttttcttattattaaatttttcatatatccctttttccatctttttattttaacccatctttgtgtatttaaaatgaattcttcaaatatatcacatatagttgaatcttgctttataaaaaatacagtctgaaaatcactgccttttgttggagtagtttataatttaatattattaatattgctgggttaaaatcttactgtttgttttctgttgtcccatttctagtttgttccttcttaccattattcctggctctttttttgatagggtatttttaatatttctttttatcttcactattggtctgtttgatcttttttcttttttctagtggatatctcagggtttgcaaaatacatatctaatttctttcttttttttaacttttattttaggtttgagagtatttgttatataggtaaactcatgtcacaggggtttgccgtacagactatttcatcacccaggtattaagcctagtacccattagttattttttctgcttctctcctttcaaccaccctctactctcaagtaaaccccagtgtctgttgttctcttctttgtgttcacaagttctcatcatttagctcccacttgtgagaacatgtggtatatggttttctgttcctgtgttagcttgttaaagatgatagcctccagctccatccatgtttgcacaaaagacaagatcttgtt

SEQ ID NO: 34664 - DNA, 1051 bp, Homo sapiens
tttcattgaatttggaggaaaatatgtctcttctcactagcatctaactggttttcattatcccaacatttctttgaatttccctactaatattctggacttttaacagagtgcaactattttgaggccatgtattacaggctagtgttacgggcatctcacaaaggcaaattgctcagaattggtcctgacacgcttttctctggtcttttcccttttgtgtacttaatttacagactgcagggcctccaagggttggaactgtgttctgtctatccctgtatatccattacttggtactgtgcctgaccatggccggcactcaatatttgtcaagtaaatgggtgaattgtaagttagaggctcatcatagtatagttgagtagtctagctggaattcagtttcctctgttctcatctctgcttcccacttactgtggtttttgtcattaactgttcatcatttgacaaggtgaggagtttgttaggcatcctgataccatctttttagatctgtaattgtagattgtgaacttatgattctaccttgggaaaatttgccccttcccttcctactctattgaggtcatcttccatttccttgtctggttgtcacttattctcttcctttcttttttttaatctagcttttcttgtttcagatattttattaataacagcttcctaattggaggtatatccactgtgggctccttcgcttattcagtagtcactttttagctataagagtcagtgcagaaagagaatttagtgaagggatgtggttcttacaacccaggttatctggcatggtggccagggtagaggtgtctttccaacttgctttggtcttttataaagagagtagcattaagatgcccattgttttcatttcggagaggcagtgtctgcattgtttttgggagcaaggacttggcagccaagctcctttgaatctaatccttaaggcacataattttctgtgcctcagttttttaacatataaaatggggctaataacatacttacctcatacagttatggtgctgga

SEQ ID NO: 34665 - DNA, 1031 bp, Homo sapiens
attgcagtgtagcagtccattgtatcaatatgccaaagtttgttcattttatcattgatagccatttctgtttctaggttttgggtgtcaagaaaaagctgctgtgagtactcatgtatatgttttatgatggacatgtacactcaggagtgaaattgctagattgtaggctttccatgtgtttagctttaagtagctaaagccatgcagttgaccaaagtggttatgttggtttacagtctcaacagtaatgagagttccaggtgctctacattttgaccatgcttggaattgtcaatcttcagttttagtcttctggtggtagtgttgtgatgtatcattctagttttaatttgcatttctctggtgactattgatgttgagcacttctttagctttttattggcagtttggatatccccttttcctgacgttcctgctcaagtcttgcctatttttaattttgttgtctttcattttcttaattatttataggacttcttaatatgggtactgaatatgagctccctgttggatttatgtgttgcatacatcttctcccagttcatgcctttttttttcctcaatattgtctttttatgaacagagtttcttaaattttctgaagtacaatttcttggttgttgttgttgttttagttaatgctgtttaagaaatttttctaccccaagattatgaagatcttcttttttgttctcttcagaagctttaatatgttttaccttttatatttagttctgtaatttgactggaattgattttttgttgatgatgtgaggtagggagaataaaatctttaaatttgtattctttgttccttagtggggaaaaagcaacatagaagtaagtcatagtcgtcttttaacatttttgtttttttacatttctgatttcaatctattttaaaattttaatggtaaactcttattataattctttattcccttacacacaggatgccctgatatattttctttggattcctttccattgttcagatcctggtactt

SEQ ID NO: 34666 - DNA, 1050 bp, Homo sapiens
aagaacttgaaatatcctgtctcttacaacatttgacattgagcactttcattgccattaatgtggtgcatttgtttcttccccattttatcttcgataaagtccatttgctcatgctttcggttgttcctcccactttagtgtgacaggtgcaagaacaggtggaggagtccttctgacccttttgtggctggagtggccttcggggaatgaggccaaggagaaatctgatgcatgctccttacactggttgcagtttttaaatgagctttgtgtgtcaaatttcaggaatactttttttaatccagtgtaatttttcatgcattgttaccccttttgtgtcactttttgccactgtgacatattcagagctacttctgtaaccaagctacagaagcatataacattttctgattatctgctctagggaatattttggcaacaaatccctttcctccattcttagccatttggagtgaaataatgagaaaaatagcttgttctcaactaaagcaattactgttgttcgtcctgtaccttcttagagatatttgttgtttttttttttataattattaacacaagttaatttctttactggcattatctagcagggcatagcagtagttctttgatcatgtaataatgatgaatttttcaagaaagatgacgtgcccatcagatctcatgtcaggtccctataaaattcctacatttaaaacttcagagaagtattaaacaataagtttagttgtaactttgctaatctgtaagcactgcctatatttcagtggtgccttacaataaaatcaatatttttgtgtattttaaagttttgcatccagtgggaattttattaatatttttgttagccataaagcatatttcaccatgttatctcttttacctcttttatttttgcataaaatcttcaaataacagtaagtcagaataatagacaaaatcttaactaagttattccaactactgtgaattcccattaagactttggacttactagtttagcatctgtataaacggctgattgac

SEQ ID NO: 34667 - DNA, 1024 bp, Homo sapiens
gcaacatgtttcagtgttcttaaaagactgatacaggcagggcgcggtggctcacacctgtaatcccagtggatcacttgaggtcaggagtttgagactagcctggctaacatggtgaaaccctgtctctactaaaaatacaaaaattagctgagcatggtggcaggtgactgtaatttcagctactcgagaggctgaggcaggagaattgcttaaacccaggaggtggaggtttcagtgagccgagatcgtgccattgcactacagcctgggtgacaaaagtgaaactccatctcaaaaaaaaaataactgatacagttagatctagtaattctgtatcttatagttaattcttaggaaatgatcagctttgtatgtaaatcttcagactctgtgtataagcatatcctaaattctcaaaaataggggattggtttaattacttgtgacatatccattcagtgaatgcagctattgaaaatcatgattttgaagaatatctggggaaaggagggaaataacatatttgccacgtgttaaatgaaaaagaaacaaaaacaaaaacaaaaaacaaaaaagcacacctacacacacaaccccataaaacaaaaacagtcctaaagtgatggggggaggtcccagtttagtctttgtttggaaataagctatcatatttttttccttttctctttattattattgttgtatcacaagtaaaatatgctcactgaatgaaaattaagatttgtgcaaataaataaaagaagcagagaaacaaagaccatgtttatgttcatgactgaaaatagctagtgttaagacctttttgtatcatcttctacgacttttttctattttttaaccaaaatatcgttacactctaatgatattttataaccttttttaagttgaattaatgtaaatgtattttctcatttaaaatagatgcatatcaattcattgtatagatgaagccatagtttaacaacttctctattacagcatatttagctcgttaataatt

SEQ ID NO: 34668 - DNA, 1034 bp, Homo sapiens
taagttagttaaattaactgcttcttaactcctttgtaattgccctgcaaacatttctatctcagtgctttttaaaatctcttcttgagctttttgtatttttactttttctttctttttttttttttttttgagatggagtctcgctctgtcgcccaggctggagtgcagtggcacaatctcggctcactgcaacctccacctcccgggttcacgccattctctgcctcagccttgcgagtagctgggattacaggtgcccgccaccacgcccggctaattttttttttgtatttttagtagagatggggttttgccatcttggccaggctggtcttagactcctgacctcgtgatccactcaacccagactcccaaagtgctgggattacaggcgtgagccaccacgcctggctgtatttttactttagaggactgcgttagaattgacaaaaccatacatctgtgaagtaggcttttgttatgtttttggacagctatgactgaagtaatgaaaaacaaaatagtaaagtggagcctactattttgttgattttagttttagattgatttctagctttggcctagggatttgacacatcagcaaatgttctttaggcaaaagagctgggtgagacagagcttctgttagggcaggttgctattttcttagtatttcctttgccttcttcgtcaagaactaaaatgtttggtaggtttagaacttgggttgtctcttacatttttaccagttatcttatacctgttatgagaatgtatacatcatggaacacaatgaacatcatccaagtaaaacatgaaaacataaaaataatattgccaagcttcccactttgagatttgattgagatgatcttatagttcatgtaataatagattatagtggcctttaaatttgatttatttgtatttgtatatagatttctggggtacaggtgcagttttgttacaggcatagattgcatggtggtcaagtcagggcttttaggtatccatcacctgaatcatgtaca

SEQ ID NO: 34669 - DNA, 1032 bp, Homo sapiens
tgaaatgagggaggatctgtgtcttagaaccaaggaaacagaatttgaaacttaatggatactcattgagtatgtcatggtttttctaattccttctactgttcgtgaggtagattttattcttcccattttatcaataatggaactctgttactgagaggaagtgtgactcgcctaaagtcaacataacttgaaagggatagagctggagtcgaaacccagttatgcttcactttaggaattcctaaaagaaaaggctctgatatgttaatctgcagggattttaaaatttcacttagataaaagaaaatcagatgccaaatggctgttttgtattaataccaggaatccaagttgtttttagacaaaataataatacctaaaatcttctgatccagaggtatgctccatttacatttgtatatacaaagaagtgctgtgttgcattgtctcaaaaaacactagctcacactgtacccattgtgaagggtgcccctgaaagttatgcaatgctgtgtgtgatggagaattttctgtcccagatgcctgtagtgtgcctcgtgaccaacattagtgtatgttgaagaacttggcgtttggagtaggaactcctgggtacaaaatctgggtctgccattggctagtgtaatcttgggccctttacttaactcttttgtgccttggttttctcattttcttaccttgatattcccactccccaattcagataactagcattttcacctcattcatggatgctcattattgatattcaggctccaaaagctacataaagttacaaagcctagaaagagtgccagataatatgaagtctcttctcaggcaagtccgacctttgggataggcgcaactatgacttctttgagtcagtttttgttttcaatttaattttgataaacattgcccaaaagcatgagatatattatgattcagctgcctgtgtttgtctgtgagtgcatgtgaaaagcatatttttacacaaatggacagtagatttgtatattgttaaat

SEQ ID NO: 34670 - DNA, 1063 bp, Homo sapiens
ccaatagagacagaagtgggaataactagaaaaatggattttcttaacagcatcctggatgattcccaagaactgaaaccatagggggtggcaacaaaagtgactaatgagagcgcctggccaggaattaataacctgaaacagctgctccagttctgctctcagtctggctctgaggggatagtggtccagtttgcttctgcaacaaggccatttagcttagttttaaataatctgggagatttgccaaggcagaatatagtgggcgactgtatagcaggagggagaagttgtagcaggtgccaggtatcttttgtgtctccatctccacggatatgaggtttctgaacctaaaagtaaaggcagttcattacccattattttcatgtgtgctaaagaaatcctctgcagcaactaatagtgagcgttctagccccacatttgtaaatatgagccagcaaccaagaaggatcatcagacatttgagaagaaatcaacagaatgagaggccaccaaaccagtcccatggaaccactggggaaaagttaacacaggaaaattctaattcatagtctcagatccaagagcagagcaactgattaaagaaaaaaaaaagcatctaatgggaaaggttgagcaaaggaggagttcttacaagttaagtgtgggattataatgttaaaaagctctggtgtgggccgggtatggtggctcacacctgtaatcctagcactttgggaggccaaggcgggtggatcacttgaggccaggagttcgagaccagcctggccaacataacaaaactgtcaagtatggtggcccatgtctatgatcctagctattcaggaggctgaagcaggagaattgcttgaacccaggaggtggaggtttcagtgagccgagatggcaccacttcacgccggcgtgggtgacagagcgagaccctgtctcaaaaaaaaaagtgctggtgtggggtcagtaggtgggctgaagggagaaatggaaacaaccaaggacttaagaaaattagtcttctggaaaattaagcagaggatttattcca

SEQ ID NO: 34671 - DNA, 1031 bp, Homo sapiens
tgcacacaggaagaacttaagggaaaaaaaggaataaataatagtagttaccaaaaatataataaaaactaaataacacaaaatattaaaacattgtgtcatctggtttaagtggtacttaaatagaaagccttgacaaaacagaaagccttaatgtatgtattagaaaacaagcaaacttcaacgttattgagctaatcacgtaagagaggaagaggaagaggaaaaatagaaggaagagaaagatggtaaagaaaacagaaggagaaactaagaaacagaaagagaaaaactaaggtaagattagaaataataagatagaaaaaaaaactcaggggaacgccccggtggagaagctgaggtcaacatcagatttgaaatatttaaagtggatacaaaactatttcagcaatgcagacaattaagtgtgttgttgtgggcgatggtgctgttagtaaaacatgtctcctgatatcctacacaacaaacaaatttccatcggaatatgtaccgactgtttttgacaactatgcagtcacagttatgattggtggagaaccatatactcttggactttttgatactgcagggcaagaggattatgacagattacgaccgctgagttatccacaaacagatgtatttctagtctgtttttcagtggtctctccatcttcatttgaaaatgtgaaagaaaagtgggtgcctgagataactcaccactgtccaaagactccttttttgcttgttgggactcaaattgatctcagagatgacccctctactattgagaaacctgccaagaacaaacagaagcctatcactccagagactgctgaaaagctggcccgtgacctgaaggctgtcaagtatgtggagtgttctgcacttacaaagaaaggcctaaagaatgtatttgacgaagcaatattggctgccctggagcctccagaaccgaaaaagagccgcaggtgtgtgctgctatgaacatctctccagagccctttctgcacagctggtgtcggcatcat

SEQ ID NO: 34672 - DNA, 1069 bp, Homo sapiens
ttgtttaaaatacagtagtgaatagaacagatatggtctctactgtcatgaagcttttattatcctggggaagtggacattaaacagtagataaactattaattacaattggaaaggagagttttccataagagcaactaataggaattctgacctcactgcaagtctcagaaaaaatgtgattgttgagcttaaggttgttgtagacagtgtgtgtatgtgagaggcttgggagtggtgcagtgtgaatagggtgtcccagtagcagggaaagagcatgtgcaaaggctttgggaaggaaggtgcacagtatatactagactaatagaagctcagtgtggctggaaaagagagtcacagaaagaatgcgatataagagataaagcccatgatgacaacaggcccagaccatacagggccttgtaggtcttgttaatgatttaggtctttcattaaaagttatgagaagccattggaatattttagaagttaatggacgtcattggattcctgtttccttagcaaagactatcctaacaacaatggaagaatagattggagaagaataaacatggacacagatccaagttaggagattgtttgttatactagtccagaaagagaagctggaggcttggcttaggacaatggaataaagaaaatagattacagagagatttaggggataaaaattaataggacttgagtggttagacatgtggagaggaacaagagaaaggagtaaagggaggtagttaaatttctgtcctaaataactggctagatggtgttcatttcactaatacaagaacattgggaaagaaccaaatggggagagggcaaggctggagggtcgggcttcggtaatgttggtgtagtgtgaggttcctcaggcacaaccaacctgagatgtcaagtagacagttgattatttgcacctgaggctcagatgaacttactttcctaataaaaaatagaggcgagcatgttacatgtggtagaataagaccagacattggtaagcttatcatccaggaagataaagggtctgcaaattgttcagttacat

SEQ ID NO: 34673 - DNA, 1033 bp, Homo sapiens
atcctcatgaagtgtttcaaagaaatagagcacctttctgtaaaaatagatccacgtaaagttttcaaaatattcctgagtctggcaagggtgggcctacctgaagtttctcctgacacactgttaattagctgctttgtaggtaggcatgtattcttcagtttgccagaaccccttgcatgccttcatttagtctacctgtaggcattgttgggtgagaaagggttttgaagtgggaaagcttgcaaagactgcttttaacggaaagttttcatgggcaggattgagaccaagaggaaagaaacttcaagttaatggactaccttgaaattttaggcaaaacctgtacctgtgtcatgggagagactgggattatggccacacttgatctgaagttgaggtcaaacttggtgatgttgccttgaaaatagagattttcatagaccaggacgaagatagaagggaaagttacaagggacttcagcttaaatttagtctctcttatcttggcacagagggatgtatctgttaatctgaggtggatcaagttcaggcttgagagagggagtaatgcatgagactttgaaagtagtttgattgtgagtaagcaagagatggtgaaagagatgccttagatcatgggcatacttagatcttacaattttgatgatgaattcacgctagcctgagaactgaagtggaaggctacccctggttgatgatgggtagcagggatgtagaaaagtgctaaagtctttaagatcttgccctttaaaagaatcatcaggtggggcagatgattaaagatcattacttagggtttaatgcgttcagtgtgtttagatttgcgtggcagttatacccataaactcatcaagaaccagtggattttctgtatgtcatgttctgtggtttttggttagtagcattgatgaacatactctacactcaataataaacatgaagactttgctgagaggtttcttcatttcagctcatagatttgcaacttatgtaaagaattgttaggcag

SEQ ID NO: 34674 - DNA, 1049 bp, Homo sapiens
gcctgctcttggagcataataggtatagacaaatgggcatgcctgtgttctaataaaactttccttatggatactgaagtttgaattttacatgctactcatgcttcacggaatgttttttgtatgatattttttctttctaattaaagataaataaaccattttggattcacagaccttacaaatagaggctatgagttggatttggcccacaggcagcagtttgcttatctctgcttttatcagacagtgataaataagtatagccatagaatgaaaagtaaaagggaggcctgcctcttcctaattatgtaggtagctttacaactagcaagtcagaagcattgtattaataatatactgggttttggtttcaggtggcacatttagaacgaacagggcattacttaactgtgaaagataaccaggtggttcagttgcatccctctactgttcttgaccacaaacctgaatgggtgctttataatgagtttgttctaacaacaaagaattacatccggacatgtacagatatcaagccagaatggtaagtacaccttttgttctaacagttttttgttagtactttgctcaaaatggaacctgactgttgctagagtcatggccttgcattcactcattgagaatttatatttcagtgtgtaggtatgagggaattgactggatggtgtgattaatctttcacacccttcctttgttaagtggacagtgggattgttgatatttatgggcaggatttgaagccaaatgtgaagttacatttgaatagcatgaaaagtttcttcaggggctgggcatggtggctcacacctgtaatcccaggactctgggaggccaggatgggaggatcacttgaagccaggggttcaagaccagcctgtgcaatatagccagaatccatctctactaaaagatatataggtgtgtacaaaaattagctgggcatggtggtgctgcacgtctatagtcccagctactggggaagctgggcaggaggattgcttgagcccaggagtttgaggttgcag

SEQ ID NO: 34675 - DNA, 2278 bp, Homo sapiens
gaaattagattttccctaaaggagaagaaatattgttaagaaacaaatgaatagctattcttacagctaaaaatagaaaataagttcttactgacgattaaaatattctctgctactagttttagcacgggagagaactgactccctattgctgagtggtttattgaacttaatgctgcaaatatttcaaaatattctgtggaattaaaggataaattgaaaaaaatttaaatgtaaaattatggcttagtttagacgtatggtatattctaatggtgtgaattttttatttaagaagtagctaaaatgttttcttgcagagttatgactgatcagactcagagcagatgggcagggcagtattgagtcactttaattaaattgtagcttcatttgcggaggtggtggtaggttgttgtctgcctttcttatatgttgttttatagattctcccagttgtacttctcccaagattttagtttttagagaaagtgtggggcaagaactaatggattgtgtacttacttgtctatctgcctagtttttatttctctaggttctcttatcagatatacttacatgattactgttgtttgagtttagaatattagctctttaagaagtttgttgttgtgatgtagttgtaatcttccaactacatctcagttttatttgtaattaaaaaaaacttatttttatttattacaaataaaaacctttagtttgtcaggagaatgagcatttatgtgcagcaatgtaaatggactgtttttaaatggtccatttataggaaaagtgttgaaataagaggcaagtaagaagtcagggaataaaaaatagtttgctgagcttgtaatgctttgtttgacattaaaatagtttttgaagttttgaggtcctgatactaacagtgcaaatctagaggcctttgagagcactacttatttattcccacttaactctagtggctagttcacattaaaattcacagctgtgagaagtttgtgtgcttttatgaattaccttgcttcaattaaattaagcaagagttttaatatttattatgatcatgttttgttgtcactatttggctattttggcatctttttaaaggggaaactgtatgggaaagagtaatatgatactgtattttatcttgttgttgattattcccattatcttctatccgaaccgataatttatgaattttttcattgacaaggttttaagagcttttaaaatgtgttgaaaaagtcccaagctgttaagtatttttattttcatactgcttttatgactatggaattgctaaactgaattaaggaaagttgtatttcaaaaaatgtagtacatgctttgtaacaatttaaagttttatgtgaattaatattgaggctctaaacaaataactgtagttacatatcttgatgacccttgatatgattgtttcagactaattgtcaacttttgaaatattggactttgcttttatattgaggttttgattcaaataagtttgttttttttcttttttaaatttgggactttattttctaatccttttgttaaaatgctgaaacactaggctgaatatcccagcctttttgaattttcttaattcaaaggcggtttaaccttccaccactactgctatcatccaaacccaagaattcttgatatttttatgtttacatatgcttctgctcaccggtgctaatagtgatacccaccagttggtaatagccacagtattagggaaaaaattctgatagaaacatggcagtagactggtttcaaagttgttgttagctctgcagtgggcaagcatagcttcctaactttcacagccattcagtagatttagtggatgcccttttgaaaaattacagttagctaaaaggcaattgacaccgttattctggttattggtagagctatcagcactggtttttttaaataagttgagctttttagtatcctgatggccttcagaatagctgttttgatgcctacttttagatctagttaaaataatcaggtactctgtagctttgaaaccctcttgtcttacagatgtggttaggtgttgatgtaccaaatcaaggtagtaaacaatccaagatgcagttggaggccatcctgccctgccctatgctctgtgaactgacctagctaggccttgttcctctatctgtgaatgcgtgactcatcgatatgggcgtttgtgttgggcccataccaaccttgtttagtcccacagtgttttgttcgccccacg

SEQ ID NO: 34676 - DNA, 1042 bp, Homo sapiens
ttgattcttactggtcataatgtaaatcccttgacaaattcaaggtcattttgtctcctgatgggttcctggttgtatggtgtgccatttacaattagaacatggttagggcttgcctcactcaactgctgaagtaccaaagaagcttttatcttgtcatttattagttcgcttttgcattgtgtgtgtgtgtatttagccttagctatttttagtccttgagaaaggcctaaaacttgtgcttttttgttaaggactcaatttaacacttgtattttagggtttgacttttggctggcaataggctcttactaatatcaataatgacgagggtttgccaagttggcataaatcatttgattcttaaacacttgcagaatcatgtatccgcgaattgttaagtattacagaatttaatacactcacccagacaaaaaacatacacacaggatgaaattattttgtggagaaaaattaactttttataatggtaactaaagagttggtcacatgagaaatttttatcacattgtattatgttatagaagaaatatgtgaaatgtattttttcccagaacaacttttttaaaagtgattttcttcataaatattttcagaactatggttttcaccccagaattccagaaagccagaagacgtcttctgtatttacaggcatgtagttggttctgtatagatttgagatagggtctcagtctgttgcctagggtggagttctgtgccatgatcatagctcactgcaacctgaacctcctggactcaagcagtcctcccaccttagcctcctcggtagctgggactacaagcatgtgccaccatgcctggctaatttcttttatttttttgtagaggtggggttttactatgttgtccaggcttgtctcaaactcctggactcaaataatcctccttggcctttttaagtgctgggattacggatgtgagccaccatgcctggcctattctgtatagtttatagagcatttccacatccttacataatttattccctacaaccctg

SEQ ID NO: 34677 - DNA, 1034 bp, Homo sapiens
gatatagatatatatatatatatatatatatatatatatatatatacacatacatacatagagagagagagagagagagagagagagacatatatgtcttaaatatttatataataagttaatgcatcctccaggcaaagctttaatttttttttttttttaaacaacatggggtctcactatgttgccagggctggtcttaaactcctgggttcaatcagtcccccctcctgggcctcccaaagtgctaggactacaggcattagccactacgcccagccctcagcctgcctagttttcatttgtcttgaaatcatgtgtactttgtatatctgtatttgttttatttttaaaacgttgtgtttgtttaccattgagtgaaactggtgtacaacaaagatgtcctgtttgtgcatccttttgtgtacttctcgtttcattgagttcttctttgagatatatgggcccatatttactacagttacacatctgagctcttgctgtcgttgaagtaaattaaagtttttgtttctgttttgctttttgtgttttaaatccttaggatgctgaggagaattttgtcttactgaaaagagtgactcagcagtggctggatatgtgatgatggccacagctggtgatgggctcactctgaggactgatcatgagcttataattcaaaactaggggctatattgccactttgccatccagtgatggtgtttcagccgaaactgtaggacctcttgctgggaaatcatgttatccttgccttgagtcaatttcatcttagaggttgagaaaagcactgatgtagcttccctggacagtcctagggagagtaaaggaagacttccttggcagttgctgcatcattttcattatgaggaagaacattctgaggcgcagcatgttaagcacaaatttaaagttttcatacaagcctggcttatagaggagggatctatacaagttttactgttcatatgtaattttaaacttactgtttgtgtctaattgtgaaaaaatatttg

SEQ ID NO: 34678 - DNA, 1778 bp, Homo sapiens
tgtatataaagataaacctgaaagatcagttgtaaatagaaaaattatacctggacatttaaatataagacctataggttcatttattgttaacattaatcaacaccattttgttgagtatgggttcatttgtttggaattccatttaattctaaagctggaatttaaactcaaacatttagaaaatacacaagttgtttttctggaatttaagacagttcaatcttttggaatgcttggtttctaggctcttttaaatctttcagaattgtctcacagatttgatagttctgtgtgtgtgaaagattcatcttgttctaaacttctgaaacatatgacttggtgttcatatatatgactcttttctatgcttggggtttatcatttcatgtcaactgtaattctcttgacccaactgatggagacaggattatgtgtatattacactatgttttataaagtgtatggctatcccaaggatttatgagttacatggaggctagttaagagtgtggtatagaaccgtttattgaatatttcccaagtgccaggcagttagtgtactgaggactttatatatgtacattgttttattttaaacaatttttaccctgttcacatttttacaaggggaccattacggaagaaattgtccaagatcagacaataataggaaaacagggacttaaacccagttttgtcttgcagcaagtatgtattcttaacctctgtgttttatttccttcatcattgttcctcatcgctccatgtaattctctgagtgtattgtaaagctttcctaggtaatatggagaacagtaaatctaattactcagattaaacagtgccattcatttataatagatgcctttttcaggttgctttatttatgcttttttaacttttaggttcaagggtatatgtgcaggtttgctgtataggtaaattgcatgttgtaggagtttggtgtacagattttttttttttttttttttttttgagacagtgtctcactcttccaggctggagtgcagtgacccaatctcagctcgctgcagcctgtgcctcctgggttcaagcgattcgattctcttgcctcagcctcccaagtagctggggctacaggtgcacgccaccacgcctggtgaatttttgtattttttggtagagatgggatttccacatgttggccaggctggtcttgaactttgacctcaagtgattgacctgcttcggcctcccaaagtgctgggattacgggctggtgtacagattactttgttactcgggtaataagcatagttacctgacaggtagtttttctgattctctttctcttcccaccctccatcctctggtttgttgttcctttctttgtgtgcatatttactcaaagttgagctcccaactgagaacatgaggtatttggttttctgttcttgtgttagtttgcttaggatgatggcctttagcttcatatatgttgtcacaagaacatgatctcttttttatggctgcatagtattccattgtgtatatgtgctacttttaaaaatgaattctacttttaatggacatttaagttgattctatgtctttgctattgtggatagtactgcagtgaatatacacaggcctgtgtcattatggtagaagggtttatattctgtatacccaataatgggattgctgggtcaactggtaattctattataaatctttgagaagttgccaaactgctttccacaatggctgaactaatacaatcccaccagcag

SEQ ID NO: 34679 - DNA, 1034 bp, Homo sapiens
acacattcattctagctttctgtgagttctgttgaggatgaaagaatattccctttaaaacttgtgaaaatttgaggaataggcaatatatttttagttgtctttattttctattgttaacttaggcattttttcgtgattaggtatctaactctgaaatacataccaaatgtattttagctgtttacactaacaaagctgtatggtttgattgtggtcttaaacatttcagctctctttaagagtccagggtttgatgtttcctttttgccctgtttgatgtattgaacattgaaacactgtagattctaaattattcaaaatatgttccctttccttgtgagcatttacatctagtagtttgttgtcattgtaaccagtattttgctatatgtagtgctattgtgattacagtaagttagtgttgctcatgttgtgtaatatggttgctaagaacataccaggttgaactagagcctgtctttgtttattccttcaccaataaaagaaacattatgtaaggactcggctaatatcactggctcttcactgacttggttggggaggggaaaactgtcaagccaataaaaggtgatttgaatgtatagagatttcacagaggaggaggtatttcatctgagttgagaaggacggagagactttgataggcagatggactagccagtagcaaatagtatcaatcctttcctgatactataggtagatgagctggtttctattaaggttgaagttctcacactgtcttaattgacagcacacgtaatatctcaataatttcttcgtagtaccccagacctaaagaaatatttcagaattccatttactaagtagttgggtcctaataacctaagtatttatgtttcttttaaaaaatactacacatacgttgaaagaaaaattatttcattcataaataaccaccattatttattaagtgtgttaatgctatttgatcactcacagtttctcaaaccttgataacagattgaacactacctcttttatttcctgtt

SEQ ID NO: 34680 - DNA, 1081 bp, Homo sapiens
ggccaggagcagaggctcacacatgtagtcccaacactttgggaggctgaggcaggaggatcacttgagtccagggtgggtaacatagtgagaccctggctctccaaaaagatttatatattaaaaaaatgagccaggtgtggtggtatgtacctgtagtcccagctacttggatgaggtgagtggatcacttggacccaagagtttgagactgaggtgagctaggattgtgtcactgcgctccagcctgggtgacagagcaagactccatctctcttaaaaaaaaaaaaaaatggtggtttgtgaagagaatcaaaaggaaatagatcctagagcatagcctctagggtcagtgtctgagttgtcctagctctgcccacgtattagctgtgacattaactatgtgttaagtagccctcatgtgcttgtttctttttcaaaagatggagctggtactaactacctgatagggttgttctgagatcaggtatagttgtctgtgtacaactcttcgtcatttatggcactctgtttaggggtgcatcagtcagcattgctgattcttgctgctgttggtgatgatggtagatatccagttggagaaattattggatctttttaaccagttaacccagttagagagggactcaataaaaccaatttaataaagttccttttggcacaataattgaattacaattggggatgtaaacttaaaccttgacgtgacttgtcaccggaatgaatcaattcaagtattcttttagggctggaggtaaaggtgaaacagatgtggcactttaaggaccattaattatacaaacaattataaactaatttattgaacatctgttatgtggcagtcttggttctagttcatgtgtagcacataagttaggtaagggtaattttattggactcttaaaaagaggtgggaataaaggataaatgtggttatttaacactgaggcagtttctgccagaggactaaaaagttactgtggtcaccctagaagtagaattctattggcttttgctaattcctagaaagctaacttggtttgctgaggctctacatgtt

SEQ ID NO: 34681 - DNA, 1050 bp, Homo sapiens
agcagtgtttgtgctaacttctgaatatacttttagtgcacaaaatacctcttcacaaattgaaggagaatttgagaaagattgagatgccatcttcttttactcaatttggacctatcctttcttcatcctaccctcagtatctgatttctgttgtctaagtaggaggggttttacttgcagcagactgagttcttgtgttacctcacctaatgttaaaagttaaggaaggtggggcatcagcaaggaagggaaagatgtttgtggtggagaatgggaaacccttgattgtagggtattttttattatttctgatagttacataatccattggactttttattcatttgaacgttggacatttactctctttgtgattataacgctaccgtgaacattctgcataaaattcagaatctgaattctaaatttttgtttttaggaaggatcgagatcgagaccgggatcgtgaagatcggtctaaagatcgagaccgagaacgtgatagaggagatagagagcgagagagggagaaagaaaaggagaaggagttgcgagcttcaacaaatgctatgcttatcagtgctggattaccacctttgaaagcttcccattcagctcactcaacccactcagcacattcaacgcattcaacacattctgctcattcaacgcatgccggacatgcaggtcacacgtcacttccacagtgcattaatccgttcaccaacttaccccatactcctcgatactatgatattctaaagaaacgtcttcagctccctgtttgggaatacaaggataggtttacagatattctggttagacatcagtcctttgtactggttggtgagactgggtctggtaaaacaacacaggtgagttattgtataccatggtacatatttcatttatgtttaagtttaccaaatgttgcatatttgattctggtggtcatttcccttgtctgtcctatagaacatcttgaagaatagctgatttgatgtttaattggcactctgaatttcagagtggaaatcctatagagaa

SEQ ID NO: 34682 - DNA, 1055 bp, Homo sapiens
atagtcatggcctgaaaagtgttatatgattctcattcttcgctgccatccccttctgcttctgcttctcccagaccctgaacccactgtcagaaccatgcaaagagagagcacctgtgctgtgcaagtaggatgttgctgctgcttgccatagagtgcgtgttggtgttcagggcagaggaatcaacagatgggcaggcggatcacctagaaaccatcccagtcagggcaggtttcaggcctcagttgagcgttcatgaatttcaagggcactattgatgcggcagggcaatcagaggccttttgtagacaagcgtgttgcgtaagagcccaaaggagcagaacaatgatttgggggataacattgctgcagagatggaaggcagaatcccagcagcagtcgggtgaaacacacctgggaagactctcaggcaggcttgtgttttctagcacttagcttttctttaatgccatctgctccaaaataagagaaagggaaggttttgttcagacttaggcagaatgcttccacaataattgcttccagagctctctagatttcatttttctaaagttaatttctttcttgttccaaaattcagggattgcatcaggcagtcaatggcctgggatggtattaccacaaattcaagaaaaattacgccaaagcagcaaagtactggttaaaagcagaagaaatggggaacccagatgcgtcatacaatcttggagtcctgcatttggatggcatcttccctggagttcctggaaggaatcaagtgagtaggacttgagacccactctgcaactagtcagtcacttgatcatgaagcatttgttgaaggtacactgtgtgcaccagacccaaccccagacacagtccctgtcctcgaggagctcagagggtctcgtaggaaaacaagatagtgaagaggaaagggtggcatctagccaagtgccaagtgtgtggcaaatggcatgacccaaagctctggagctgggaaacagtgaaagccaaagcagccaggaaggcttcttggaggagggaggcttga

SEQ ID NO: 34683 - DNA, 1033 bp, Homo sapiens
ttcacggaatgaagaaaaaaagaaacatcatgttggacatagtttttaggcaggtgaaattttagtcaagttgacatttaacttaacatttacatcaacgttatttacatgtacatttacatttaactcacatcctaagttaaatgtaagtcttaagttaaaagttaagtcttaagttaaatgtaaatagtatctttgcaatcctatatggccttttgtaacacagcatctagcatagtgccttgcacataatggaaagtaaacattcgttggctgaattaacaagagatatgaataacaaagatagactttagaagactctaacagtacatctagggccataaaacttgcttgtttgggcttaaatgatgatcagcttatagattcatgggagaattatgtaaaaggaagcatcatatagcttaaagcagttgtgtaaacaagtctctatccgcgtggtaaagtacttattaaggcaactgattgacttttcattgagggtacgtgcatcagggtgactgtgaactctggctttagtgacctttgaagcagggctcactgcttggctctgcctcttgccagcctttgtaactttagacaagttattcttctccaggcctcagtctcttcgtgtaaaaaatggggatgctgaaaatagtaccgaccttataaaagtgtaccaattaaatgacataatttacataagacacttaacccagtacttggcatgttgtaagctctcaataaaagttgactcattctttttatttggagacccatgagaaaaactggggacaaaagatgtctagaaagcatctaaaactaaggttcttttgctcaactttttagagcagtacctaagaactgtttgtgagataaaacacattcttctttagggagtcttagagggggaaaaggtccctctggaagtttcagtggtcctgatttggtgatgagttacactgagtaaattactctcttgaggcgatttctaagctacatacagcacatcatttccccaggatactaggct

SEQ ID NO: 34684 - DNA, 1036 bp, Homo sapiens
ataccaaaagcaccccccccaatatccctcctctccaaaaatatttcctggtattgccaaatgctcccaagtccccagggaggccaaatcacccccagctgagaaccactgctatgtcaatgttattgctcttattactgggcagagataattccaggtttccgttggatggttgtctggaggtgacgaagccccatgccccaagacccgcaaacaggagagggagacgcatgttggacagtttaggctaaatggactaagaccacatccacaccaaaattgtctttacaagagttctgatcctacttaaaaatagttgtgctgattgggaacaggagtgcatcctttccacaaaacattcttttttaagtaaatactgtctatgagaatgttttcatgttattgttgcagctcaaaattctgtttataagaatttagaatgatttgttttccatggaggcctggcaatgaaatctaattaaaaaccccaatcataagtccccttaccttaagactccctgggtatgggcgctgcagaaccgctagattcccgcacagtgagcctgttctgctgacctccgttagacttctggggcccccatcagtggggagagagggggacccaaagctggatttgccactttaggacccaccgttcatgactaacctgccattggggtcttctggtgccaaattagaacagcaccaaggagcttcccccgagggaccatacctgccagcctccccggccaccacagcctctgcttccagaggcacatggccagctgccttcctcttctccctgcctttccctggcctaggagatggcagggagggagaaccgaagtttaggtgaatttctagaaccaagccctgggccccatttgccttcagcacctctttctctaggtcacattggaaggactggggagccttctgcagaggtggggcatacactccttaaggtcatctctctacctggcacagtgcccttgcttggggctatcataacatcttccagcaaccctgggagaaa

SEQ ID NO: 34685 - DNA, 1050 bp, Homo sapiens
attagaaagaatactttttttaaagttgaatttttatcgatgtgaatcatcctgttttcttcacccactggactttgtgtctttgaagcggattgggcagacttggaggccgagggtggggaggccttgggatgtagctggctccttctatatgcctgcccggaagtgctcagagcttttgttcttttctttcgtagacgaaaaagtaatacgtgtacacggtaacaataaaaaaatttaaatagcgtgaaaaggtttaggggaacgagtaagtttccacacccctccccctcgaatcttctggtccttttcccagaagtaaattcattagcaacagtttcttgtgtttccttctagaaatgttctctgcacatacaagcgttaagttgtgtcccgttttcttcctgcacaaatgagaggattctagaaacagacctgcgctcattaacaatacagtagatttttctgtaccaggacatgctgccgacctcattcttttcaacagctccttagcgttgcatcgcctgacagaccgtaatttatttaacctatcttttgctgatgatcatgctgttgcttttaaccacaaggcttcactgaacatccctgtacatgtatctctgtgcacactcataagcatgtttggaggataaattactaggagtagaactggttttattcttaagattcctgccatcgaatgttccacagacttccttaggaacctgcttcactgcctagtatcctttctggaggaagttctgacctaaatcatatctgctagaaaatcgagtttttattctcagactttggctttaaagaaaattaaacaccttattggccactggcttttgaatgtcctgtgtttggaaagcattattgagctgcctgtgctctggctttatttctccaggttgagaaatcttcgcttctttccccgcagattttgcttacagacttgtagtcattgtgattccttgcattgagaccatcttcagcttctctgaaggtgggctgatgatctcagtggcttcattgctgtgtgttcga

SEQ ID NO: 34686 - DNA, 1066 bp, Homo sapiens
gtttaaacagatgatccctgtacacagggccctgctggctacccacagaagcagaagtgatgtagtagagtgttgcgtgaaacattcatatacaaatgggccgggccgaaaagttccacgtggacatctcaagacctggcaaggagggggactacttctggacagttcaggaagtcagagtcaggagagcaaagcctaagggcctaagtggactctggaaacagagacagataatgatggagcaagtattcctgtgaaagttctgtgtacaccaagggggattaagagaacagagggaaaaatgatgccatggatagactcaagtgagatagtgaaggagtgaggaagggctccggaaagagtaattttagaaaatactgtgatgtggaaaataactagagcatggatgaatgtcttggcagatggggaaggaatggatttggggacctcatggtggggggaaatgtcagtgcttcctgcctttgtatgcttccttcagatggacttctgatacgcttactgtacaagacagactttgataaacaagagagccattttgcaaaggacacaaaaggccgacttaaaaggtagtctccacattttgttctgaagatctagccgtttactagggatgttgctcttgggtctacactacccaagatactactgaaggcaaggcttcttgatcttggagaagcttggtgtgagaattggggaaaatgtaaatatccatatgaaacacttgaaaaacataaaacaatagagagaaaacgcaaatgtataattgtgtgcattttgctcaatcaaggaatgctacctggaggaagtggttggtcagggggatggggctgggcaggtgcagggtagagatggagcagaatagctgggcaggatcccaggaatatgtagactctagaggaggaaaggtctttcataatttgaaagcctacatggtaataacgatagcttacattgtgctatacattgtgctaaatcgtttataggcattatccagtatttatcttagcaacagccctctgaggtaggagctactataatctccatt

SEQ ID NO: 34687 - DNA, 1025 bp, Homo sapiens
atggtgaagcccctcagagagctgccttcggtggaaacgctgttaggtatcgagttttcccgctgactctcgacaaacgctaacaagggactcgaggtgctgagaactttggaaacacctctaaagtgatatagacaatgtgatggctccattcgatcaatgaagccctagcataaaaatggggtcctcaaattgtttaataaagcactaggaatagaagtgacaccgtggaagtaactcattagcaagacccttcctccctaaacccaataaaacatgagatagtcctcaagtggtgtagtgaaggtggaaaattttattgctgctttctctgggagcagaggaaggaagtctttttaagtgtcttgcatccaggatagggagttaaaaactctagatttaactaacatagttttttaaaagccgctcaacagaagcgagttaactttgcccgctaaagcccggtgcaatcagagggcgtgtggggtgagtcgtttatattattaaataggatgtgtttgctctatactgcttaatttgaggtgttacatgaatattattgatcacatgataactgacagatgctgaagcagcaggaatgttgacattttccacaaaaagaggactagaattgtgatggagctaaagtaaagatcataacaattgaaaatggtgagaaaatgatggctattatcaaaaagacaaataagtgttgatgaggatgtggagaaaaggaaaccctggtatactgttagtggaaatgtaaattagtatacccattttggaaagtagtatggaggttcctaaaaaactaggaatagaattatcatatgatccagcaatcccacttctgagtatatatccaaaggaatggaaatcagtatgtcaatgagatatctgcactctcatgttcatttcagcattatttacaatagccaagatatggaagcaaactaaatgtccatcaacagatgaatggataaggaaaatagggtatatatacacacagtggaatactatagagc

SEQ ID NO: 34688 - DNA, 1020 bp, Homo sapiens
agggccatcgtcctccagaccctggaatgatagagtcactggaagcttgcaccttgcacttgtaaaagctgcaagcactcaacactagcccatgagagcagctgtgggggctgaaaccttaaaaccacagcagcagagctactctaggccttggaaggctaactgttgtgtcagtgtgccctggatgtgaaacatggagccaaaaaagattattttggagctttaagatttaatgactgccttgctgggttttagaattgcatggggcctatggctctatttttggctgatttttcccttttggaatgagagtatttacccaatgcttgtaccttcattgtatctttggagttacctaattgtttttctttttttttttaatagtagaagggacttgtcttgttctaggtgagactttagactttggactgcagagtaacactggaaagaatgaagattttgggggactgttgggaaagcatgcaatgtgagaaggacatgagatttgagaggggctggccagaatgatatggtttggatgagtctctgttttcttctagtatctttatagatataaaactataaagatacttaaaaaaataggaaaaactggaaaaactcttctggactttggtctaggcaaataattcattactaagactcaaaagcacaggcaccaaaaccaaaagtagacaaacaggatttaattaaattaaaaaacttctgcacagaaaaacaaataattaattgagtgaacagatagtttgcagaatgggagaaaatattttcaaaatatgcatcaagcaagggtctattatatagaataaatagggaactcaaaccagtcaacacacacacacacacacacacacacacacacacacacacaaacccacaaataatcacattaagaagtaggcaaaggatatgaataaacatttttcaaaagaagatttacaaatcaccaataggtatataaaaaatactgaacatcactaatcatcagataaacacaaatta

SEQ ID NO: 34689 - DNA, 1044 bp, Homo sapiens
agcattcagggtccctgatgtagttcaagcctcaagaaaagacagtaagagaagtaactacaacaaaagtttatggttaagaatacaaagtagatgctggagatgtgatctcagggggcctttcatttataatagacgctgtattcacaataatatgagaaaaaggttaaatacagtaaacacgatagccagttctggaaagataaaaacagtttgacagaaaaggagaaagtaactcaagaactccaccaagggacaaacagaggaaatgacactcggatatctctaaatccattgacctttcatctttttaaaaagggtcttctatctgtagacgtgttttctaggcctttatgatcaaccatttctctaacccctttcgctaaatttgatacttcagtcttccttttctaaataattactacaaacgattgtcctttaaacatatattacttgaaagagtaaacatatctgtgcataactattccaagtatgattctgatccttgagactctgagaaactttagatatattttacagccttaaatccatgcttgtagtattaacatgtttagtagactgaaatgactaaattattcattgcaataacagcctttttgatagacattaaaactcatcagtttaaataaggaaaccacagatttccttttaagcaggtaataactgcttgcatcagtggttatttaattggtttctagccaagacatagaataagttgtgctgtttaaatcaagaaatcatatgcaaagctatattttacagtgtatctataaaagaagcacacagaaactaaactaagttgattcatactatctactggataactataaacatttccacaaggccgatatgaaaatctcatttacaaaaaaaaaaaaaaaaagaagaagctttgaaaaataaaattttaagtgtttattagctcacacgctgtctggttttcagatttcaatagagtgttttaggttttaaaataacacagaataaatgatttttaccttaagtttagcacatattgacagt

SEQ ID NO: 34690 - DNA, 1072 bp, Homo sapiens
cctttactccatcagtcttatttccattcaggtaaatgaaaagtcaatattattaatcagattagcatctgtgtatgaaagtctcagcaaatttttaaaagcctgtgagatgattacggctttatgacataatttccatttcccttgaaatgtataaatcaggacaaaatattccctatgatgtgaatacttccatgaccacattgatcataataaatagacttagactattttaaagtactttaaatatataatagatttttctaaccttgtgatttaaagcaagaaattttgtcgattattagttcttaatgggttcttgttgtcagttgttcatttggtgtggaataacatagaaataattgcagcccttatctggtggtgaggacctatgttttatatgacatttgaatttgaaatcaatatactattgatgctttacaatgtaatggcttgtagagatcctaaactggaaggttaaatgtaaaatctactgactatgacaatgaactgaagtcactatttattaaggtcttcaaagaaatacaaagacattcacactcttaaaaagcaaaaaagcaaacctcaatagtagttttgcaattgcataattttaaatgctcaaggcaatatgggagatacttttgaattaaaagagactgctctgtttgttttccaaatgactgtactacctttagccagtcaggggtgattttaagtaatcttatcttggcagcaagccaatgagcccctgcacactttggtgttagacacagggcactagtgcacgcttggtctgtcagatcactcatgagaccaacactgcttagtgcaatttttaaatttctacagcagcttttatcccagaaacatagaaatgataaggatttcaaagacagtactaaaaagtgaatgctgcttgctggtgatccaattagagagaagacataagaaatttaggaattgtctctaattcctgatcattatgtttcatttatatgctgactagttaataaggatttttttattgttaaaagagagttgccataaatctttcctcattaataccaca

SEQ ID NO: 34691 - DNA, 1028 bp, Homo sapiens
aatatacccatttcttctagtttttctagtttatatgcatagaggtattcataatattctttgatacttgtttatatttctatggggtcagtagtaatatcccccttattgtttctgattgtgtttatcaaatattctctcttctttattagtcaagctagtggtctaataatatatgtaaaaattctttttataaatataatgtaataataatagcatgctcatccaaagataccactaagaatatgaataggcaagtcccagattgagaaaaatgtattaataggtgtactaatagtcccagattgagaaaatgtgttaattaacatatatcagaaaaagacttatatcaggagtataaagagctcttctaaatcaacaataagaaaagcagttcaataaaaattatggcaaggatagaacagacattacatgaaggaagatgtagaaatgtccaataacccattgattcaaaagtgttcaatatcattaataatcgggaaattaaaactagaaccacaagacactattttacactcattggtatgactaaaatcttaacagtgataacacccaatgttaaaaaatgatgtagagtaattagaactcccacataaattgttggtggaagggtaaaatcacacaatcactctgtaaaactgtttgtcagtttttaaatgaagttactaacataatctaccccatgatccagtggctctactcaagcagtacaactacttgtactcacttgtacaagaatgttcataagcagatttattcataaaagctgataactggaagcattccaaatgtccaccaataggaaaatattctattcatataatggaatactactcagcaacaaaaatgaatattaaaacaagccacagcattggtgagtttttaaaacctttgaaaccaaagaaacttgacacaaaatagtatcatataagtctgtgcataagaagtctaagaacaggcagaaccattctatggtgatagaagtcagaaagtgtttgcttaggttg

SEQ ID NO: 34692 - DNA, 1051 bp, Homo sapiens
ctctttactggataggaagcaaacatctggtaatttacattggaaacagacaatttattttcttatctgaaactaggaattgttgatgacttctgatatgatatgttcatagcaggggaaaccagtattagggaggatgtgatatatttatttaaacttgtgattttattatcagttacattatgatggatcatacaagtatgatgcttttgatatgctctttcctgtttgtctttagcctcattactttaaccgaaaacaaaaagctcaggtggtatgtgctttatgttttggatggtgtgaaagagttgaattgacttttacatggctacaacactaggaaagcagcattgacatcttcatgtcacagcttcttttcttattattttcaattatgctattttcagtgcactgagaaaaagtttgaatttcctttattccagcatatgtttctgttgctacattttattaactgattgacatattttgatcatcaaaaacttttctgtgagactttgattgtaattctaaaacttgttctttttaactctatgctaagaatatatgctgcatttaaaattatgattgcctaaatcaaaatgtgtatggatgaatattcttcagagagatatattgaagatgtcatgtaatttcttgctagttggcctattatgtcaatagttagtctataatattgacacatcatgttttttatattcccactagtagttaaatatagactcttcagtactattttgtaaatgattttagtgttttctatagaagttacattttataattttgtattgattatgaaaatattagctatgaggtatttactagtgttgatccaaaattatgagtttgatcttgttgggataaacaaaggattatgattaatttatgattattatttagtaacggacaatattaagtttgttagtccttttaaaaccatttaattgcatataaaaataagaaggtttccctaaacaaaccagtatgttatctacaaaagaggttagaggatggggatggtggttcatgcctg

SEQ ID NO: 34693 - DNA, 1051 bp, Homo sapiens
taaaatattgtttattatataaaataattttaagagcagcagaagcttcattttttatttttcttttttctatctttagtgaatcacatattttgttgtctttcatctccaagatgcctagggatgaagggagcatttaaagcaccttgactaccccaacagtcaagtgctgaatgagcttaacattttaataacaccatgtggtttcaaagacctccagaaaaaaaaataatacacagaatgtctttgtaccttcaccatctgtctagctgctacctactaaggtcttgggacactttggagtatagctgccaaactgccaaaaggaaaatcttgccacccgcaagcttaggataaaaattaaaattcaatgtttaaaataccccatagtgtgttattaggagtgttgcaataagtgataaaatgaaacgggattgtcagtactttgtctttatgtttttattcctgtattatgattgtgcacaattctttaaaatttaaaatgtttcaatgttatttttaaatatacattgccaagatctaatgactatggtactttgatgtcagttcacagtgtctccctcaatcggtctcaatcctcctcgtgcacagaaatactctggcaaatgactcctatgacctcccaactgtcaagttcccagattcacatctgggttcactttacctaaccttctgtggcatttattgttaatgactattccctttttatttgatgatcttcactctgttttccatactgcctggattctctttatgattttctgttcattttacctcttttgtagattctccttattctgttttctaaacattgggttttccttgctgcaacatcctttgccatcttttctcatgttacctgttttattttttattattattagataatctcttctattttttgtgcttggctaacatgtattaactggtgtttcccaaatatacctttgttcttcctccatctggctcacactcttacctcttttaaaacctagactaaaattttcattgtactttgtctcatttctct

SEQ ID NO: 34694 - DNA, 1035 bp, Homo sapiens
gttttatagtttgcaattgtttgaatatggtcagccctttctctaaatcaacaattaagtatgactttgtaacttttactaatctatttaacagtactttttctgatgttcttaactatcattataagctacttagaagaaagaaccatatgcttttaagtcaccactgtatcttttatgtcagagaattccaatattgctgtgtttaaaaattgataaactggctttctgttctatgaaatttccaaataaaagtgtatcataataaactatgcttttctctgacagggttcagaaatgctcagaaatcaatcacatgaatgcccataatttggccttggtcttttcatcctgtttgtttcaaacgaagggacaaactagtgaagaagtgaatgtaattgaggacctaattaataattatgtagaaatatttgaggtaattattttgtatcctgcccttgttaaaatggttataatgtcactgtttgccaacaaatatttatgttgtagggtgttattattcagatctttattcatatttagaaatacataaaataaggaatagtcatatttttttaaattatagatataagtagcttttaagctatagtcattatttaaatttggttgcatttaaaactttttaccatctgatatctgtttgacagaatatttctatttataggatttttgcatgtgttttctttttcttcatgtgtatgaattatatctacttagaagtgtgaagttataaaatgaacaattcattaataaataccagactcttaaattctgcagttgaaagccctttggttttttcttttagttgtgtccccagttggaaacaaataacattctaaaatattattattctatggtgttttactaagtcatctgttttaattgactttttaaatttccattttataaagttaatattttcatgtttcatcagaaaactgttggagtagggatgatttcttggttcaaagaagtaaaaataggggaaataagcccaggattcaaattggtgga

SEQ ID NO: 34695 - DNA, 1050 bp, Homo sapiens
acttagggtgattctgtggaaataaaaaggaagaagtcctgtgttggagctttgatgactatacatcattttgggttaggggaatttgtcagggagaagtagctgcttgtttcctcagagagtgaggccagaaactaagagagagtacaaagtgttacaaagcccaggaagagggtgtctcaaaaaggaaggatcagttaaaaatgtcaagtgctgacagaaggacatgcctagtgagaatacatactccataagataagtgatttggagtccctctggtgacttgggggagagcagaagtgaacaggcaggtactagatcagattaagaatggaaattgagtaaaccaagacagctagtgaggtcactttgtcaaagatatctggagggaggttcataggattaacgaggtaaggggtttgacccagaaagggcatatatgtgcagtttgttttcagatggcttaaacttacacaagtttaaattttgatggaaaagaaacagaaaatgggagagattgaaggtctaagagagagtacaaacaagagagcaagatccctcaactgcaaaagtaagaaaagaagaattgatggatgattttggatgttgatagttttctccatgtggtagtgggatgttgagagagataccagtcaattttcaattgctttgtgaactaggagataagagtgatgatccctgagcttctggcatgggtgatgctatgaatgatagtatcatttgccaagatagagaatatgcacttctctcccagtactcaaacatagctagttaattatagctgtgattgttgaaaagctgtttcagtaccatgccaaaatgagaaaatttcattgtaccacccttgttttcatctcccttttgatctattagccctttgggaaatgatgactgtcagcaatggtagattctgttggacttgtcagtgacagataaaattgtggcttttggaagtaacacaacttccaattatttatactgttggcctatagagatagtgtgaatgattgaaagaaagagaaaccaacc

SEQ ID NO: 34696 - DNA, 1065 bp, Homo sapiens
tcccgggttcacgccattctcctgcctcagcctcccgagtagctgggactacaggtgcctgccacctcgcccggctaattttttgtatttttagtagagacggggtttcaccctgttagccaggatgttctcgatctcctgacctcgtgatccgcccgcctcggccttccaaagtgctgggattacaggcgtgagccaccgcgccaggccgtgtagtttttttttttttttttttttttttttgtcagtgcagatgctgatgatgattgctgctgtttttattgtagccagctgcgatttgtctaattctcaccactactgttagtgctcttgtcatcttgttattgaggaaagcaggtattggtgtgttttaagttgagaagatacgcaacgaacatacacagacatatgcactttctttcaaaacaaggtaaaataaatttacatacaaattaaaatagaaatgcaattgtgttttgactctaggacagcatagatctttaggaccaaaagattccaaggttagaagtctaaaaatggatgctagcatttggagcaatgaactcatcgaggtgagtcctatttaacctgaatggggttgtgataggggttcagtttgcagagactgggaggaggtttgctgtgggtttgggtggcaggaatttttctcggggctgtttgataaagttctcaccacattatggaagtggcttatagcctttttgatagtagtaactctttgagaatgcttcctaaatgagatagttattttaaaagtatagaagatccttaataagtacttagaaaggtttgccagcttgtttttttttaatgctagaactgtatatgtgtgtgtgtgtgtgtgtgtgtgtgtgtgtgtgtgtgtgtgtttgtgtgtgtgtgttttaaacccaacatgggtaaaataataggagagtgaatgaaaacatttggaaaaatttactgtttttaccttggccgtactctgtcattaactgtgatggaggctactttgctgtgtcctgtctccatttttggctccttgttccaccaccaagcacttca

SEQ ID NO: 34697 - DNA, 1030 bp, Homo sapiens
tgaagttgtttatgaatccagccttgcttattctccataccagttgttttccattattatgttattgtttagtaaattttaataacaattataatgaatataattaccaggaagtacaagactcttccacatcttaaacatgaaagaaatactgaacagattcctaaattcaaaagcagaactttaacaaaaatttctagtgtaaaaagtaggtcatttgcatatttttctttgacttaaatacctaattgccaggtcatttgcattttcatatctgattttgccagcatatccaattcatctacatgtattccttagtctagttgctgaaaatgggtggcctttcctacctataattagaataaacttcagcttcaacacacttcaagaagggggattttacagagtaaaaagaggaaccattttcagacttaaattttgtcaacctttctgaataatgagtagttattttgatattcttctcctccatgggggcctgaggctgtacacgtaggattcatattgaaggtaccctaataacacattcacacatgaacttggaggtgaataaagaggatttatatttcaacgtacaaatattttaacccaggtattagacactaatgagttatacattatttctcaattcccataatatatatgcccttttgctgatgctgatattaaatctctaaatttagaaagttcaaagaacagaaatctgatttattgaagagtctttcaacctatgtaattaatgttccaccagtgctcacagctggaccttagggattctctgccactgtgctcgaatgacactatttttatctaagagaaaatgaatatgaaatacaaatcatttggccgttaactcattgtccccacagtccatgtgcattgcagttactttaactttcatcttaaacatgatgactaagatggccttaacgttccattcagcttgactcaatctgagacaaacttcttcctgactgtaggctcctgactcccttttcttagagcatttact

SEQ ID NO: 34698 - DNA, 1041 bp, Homo sapiens
tcaagttatggagaacatcaacctttgagtttcagagcagactgactcaaatagctcatcctgttgtccatccaacatattttgcatttcactagaaaattcagtaactatatgtcataccaagaataatataagtccgatagattattgcttggtctgggcatagctgaacgaaatgagaaacataaaattttccaggtacttctgagggtgcacatatacagtccaggtctgggttatatagagataataccaactcttttaataaccctccagggcacaacaatcttgtcatcttggaattttctatgtgttgtcttgtaattttctgattctaagatccactggggtgtggttcagtcacattccttcctgttctacttgcaatgagggtctactggctgctcttccacgctttctctccttgactactacacagtctctatgtgaagttggtattcaagaagcttattgagaaataaatttctgcatttgcgaaaagaacaatgtaagcttactgaaaggcagacttacagctgactgaggagaaaataattagtgctttaaatttctccctatatcatttagtcattcattgcttaataatgggaatatgttccaagaaaggtgtcgctaggtgattttgtttttgtgcaaacatcagagtgtacttatacaaacctagatggtagagcctactacacagctaggctagatggtacaacctgttgctcctaggctacaaatctgtaccgcatgtgactatactactgaatactgtaggcaattgtaaacatatctaaacatagtaaatgtacagtaaaaatacggtattataatcttaaggcaccaacattgtataagaggtatatgacccaaacgttgttatgaggtacatgactgtatatcaaaatcctagtttaatacaatttaaaggaatatcatagttatgaggcttaacgttttttccgaattttaagataaaaaatataaatgcattacatggatacttaaatatttaaggcattgtgaacccgcaca

SEQ ID NO: 34699 - DNA, 1032 bp, Homo sapiens
aaagcatttgataaaattcaacatcccttaatgatgaaaacccttaagaaactgggtattgagggaatgtacttcagcataataaaatccatatacaacagagctacagctggtatcatactgaatggggaaaaactgaaagcctttcctctaagatctggaacatgacaaggatgcccactttcaccactattgttcagcatagtactgcaagttctaaccagagaaattaggcaagataaagaaataaagggcatccagatttgaaaggaagaagtcaaattatccttatttgaagataatatgatcttatatttggaaaaatttaaagactccaccaaaaactattagatctgataaacaaattcagtaaagttacaggatacaaaatcaacataaaaaatcagtagtatttctgtgtgccaacggtgaacaatctaaaaagaaattaagaaagtaatcctatttacaacagctacacataaaataaaatacctaggaattagccaaagaagtgaaagagctctacaatgaaaactataaaacattggtgaaagaaatggaaaacgacacacacacaaaatggaaaggtattccatattcatggattgaatcaatattgataaaatgtccatactacccaatgcaatctacagattcaatgcaatccttatcaaaatacctatgatattcttcacagaaatggaaaaaaaaaaattttaatttatatgggaccacaaaagacctagagtagccaaggctatcctgagcaaaaaagaacaaaactggaggaatcacattccctaacttcaaattaagctatagagctatagtacaaaacagcatgatagtggcataaaatgagacacatagaccagtggatcagaatagagaacccagaaataaatccatacacctatattgaactcatttttgataaagttgccaagagtgtacgttggcaatgaatggtacttggaaaaccggatagccatatgcaaaagaatgaaacaagacccctatctcttgcca

SEQ ID NO: 34700 - DNA, 1034 bp, Homo sapiens
attcttcaatgtttataatgctgctttgtcattattttactactttaacatattgacagcctcaaacacaagcacaaagaatcatccaggcctcttttcaacctctgagacaccttgctgatgttctagttgttttagaaaagccagattctaggtacaccatacatgtaatgcaaaaggaaatattagggacagatttctgtgcaattatttaagggaaattctggagggcagaacatacctgtgtagacactgcactctctgtgagtccttaagtatctatatcttatgagccttaagaacaatcttatgggttacatatgttacattggcacaggtcaagcaatcaattactggaaagatgtaattatgatgccactggcccttcagcttccgggcctgtcttttcttatggcaggcaagggccctgctgccatgagtccgtcactctgccccaaagctggccagccatgccaccagtgactaagactacatgtattaccaaaaagaacctgaactgtcagttaagttgtcgtcccctaaatctttcccattctacatgaggtttgtaatgtattttgatatcctggttaagctatcagttttagtagagagcaagagagagaacaaatacatgtctattggaacacaactaggcccattcatttatgcattgtctgtggctgcttttgagctacacagcagagttgagtagttgcaatagataccataactggcaaagtccaaaatatttactatctggttctctacataaaaagtttgctgactccatctctacaggataaagaaagtacctgatgagaaacctaggcatgctagcagtcacacgagtgagcttggaagtgtaccttttcagacccgccaagagacacctgagtgagcttgaaagcggattctccatgccccagtccagcctggagatcactgcagccctgactgacagcttgactgacagaccttaaactagaggcaccccattatcctgcgcccagattcctggcctacagaaactg

SEQ ID NO: 34701 - DNA, 1050 bp, Homo sapiens
tagtcccagctactcaggaggctgaggagcagaattgcttgaacctggaggcggagggtgcagcgagctcattgcaccactgcactccagcttgggtgacagagcaagactctgcctctaaataaataaataaataaatatttctaaaggatctttaagctctttgtattagtccattttcatactgctatgaagaaattcctgagactgggtaatttataaagaaaaagaggtttaatggactcacagttccacgtggctggggaggcctcacaatcatggcggatggtgaagcagatgcaaaggcacatcttacatgtcaggaggcaaggcagcgtgtgcaggggaactgccctttataaaaccatcagatctcatgagatttattcagtatcatgagaataccacgggaaaaacccacccccatgattcaattacctcccacaacacgtggggattatggtagctacaattcaagatgagatttgggtggggacacagccaaactatatcactgtatcaaggtggatagctctgatcactttccgtcttggattatagtacataattcatttatacaatgttccctctatcagactataaaccctcagtagagaaagccatggtttcatcagtgtttatctgcacattgtgtcccttggcacagtgacttgcatataggtggtaccttgcatgttttaaaaaatttgacttaaaaatatcattggcaatttaaagatgcctaataccaatgcataatattataacacaacaacgctcacattttatcgattctaagatgtacgtgtattcatttaccttttaacatatctggaattggaatgtatctagcaatcattggcacatcatggttacattggcagcattattttctatctttgtgttacgtaagataatggtacatgttacaatcaatggcatctaatatttaatgaaatgtggcattaatcccatattatagtttatttcagcaatatattatgcaaaaattttacaaacaataccctatatcaaacaagtgtctacgtt

SEQ ID NO: 34702 - DNA, 1034 bp, Homo sapiens
accttcatgcgtttttattttttaaaaaaactagttggatcatattgcatgtaaggttttgaatccagcttttgaaattcaatattggatcatagtgttttcctgtatcttcacaaaaaatttcatagatctttaaatagtgcatattatttcatcaaatgaaaccatgatttagatatgtttttactatctcattgcaaatatgcaggtgttgctattttttgacttttataaataatgcaacaacctttgctatttggactaagtaacttgttcgtgattcagacatgattcagctaggggtgaaggagaagaagggatacagtgtttctcagcaaattattagtgtaaattgaaggaaagctaaacctactgaagtttataaatgttttagacattatgtatgaacagttactttgttatttaaaagctatttttcattgaattgttaaggtagatcacaatatattctccactctgcatctttcttgttagctattctttataatgcacaacagggctgtccaaaaaaactttctgggatggtggaaatgttcattatctgggccgtccagtatggtagcagttagccacacatggccactgggcacttgagatgtggctaatgcaactgaggaactgaatttttaattttatttaaattcatttggcttaaatttgaatttaaatagctacatgtggctagtggctatcttactgaataatgcaggtcttttatgattatgactaaaatacagtgcccacctttttgtagacactcttctgaatgctttacatattaatattgtttaatcttcacagtgacaccatgcagcaggcttccagttactattgctgtatgacaaataaccccaaagcttagtgggtgaaaacaacaatcatttcttttgtttaaggatttgttatacaatttgggcagggttcatcagagacagctctgatgccccatggagcatcagttgggactataggatctacttttattatggctattactggctgataagttgatg
